(19) United States
(12) Patent Application Publication
(10) Pub. No.: US 2013/0309769 A1
(43) Pub. Date: Nov. 21, 2013

(54) Identification Of Novel Cell Surface Markers For Pancreatic Progenitor Cells And Definite Endodermal Cells

(71) Applicants: Nissim Benvenisty, Jerusalem (IL); Joseph Itskovitz-Eldor, Haifa (IL); Bettina Fishman, Haifa (IL); Hanna Segev, Doar-Na Emek Hefer (IL); Danny Kitsberg, Jerusalem (IL)

(72) Inventors: Nissim Benvenisty, Jerusalem (IL); Joseph Itskovitz-Eldor, Haifa (IL); Bettina Fishman, Haifa (IL); Hanna Segev, Doar-Na Emek Hefer (IL); Danny Kitsberg, Jerusalem (IL)

(21) Appl. No.: 13/903,815

(22) Filed: May 28, 2013

Related U.S. Application Data
(63) Continuation-in-part of application No. PCT/IB2011/055283, filed on Nov. 24, 2011.
(60) Provisional application No. 61/536,099, filed on Sep. 19, 2011.
(60) Provisional application No. 61/417,364, filed on Nov. 26, 2010.

(51) Int. Cl. C12N 5/071

(52) U.S. Cl. CPC C12N 5/0678
USPC 435/377; 435/325

(57) ABSTRACT

Methods of identifying, isolating and qualifying pancreatic progenitor cells and definite endodermal cells. An isolated population of pancreatic progenitor cells, including at least 75% of cells having a TROP-2+ and/or TROP-2+/GPR50+ expression pattern and an isolated population of definite endodermal cells, including at least 50% of cells having a

SOX17+/SOX7+/GSC+/CER+/FOXA2+/CXCR4+/NANOG expression pattern. Nucleic acid constructs including a reporter protein under the transcriptional regulation of SOX17 regulatory sequence or of PDX1 regulatory sequence, and cells comprising same, and methods and kits using same.

### FIELD OF THE INVENTION

[0001] The present invention, in some embodiments thereof, relates to methods of identifying, isolating and qualifying pancreatic progenitor cells and definite endodermal cells, and, more particularly, but not exclusively, to isolated cell populations generated thereby.

### BACKGROUND OF THE INVENTION

[0002] Type 1 Diabetes Mellitus is an autoimmune disease affecting the life of millions world wide with enormous financial costs. It is caused by the destruction and loss of function of beta cells in the pancreatic Islets of Langerhans. The lack of insulin production causes deregulation of blood glucose levels, and leads to a large number of symptoms that can eventually be fatal. Daily insulin injections are the most prevalent treatment for type I Diabetes Mellitus and for insulin-dependent type II Diabetes Mellitus. However, insulin injections are expensive, cumbersome and do not enable the patient to attain a real steady state in blood glucose levels, but instead lead to fluctuations above and below the optimal base line, which do not ultimately prevent complications of diabetes. A potential cure for these diseases is transplantation therapy whereby islets are transplanted into the patient. However, the limited number of donor organs presently restricts the use of this procedure.

[0003] New sources of beta cells are needed in order to develop cell therapies for patients with insulin-dependent diabetes. An alternative to forced expansion of post-mitotic beta cells is the induction of differentiation of pluripotent stem/progenitor cells (which have a natural self-expansion capacity) of different origins, into insulin-producing cells. Various publications describe protocols for differentiation of human embryonic stem cells (hESCs) (5-9), induced pluripotent stem cells (iPSCs) (10, 11), or cord blood mesenchymal stem cells (Chao C K et al., PLoS ONE. 2008; 3(1): e1451; Santos T M et al., Transplantation Proceedings, 42: 563-565, 2010; Bhandari D R et al., Differentiation. 2011 July 20. [Epub ahead of print]) into pancreatic endocrine cells which might provide a source of insulin producing cells for diabetics.

[0004] The in vitro differentiation of cells to pancreatic beta cells, like in vivo embryonic development, is a stepwise process by which the initially pluripotent/multipotent cells, such as human ESCs or iPSCs, progressively commit towards a more specialized cell fate ultimately resulting in insulin producing cells. Though insulin is a classic marker for pancreatic endocrine cells it is only a useful marker for cells that have reached the endpoint of differentiation and are fully functional beta islet cells.

[0005] Two significant points along the differentiation process are the endodermal progenitor stage and the pancreatic progenitor stage. These stages are characterized by the expression of stage specific transcription factors. Two examples of these are SRY box 17 (SOX17) and pancreatic and duodenal homeobox 1 (PDX1), which are expressed relatively early in pancreatic differentiation. SOX17 is expressed at the earliest stage of hESC differentiation towards definitive endoderm and PDX1 is expressed at onset of the earliest commitment stages towards pancreas (12).

[0006] Lavon et al. (25) transfected hESCs with a reporter construct which included the enhanced green fluorescent protein (EGFP) under the albumin promoter (ALB-eGFP).

[0007] Additional background art includes Wang P., et al. Cell Stem Cell, 8: 335-346, 2011; WO 2005116073; Zwaka T P and J A Thomson, 2003 [Homologous recombination in human embryonic stem cells. Nat Biotechnol 21:319-321]; Micallef S J., 2005 (Diabetes 54: 301-305); Nikakan K K., 2010 (Genes Dev. 24:312-326); D'Amour K A, et al., 2005 (Efficient differentiation of human embryonic stem cells to definitive endoderm. Nat Biotechnol 23:1534-1541); Yasunaga M, et al., 2005 (Induction and monitoring of definitive and visceral endoderm differentiation of mouse ES cells. Nat Biotechnol 23:1542-1550); US 2011/0070645 (Chen et al.); WO 2005/116073 A2 (D'Amour K A et al.); Borowiak M, 2009 (Cell Stem Cell 4, 348-358); Jiang W., 2007 (Cell Res 17:333-344); D′amour 2006 (Nat Biotechnol 24:1392-1401); and Kroon 2008 (Nat Biotechnol 26:443-452).

### SUMMARY OF THE INVENTION

[0008] According to an aspect of some embodiments of the present invention there is provided a method of identifying pancreatic progenitor cells, comprising determining in a population of cells which comprises pancreatic progenitor cells at least one marker that is: (i) positively associated with pancreatic differentiation, the marker being selected from the group consisting of: TACSTD2 (TROP-2), GPR50, BST2, NTRK2, ITGA4, KDR, PTPRN, LGI1, VIPR2, SLC2A1, MUC15, MUC12, LPHN3, MUC16, VTCN1, MMP16, FZD3, ITGB6, GFRA3, ROBO1, NLGN1, BST2, MUC12, CNTFR, LPHN1, SULF1, ADAM23, SCUBE3, PLAU, CDON, SLIT2, C7orf68, PLXDC2, CD74, MUC15, GPR56, VTCN1, ITGB6, NTRK2, AREG, BOC, ITGA4, KLRK1, PRTG, PTPRZ1, GABRP, SILV, KIAA1772, PLP1, OVOS, HAPLN1, EPHA7, ENO2, PCDHB5, OVOS, SYT1, DCT, GPAM, SLITRK6, DCC, FREM2, SDK2, CGA, ATP1B2, SEMA3D, PCDHB15, CDH1, WNT8B, LPAR4, NPIPL3, FAM171B, PTN, ABCC2, ADAMTS3, RASA4, CPT1C, SLC6A6, PCDHB3, LRRC37B, RNFT2, KCNG3, TRPC1, ALPPL2, OR4F21, CCL2, KIF5A, OLFM2, CACNG7, MPHOSPH9, SLC13A4, MOXD1, C6orf186, SLC4A8, STX16, AMY2A, SPARCL1, MGP, A2M, DCN, ATP8B1, MMRN1, EMP1, PLA2G2A, PDE3A, TLR3, CYP1B1, PTGIS, RFTN2, PLEKHA2, SMOC1, STOM, JAM2, CHL1, SCG5, IGFBP7, NPR3, IFI6, CR1L, OR2A4, OR2A7, KCNG3, CACNG7, GRID2, CDH1, LPAR3, SEMA6A, PTPRZ1, ATP1A3, CAMKV, SCNN1G, SYT6, SLC18A2, PCDHB5, ABCG2, HLA-DRA, CR1L, HTR2C, EDNRB, PCDH11X, SLC17A7, SCNN1A, CD9, CXCL16, FXYD5, GABRQ, GFRA3, CACNA2D2, CLDN4, PTPRN, PLP1, PDPN, MMP24, SDK2, GPR176, GPR64, GPR160, PCDH11Y, NKAIN4, ATP1B2, SCN8A, THBS4, CR2, HLA-DQA1, HLA-DRA, HTR7, SLC2A1, HLA-DRA, KCNS3, SLC7A3, HLA-DPB2, CACNA1B, and GPR143, wherein an upregulation above a predetermined threshold of an expression level of the marker positively associated with the pancreatic differentiation as compared to the expression level of the marker in a reference cell, wherein said reference cell is a definite endodermal cell which expresses SOX17, is indicative of a pancreatic progenitor cell, and alternatively or additionally (ii) negatively associated with the pancreatic differentiation, the marker being selected from the group consisting of: LGR5, CXCR4, FLRT3, TRPA1, SLC40A1, LRIG3, COLEC12, EPSTI1, GPR128, CDH2, SLC5A9, FSHR, SLC30A10, IL13RA1, SLC7A7, PCDH10, SLC1A1, GPR141, LIFR, TMEM27, GPC4, LYPD6B, FOLH1, TRPC4, PCDH7, KEL, KCNJ3, OR2T4, VIPR2, FLRT2, CD34, SLC39A8, CLDN11, CXCR7, ITGA5, ITGAV, CALCR, CLDN18, CCKBR, SLC7A5, TMBIM4, SLCO2A1, CDH10, AMHR2, ASAM, CLDN1, DSCAM, TMEM88, PLXNA2, CD177, TMEM144, GPR37, GJA5, SEMA6D, NIPAL2, GPR151, MCC, TMEM136, KCNG1, LHFPL2, MOSPD1, SLC37A1, LRIT3, EPHA4, GPR177, and IL1R1, wherein a downregulation above a predetermined threshold of an expression level of the marker negatively associated with the pancreatic differentiation as compared to the expression level of the marker in a reference cell, wherein said reference cell is a definite endodermal cell which expresses SOX17, is indicative of a pancreatic progenitor cell, thereby identifying the pancreatic progenitor cells.

[0009] According to an aspect of some embodiments of the present invention there is provided a method of identifying pancreatic progenitor cells, comprising determining in a population of cells which comprises pancreatic progenitor cells at least one marker that is: (i) negatively associated with the pancreatic differentiation, the marker being selected from the group consisting of: LGR5, CCKBR, CXCR4, FLRT3, TRPA1, SLC40A1, LRIG3, COLEC12, EPSTI1, GPR128, CDH2, SLC5A9, FSHR, SLC30A10, IL13RA1, SLC7A7, PCDH10, SLC1A1, GPR141, LIFR, TMEM27, GPC4, LYPD6B, FOLH1, TRPC4, PCDH7, KEL, KCNJ3, OR2T4, VIPR2, FLRT2, CD34, SLC39A8, CLDN11, CXCR7, ITGA5, ITGAV, CALCR, CLDN18, SLC7A5, TMBIM4, SLCO2A1, CDH10, AMHR2, ASAM, CLDN1, DSCAM, TMEM88, PLXNA2, CD177, TMEM144, GPR37, GJA5, SEMA6D, NIPAL2, GPR151, MCC, TMEM136, KCNG1, LHFPL2, MOSPD1, SLC37A1, LRIT3, EPHA4, GPR177, IL1R1, CST1, CER1, ANKRD1, TRY6, HAS2, DKK1, PRSS2, HP, APOA2, RHOBTB3, BMP2, ACE2, STC1, PDZK1, HHEX, VIL1, PRDM1, EOMES, DNAJC15, TNIK, IGFBP5, RLBP1L2, ADAMTS9, EPSTI1, C5, ARHGAP24, TRY6, ANGPT2, TTR, MYL7, FST, KITLG, GATA3, ST8SIA4, CCDC141, TSPYL5, EGFLAM, TTN, LEFTY2, FOXA2, FAM184A, STMN2, DIO3, FN1, PRSS1, NPPB, and OTX2, wherein a downregulation above a predetermined threshold of an expression level of the marker negatively associated with the pancreatic differentiation as compared to the expression level of the marker in a reference cell, wherein said reference cell is a definite endodermal cell which expresses SOX17, is indicative of a pancreatic progenitor cell and alternatively or additionally; (ii) positively associated with the pancreatic differentiation, the marker being selected from the group consisting of: TACSTD2 (TROP-2), GPR50, BST2, NTRK2, ITGA4, KDR, PTPRN, LGI1, VIPR2, SLC2A1, MUC15, MUC12, LPHN3, MUC16, VTCN1, MMP16, FZD3, ITGB6, GFRA3, ROBO1, NLGN1, MUC12, CNTFR, LPHN1, SULF1, ADAM23, SCUBE3, PLAU, CDON, SLIT2, C7orf68, PLXDC2, CD74, MUC15, GPR56, VTCN1, ITGB6, AREG, BOC, KLRK1, PRTG, PTPRZ1, GABRP, SILV, KIAA1772, PLP1, OVOS, HAPLN1, EPHA7, ENO2, PCDHB5, OVOS, SYT1, DCT, GPAM, SLITRK6, DCC, FREM2, SDK2, CGA, ATP1B2, SEMA3D, PCDHB15, CDH1, WNT8B, LPAR4, NPIPL3, FAM171B, PTN, ABCC2, ADAMTS3, RASA4, CPT1C, SLC6A6, PCDHB3, LRRC37B, RNFT2, KCNG3, TRPC1, ALPPL2, OR4F21, CCL2, KIF5A, OLFM2, CACNG7, MPHOSPH9, SLC13A4, MOXD1, C6orf186, SLC4A8, STX16, AMY2A, SPARCL1, MGP, A2M, DCN, ATP8B1, MMRN1, EMP1, PLA2G2A, PDE3A, TLR3, CYP1B1, PTGIS, RFTN2, PLEKHA2, SMOC1, STOM, JAM2, CHL1, SCG5, IGFBP7, NPR3, IFI6, CR1L, OR2A4, OR2A7, KCNG3, CACNG7, GRID2, CDH1, LPAR3, SEMA6A, PTPRZ1, ATP1A3, CAMKV, SCNN1G, SYT6, SLC18A2, PCDHB5, ABCG2, HLA-DRA, CR1L, HTR2C, EDNRB, PCDH11X, SLC17A7, SCNN1A, CD9, CXCL16, FXYD5, GABRQ, GFRA3, CACNA2D2, CLDN4, PDPN, MMP24, SDK2, GPR176, GPR64, GPR160, PCDH11Y, NKAIN4, ATP1B2, SCN8A, THBS4, CR2, HLA-DQA1, HLA-DRA, HTR7, SLC2A1, HLA-DRA, KCNS3, SLC7A3, HLA-DPB2, CACNA1B, GPR143, ALPPL2, DPPA5, H19, CRYZ, CXCL12, TYW3, ZYG11A, CRABP1, IDO1, POU5F1, HEY2, HIST1H1A, TFAP2C, DPPA2, ZFP42, LECT1, NECAB1, CKMT1A, SAMHD1, FGF2, PLA2G2A, PRDM14, POU5F1, GLI3, GSTT2, OLFML3, DAZL, GALNT3, SOX2, POU5F1B, ACTN3, CPT1A, DCLK1, EDIL3, NANOG, THUMPD3, VASH2, ATCAY, USP44, HIST1H4F, NANOG, PIM2, DNMT3B, ZNF483, FEZF1, SCARNA9L, and SILV, wherein an upregulation above a predetermined threshold of an expression level of the marker positively associated with the pancreatic differentiation as compared to the expression level of the marker in a reference cell, wherein said reference cell is a definite endodermal cell which expresses SOX17, is indicative of a pancreatic progenitor cell.

[0010] According to an aspect of some embodiments of the present invention there is provided a method of identifying pancreatic progenitor cells, comprising determining in a population of cells which comprises pancreatic progenitor cells at least one marker that is: (i) negatively associated with pancreatic differentiation, the marker being selected from the group consisting of: LGR5, CCKBR, CXCR4, FLRT3, TRPA1, SLC40A1, LRIG3, COLEC12, EPSTI1, GPR128, CDH2, SLC5A9, FSHR, SLC30A10, IL13RA1, SLC7A7, PCDH10, SLC1A1, GPR141, LIFR, TMEM27, GPC4, LYPD6B, FOLH1, TRPC4, PCDH7, KEL, KCNJ3, OR2T4, VIPR2, FLRT2, CD34, SLC39A8, CLDN11, CXCR7, ITGA5, ITGAV, CALCR, CLDN18, SLC7A5, TMBIM4, SLCO2A1, CDH10, AMHR2, ASAM, CLDN1, DSCAM, TMEM88, PLXNA2, CD177, TMEM144, GPR37, GJA5, SEMA6D, NIPAL2, GPR151, MCC, TMEM136, KCNG1, LHFPL2, MOSPD1, SLC37A1, LRIT3, EPHA4, GPR177, and IL1R1, wherein downregulation above a predetermined threshold of an expression level of the marker negatively associated with the pancreatic differentiation as compared to the expression level of the marker in a reference cell, wherein said reference cell is a definite endodermal cell which expresses SOX17, is indicative of a pancreatic progenitor cell, and alternatively or additionally; (ii) positively associated with pancreatic differentiation, the marker being selected from the group consisting of: TACSTD2 (TROP-2), GPR50, BST2, NTRK2, ITGA4, KDR, PTPRN, LGI1, VIPR2, SLC2A1, MUC15, MUC12, LPHN3, MUC16, VTCN1, MMP16, FZD3, ITGB6, GFRA3, ROBO1, NLGN1, MUC12, CNTFR, LPHN1, SULF1, ADAM23, SCUBE3, PLAU, CDON, SLIT2, C7orf68, PLXDC2, CD74, MUC15, GPR56, VTCN1, ITGB6, AREG, BOC, KLRK1, PRTG, PTPRZ1, GABRP, SILV, KIAA1772, PLP1, OVOS, HAPLN1, EPHA7, ENO2, PCDHB5, OVOS, SYT1, DCT, GPAM, SLITRK6, DCC, FREM2, SDK2, CGA, ATP1B2, SEMA3D, PCDHB15, CDH1, WNT8B, LPAR4, NPIPL3, FAM171B, PTN, ABCC2, ADAMTS3, RASA4, CPT1C, SLC6A6, PCDHB3, LRRC37B, RNFT2, KCNG3, TRPC1, ALPPL2, OR4F21, CCL2, KIF5A, OLFM2, CACNG7, MPHOSPH9, SLC13A4, MOXD1, C6orf186, SLC4A8, STX16, AMY2A, SPARCL1, MGP, A2M, DCN, ATP8B1, MMRN1, EMP1, PLA2G2A, PDE3A, TLR3, CYP1B1, PTGIS, RFTN2, PLEKHA2, SMOC1, STOM, JAM2, CHL1, SCG5, IGFBP7, NPR3, IFI6, CR1L, OR2A4, OR2A7, KCNG3, CACNG7, GRID2, CDH1, LPAR3, SEMA6A, PTPRZ1, ATP1A3, CAMKV, SCNN1G, SYT6, SLC18A2, PCDHB5, ABCG2, HLA-DRA, CR1L, HTR2C, EDNRB, PCDH11X, SLC17A7, SCNN1A, CD9, CXCL16, FXYD5, GABRQ, GFRA3, CACNA2D2, CLDN4, PTPRN, PLP1, PDPN, MMP24, SDK2, GPR176, GPR64, GPR160, PCDH11Y, NKAIN4, ATP1B2, SCN8A, THBS4, CR2, HLA-DQA1, HLA-DRA, HTR7, SLC2A1, HLA-DRA, KCNS3, SLC7A3, HLA-DPB2, CACNA1B, and GPR143, wherein upregulation above a predetermined threshold of an expression level of the marker positively associated with the pancreatic differentiation as compared to the expression level of the marker in a reference cell, wherein said reference cell is a definite endodermal cell which expresses SOX17, is indicative of a pancreatic progenitor cells, and alternatively or additionally; (iii) negatively associated with pancreatic differentiation, the marker being selected from the group consisting of: TMPRSS11E, LGR5, SLC39A8, TM4SF18, CUZD1, GPC4, SLC22A3, CXCR4, NRN1, TMBIM4, THBS2, SLC7A5, and TMEM47, wherein downregulation above a predetermined threshold of an expression level of the marker negatively associated with pancreatic differentiation as compared to the expression level of the marker in a reference cell, wherein said reference cell is an undifferentiated human embryonic stem cell (hESC), is indicative of a pancreatic progenitor cell, and alternatively or additionally; (iv) positively associated with pancreatic differentiation, the marker being selected from the group consisting of: TACSTD2 (TROP-2), LRP2, LAMA1, GPC3, LGI1, FN1, LPHN3, FGB, KIT, DPP4, TRO, SPA17, ROBO2, DLK1, BST2, PRTG, LRP2, CACNG7, DLK1, CACNA2D2, CR1L, SCNN1G, HTR2C, LPAR3, THBS3, KCNG3, SDK2, HLA-DRA, SLC18A2, CXCL16, TMEM63C, SLC17A7, GFRA3, PRTG, DKK1, APOA2, AFP, APOB, FLRT3, KIAA1772, FBN2, FRZB, KLK6, FREM2, RSPO3, APOA1, APOA1, SEMA3D, KEL, BMP5, HEPH, STMN2, CACNB3, CHST9, TMC7, FAM171B, ATP5G1, FOLR1, ABCC2, EFNA5, CPT1C, MAGED1, RASA4, KDELR3, ST6GALNAC2, EDNRA, LRRC37B, ABCC4, CLCN5, MBOAT2, SLC44A5, NPC2, ELFN1, MMD, SLC5A3, IMPAD1, OSTC, DSC2, SLC31A1, SLC5A12, LRRN3, NPIPL3, GDPD1, NPIPL3, NPIPL3, LINGO2, and LYPD6B, wherein upregulation above a predetermined threshold of an expression level of the marker positively associated with pancreatic differentiation as compared to the expression level of the marker in a reference cell, wherein said reference cell is an undifferentiated human embryonic stem cell (hESC), is indicative of a pancreatic progenitor cell; thereby identifying the pancreatic progenitor cells.

[0011] According to an aspect of some embodiments of the present invention there is provided a method of isolating pancreatic progenitor cells, comprising: (a) identifying the pancreatic progenitor cells according to the method of some embodiments of the invention, and (b) isolating the pancreatic progenitor cells identified according to step (a) to thereby obtain isolated pancreatic progenitor cells, thereby isolating the pancreatic progenitor cells.

[0012] According to an aspect of some embodiments of the present invention there is provided a method of qualifying a pancreatic progenitor cell population, comprising: determining in a sample of the cell population a percentage of the pancreatic progenitor cells which are identified according to the method of some embodiments of the invention out of the total cells in the sample, thereby qualifying the pancreatic progenitor cell population.

[0013] According to an aspect of some embodiments of the present invention there is provided a method of isolating endocrine progenitors or insulin producing cells, comprising culturing the pancreatic progenitor cells isolated by the method of some embodiments of the invention or the pancreatic progenitor cell population qualified according to the method of some embodiments of the invention under conditions suitable for maturation of the pancreatic progenitor cells into endocrine progenitors or beta cells, thereby generating insulin producing cells.

[0014] According to an aspect of some embodiments of the present invention there is provided a method of transplanting pancreatic progenitor cells or cells derived therefrom in a subject, comprising (a) qualifying the pancreatic progenitor cells according to the method of some embodiments of the invention, wherein presence of at least a predetermined percentage of the pancreatic progenitor cells in the cell sample indicates the suitability of the pancreatic progenitor cells for transplantation in a subject, to thereby obtain a pancreatic progenitor cell population being suitable for transplantation in a subject, (b) transplanting in the subject the pancreatic progenitor cell population being suitable for transplantation in a subject or cells derived therefrom, thereby transplanting the pancreatic progenitor cells or cells derived therefrom in the subject.

[0015] According to an aspect of some embodiments of the present invention there is provided a method of identifying definite endodermal cells, comprising determining in a population of cells which comprises definite endodermal cells at least one marker that is negatively associated with definite endodermal cells, the marker being selected from the group consisting of: KDR, PCDHB5, FAT4, FLT1, NRN1, THBS2, PTPRZ1, SLC6A15, GPR176, SEMA6A, THBS1, CDH11, GRID2, SLC7A11, CDH1, LRFN5, EDNRB, THY1, NETO1, KCND2, TMPRSS11E, CD44, PDPN, SLC7A1, KAL1, KCNG3, GPM6B, FXYD5, PCDH18, ICAM3, MCTP1, TACR3, and TMEM155, wherein downregulation above a predetermined threshold of an expression level of the marker negatively associated with the definite endodermal cells as compared to the expression level of the marker in a reference cell, wherein said reference cell is an undifferentiated human embryonic stem cell (hESC), is indicative of a definite endodermal cell.

[0016] According to an aspect of some embodiments of the present invention there is provided a method of identifying definite endodermal cells, comprising determining in a population of cells which comprises definite endodermal cells at least one marker that is positively associated with definite endodermal cells, the marker being selected from the group consisting of: FSHR, COLEC12, ROR2 ITGA5, LRP2, CD177, CCKBR, TRPA1, KEL, FOLR1, FOLH1, APOA1, APOA1, FZD5, FN1, BMP2, ADAMTS9, DPP4, FGA, GPR128, IGFBP5, LIFR, FZD4, PRTG, STC1, TNFSF4, CD177, IHH, LAMA1, GPC3, LGI1, FN1, LPHN3, FGB, KIT, DPP4, TRO, SPA17, ROBO2, DLK1, CST1, DKK1, HAS2, APOA2, CDH2, LGR5, AFP, FLRT3, APOB, DGKK, HP, SYTL5, SLC7A7, TTR, FRZB, RSPO3, GCNT1, DIO3, TMEM27, APOC1, EPHA4, C4orf18, GLIPR2, PCDH10, F10, BMP5, FMO5, STMN2, SLC5A9, PORCN, EGFLAM, RAB17, CST2, PNPLA3, MOSPD1, ELMO1, CHST9, SLC30A10, TMC7, C8orf49, CDH12, ST8SIA4, SLCO2A1, MANEA, LRIG3, HCN1, ADAMTS12, TMEM144, VTN, CAMK2N1, ABCC4, PCDH7, OR2T4, UNC93A, COL4A6, PAMR1, SLC1A1, PROS1, APOM, APOM, APOM, LYPD6B, TMEM88, ITLN2, BMPER, GPR141, VEGFA, DKK1, APOA2, AFP, APOB, FLRT3, KIAA1772, FBN2, FRZB, KLK6, FREM2, RSPO3, APOA1, APOA1, SEMA3D, KEL, BMP5, HEPH, STMN2, CACNB3, CHST9, TMC7, FAM171B, ATP5G1, FOLR1, ABCC2, EFNA5, CPT1C, MAGED1, RASA4, KDELR3, ST6GALNAC2, EDNRA, LRRC37B, ABCC4, CLCN5, MBOAT2, SLC44A5, NPC2, ELFN1, MMD, SLC5A3, IMPAD1, OSTC, DSC2, SLC31A1, SLC5A12, LRRN3, NPIPL3, GDPD1, NPIPL3, NPIPL3, LINGO2, LYPD6B, TRPA1, SLC40A1, SLC30A10, CCKBR, VIPR2, COLEC12, FLRT3, LGR5, GPR141, BST2, SLC5A9, GPR128, KEL, LRIG3, LYPD6B, FSHR, LIFR, FOLH1, CXCR4, ITGA5, AMOT, LY6E, SEMA6D, GJA5, PRTG, CD34, TMEM144, ROR2, GPR177, OR2T4, SLC7A7, KCNJ3, CLDN18, GPR151, SLC44A5, CDH10, TMEM27, SLC1A1, TMEM56, CD177, PLXNA2, SLC26A2, DSCAM, TMEM133, IL13RA1, ATP2B1, CD302, MEGF9, EDNRA, CDH2, GPR161, TYRO3, FLRT2, LRIT3, PCDH7, NRCAM, SMAGP, AMHR2, ELTD1, GRPR, EPHA4, and CD99, wherein upregulation above a predetermined threshold of an expression level of the marker positively associated with the definite endodermal cells as compared to the expression level of the marker in a reference cell, wherein said reference cell is an undifferentiated human embryonic stem cell (hESC), is indicative of a definite endodermal cell.

[0017] According to an aspect of some embodiments of the present invention there is provided a method of isolating definite endodermal cells, comprising: (a) identifying the definite endodermal cells according to the method of some embodiments of the invention, (b) isolating the definite endodermal cells identified according to step (a) to thereby obtain an isolated population of the definite endodermal cells, thereby isolating the definite endodermal cells.

[0018] According to an aspect of some embodiments of the present invention there is provided a method of qualifying a definite endodermal cell population, comprising: determining in a sample of the cell population a percentage of the definite endodermal cells which are identified according to the method of some embodiments of the invention out of the total cells in the sample, thereby qualifying the definite endodermal cell population.

[0019] According to an aspect of some embodiments of the present invention there is provided an isolated population of pancreatic progenitor cells obtained according to the method of some embodiments of the invention.

[0020] According to an aspect of some embodiments of the present invention there is provided an isolated population of pancreatic progenitor cells, comprising at least 75% of cells having a TROP-2+ and/or TROP-2+/GPR50+ expression pattern.

[0021] According to an aspect of some embodiments of the present invention there is provided an isolated population of definite endodermal cells obtained according to the method of some embodiments of the invention.

[0022] According to an aspect of some embodiments of the present invention there is provided an isolated population of definite endodermal cells, comprising at least 50% of cells having a SOX17+/SOX7+ expression pattern.

[0023] According to an aspect of some embodiments of the present invention there is provided a nucleic acid construct comprising a first polynucleotide encoding a reporter protein and a second polynucleotide which comprises a human endogenous SOX17 regulatory sequence, wherein the first polynucleotide being under transcriptional regulation of the SOX17 regulatory sequence, wherein the SOX17 regulatory sequence comprises an upstream sequence and a downstream sequence, wherein the upstream sequence comprises the nucleotide sequence set forth in SEQ ID NO:38; and wherein the downstream sequence comprises the nucleotide sequence set forth in SEQ ID NO:39.

[0024] According to an aspect of some embodiments of the invention there is provided a nucleic acid construct comprising a first polynucleotide encoding a reporter protein and a second polynucleotide which comprises a human endogenous PDX1 regulatory sequence, wherein the first polynucleotide being under transcriptional regulation of the PDX1 regulatory sequence, wherein the PDX1 regulatory sequence comprises an upstream sequence and a downstream sequence, wherein the upstream sequence comprises the nucleotide sequence set forth in SEQ ID NO:16; and wherein the downstream sequence comprises the nucleotide sequence set forth in SEQ ID NO:17.

[0025] According to an aspect of some embodiments of the present invention there is provided a cell comprising the nucleic acid construct of some embodiments of the invention.

[0026] According to an aspect of some embodiments of the present invention there is provided a method of screening for markers which differentiate a definite endodermal cell from an undifferentiated pluripotent stem cell, comprising comparing the expression level of markers between the undifferentiated pluripotent stem cell and the cell of some embodiments of the invention, wherein upregulation or downregulation in the expression level above a predetermined threshold indicates that the markers differentiate the definite endodermal cell from the undifferentiated pluripotent stem cell, thereby screening for markers which differentiate the definite endodermal cell from the undifferentiated pluripotent stem cell.

[0027] According to an aspect of some embodiments of the present invention there is provided a method of screening for compounds capable of inducing differentiation of undifferentiated pluripotent stem cells to definite endodermal cells, comprising: (a) contacting undifferentiated pluripotent stem cells which comprise the nucleic acid construct of some embodiments of the invention with at least one compound of a plurality of candidate compounds, and; (b) monitoring an expression level of the reporter protein in the cells following the contacting, wherein an increase above a predetermined level in the expression level of the reporter protein following the contacting as compared to the expression level prior to the contacting is indicative that the at least one compound is capable of inducing differentiation of the undifferentiated pluripotent stem cells to the definite endodermal cells, thereby screening for the compounds capable of inducing differentiation of undifferentiated pluripotent stem cells to definite endodermal cells.

[0028] According to an aspect of some embodiments of the present invention there is provided a cell comprising the nucleic acid construct of some embodiments of the invention.

[0029] According to an aspect of some embodiments of the present invention there is provided a method of screening for markers which differentiate a pancreatic progenitor cell from a definite endodermal cell, comprising comparing the expression level of markers between the cell of some embodiments of the invention and the cell of some embodiments of the invention, wherein upregulation or downregulation in the expression level above a predetermined threshold indicates that the markers differentiate the pancreatic progenitor cell from the definite endodermal cell, thereby screening for markers which differentiate the pancreatic progenitor cell from the definite endodermal cell.

[0030] According to an aspect of some embodiments of the present invention there is provided a method of screening for compounds capable of inducing differentiation of definite endodermal cells or undifferentiated pluripotent stem cells to pancreatic progenitor cells, comprising: (a) contacting definite endodermal cells or undifferentiated pluripotent stem cells which comprise the nucleic acid construct of some embodiments of the invention with at least one compound of a plurality of candidate compounds, and; (b) monitoring an expression level of the reporter protein in the cells following the contacting, wherein an increase above a predetermined level in the expression level of the reporter protein following the contacting as compared to the expression level prior to the contacting is indicative that the at least one compound is capable of inducing differentiation of the definite endodermal cells or undifferentiated pluripotent stem cells to the pancreatic progenitor cells, thereby screening for the compounds capable of inducing differentiation of definite endodermal cells or undifferentiated pluripotent stem cells to the pancreatic progenitor cells.

[0031] According to an aspect of some embodiments of the present invention there is provided a kit for screening for markers which differentiate a definite endodermal cell from a pluripotent stem cell, comprising the cell of some embodiments of the invention.

[0032] According to an aspect of some embodiments of the present invention there is provided a kit for screening for markers which differentiate a pancreatic progenitor cell from a definite endodermal cell, comprising the cell of some embodiments of the invention and the cell of some embodiments of the invention.

[0033] According to some embodiments of the invention, the method further comprising determining in a population of cells which comprises pancreatic progenitor cells at least one marker that is: (i) negatively associated with the pancreatic differentiation, the marker being selected from the group consisting of: CST1, CER1, ANKRD1, TRY6, HAS2, DKK1, PRSS2, HP, APOA2, RHOBTB3, BMP2, ACE2, STC1, PDZK1, HHEX, VIL1, PRDM1, EOMES, DNAJC15, TNIK, IGFBP5, RLBP1L2, ADAMTS9, EPSTI1, C5, ARHGAP24, TRY6, ANGPT2, TTR, MYL7, FST, KITLG, GATA3, ST8SIA4, CCDC141, TSPYL5, EGFLAM, TTN, LEFTY2, FOXA2, FAM184A, STMN2, DIO3, FN1, PRSS1, NPPB, and OTX2, wherein a downregulation above a predetermined threshold of an expression level of the marker negatively associated with the pancreatic differentiation as compared to the expression level of the marker in a reference cell, wherein said reference cell is a definite endodermal cell which expresses SOX17, is indicative of a pancreatic progenitor cell and alternatively or additionally; (ii) positively associated with the pancreatic differentiation, the marker being selected from the group consisting of: ALPPL2, DPPA5, H19, CRYZ, CXCL12, TYW3, ZYG11A, CRABP1, IDO1, POU5F1, HEY2, HIST1H1A, TFAP2C, DPPA2, ZFP42, LECT1, NECAB1, CKMT1A, SAMHD1, FGF2, PLA2G2A, PRDM14, POU5F1, GLI3, GSTT2, OLFML3, DAZL, GALNT3, SOX2, POU5F1B, ACTN3, CPT1A, DCLK1, EDIL3, NANOG, THUMPD3, VASH2, ATCAY, USP44, HIST1H4F, NANOG, PIM2, DNMT3B, ZNF483, FEZF1, SCARNA9L, and SILV, wherein an upregulation above a predetermined threshold of an expression level of the marker positively associated with the pancreatic differentiation as compared to the expression level of the marker in a reference cell, wherein said reference cell is a definite endodermal cell which expresses SOX17, is indicative of a pancreatic progenitor cell.

[0034] According to some embodiments of the invention, the method further comprising determining in a population of cells which comprises pancreatic progenitor cells at least one marker that is: (i) negatively associated with the pancreatic differentiation, the marker being selected from the group consisting of: TMPRSS11E, LGR5, SLC39A8, TM4SF18, CUZD1, GPC4, SLC22A3, CXCR4, NRN1, TMBIM4, THBS2, SLC7A5, TMEM47, NTS, CER1, CST1, NODAL, PRRX1, KGFLP1, NFIB, GCNT4, MIXL1, CAV1, LUM, RASGRF2, OXCT1, GLIPR1, VSNL1, FST, POSTN, GNA14, CBR1, TNIK, RGS5, KGFLP1, ETS1, MPPED2, ACTA2, SEMA3A, DACT1, ANXA1, COL12A1, KITLG, MMP2, DLEU2, ACE2, ACTG2, PUS7L, RNU5B-1, COL3A1, LEFTY2, NPPB, S1AE, AFP, ZFP42, HAS2, TRY6, NR5A2, and EBF1, wherein a downregulation above a predetermined threshold of an expression level of the marker negatively associated with the pancreatic differentiation as compared to the expression level of the marker in a reference cell, wherein said reference cell is an undifferentiated human embryonic stem cell (hESC), is indicative of a pancreatic progenitor cell, and alternatively or additionally; (ii) positively associated with the pancreatic differentiation, the marker being selected from the group consisting of: TACSTD2 (TROP-2), BST2 LRP2, LAMA1, GPC3, LGI1, FN1, LPHN3, FGB, KIT, DPP4, TRO, SPA17, ROBO2, DLK1, PRTG, DKK1, APOA2, AFP, APOB, FLRT3, KIAA1772, FBN2, FRZB, KLK6, FREM2, RSPO3, APOA1, APOA1, SEMA3D, KEL, BMP5, HEPH, STMN2, CACNB3, CHST9, TMC7, FAM171B, ATP5G1, FOLR1, ABCC2, EFNA5, CPT1C, MAGED1, RASA4, KDELR3, ST6GALNAC2, EDNRA, LRRC37B, ABCC4, CLCN5, MBOAT2, SLC44A5, NPC2, ELFN1, MMD, SLC5A3, IMPAD1, OSTC, DSC2, SLC31A1, SLC5A12, LRRN3, NPIPL3, GDPD1, NPIPL3, NPIPL3, LINGO2, LYPD6B, PRTG, LRP2, CACNG7, DLK1, CACNA2D2, CR1L, SCNN1G, HTR2C, LPAR3, THBS3, KCNG3, SDK2, HLA-DRA, SLC18A2, CXCL16, TMEM63C, SLC17A7, GFRA3, DPPA5, ALPPL2, CRYZ, H19, ZYG11A, TYW3, ARRDC4, TXNIP, FOS, NCRNA00173, GSTT2, C3, DDX43, B2M, PYGM, CYP4F22, ZNF578, ENO2, ZNF248, NLRP4, SNORD59B, SNORD113-4, CASZ1, MIR21, IFI16, ZNF560, TDRD1, ZNF680, HSPA1B, HSPA1A, EGR1, RASGRP2, ASMTL, CPT1C, ATCAY, ACSF2, PAMR1, SILV, ACTN3, HORMAD1, ACSM3, RNF157, SAMHD1, and RCN1, wherein an upregulation above a predetermined threshold of an expression level of the marker positively associated with the pancreatic differentiation as compared to the expression level of the marker in a reference cell, wherein said reference cell is an undifferentiated human embryonic stem cell (hESC), is indicative of a pancreatic progenitor cell.

[0035] According to some embodiments of the invention, the population of cells which comprises pancreatic progenitor cells express a transcription factor selected from the group consisting of PDX1, ngn3, pax4, hlxb9, nkx6.1, Hnf6, and sox9.

[0036] According to some embodiments of the invention, the definite endodermal cells are identified by a method comprising determining in a population of cells which comprises definite endodermal cells at least one marker that is: (i) negatively associated with definite endodermal cells, the marker being selected from the group consisting of: KDR, PCDHB5, FAT4, FLT1, NRN1, THBS2, PTPRZ1, SLC6A15, GPR176, SEMA6A, THBS1, CDH11, GRID2, SLC7A11, CDH1, LRFN5, EDNRB, THY1, NETO1, KCND2, TMPRSS11E, CD44, PDPN, SLC7A1, KAL1, KCNG3, GPM6B, FXYD5, PCDH18, ICAM3, MCTP1, TACR3, TMEM155, ZFP42, THUMPD3, ANXA1, SPP1, PRDM14, GNA14, EDIL3, CXCL12, PSMD5, PRRX1, NANOG, TRIM22, NANOG, RASGRF2, POU5F1B, POLR3G, HHLA1, POU5F1, VSNL1, SCG3, B3GALT1, LECT1, NTS, MBNL1, CKMT1A, NECAB1, FGF2, SFRP2, DCLK1, DACT1, CRABP1, TFAP2C, SCGB3A2, LRAT, CUZD1, GLB1L3, METTL7A, VAT1L, COL12A1, OLFML3, SOX2, USP44, HIST1H4F, KGFLP1, CPT1A, and DBC1, wherein downregulation above a predetermined threshold of an expression level of the marker negatively associated with definite endodermal cells as compared to the expression level of the marker in a reference cell, wherein said reference cell is an undifferentiated human embryonic stem cell (hESC), is indicative of a definite endodermal cell, and alternatively or additionally; (ii) positively associated with definite endodermal cells, the marker being selected from the group consisting of: FLRT3, FSHR, LIFR, ROR2, KEL, TRPA1, CD177, CCKBR, APOA1, APOA1, FZD5, FN1, BMP2, ADAMTS9, DPP4, FGA, COLEC12, GPR128, IGFBP5, FZD4, ITGA5, STC1, TNFSF4, CD177, IHH, LRP2, LAMA1, GPC3, LGI1, FN1, LPHN3, FGB, KIT, DPP4, TRO, SPA17, ROBO2, DLK1, CST1, DKK1, HAS2, APOA2, CDH2, LGR5, AFP, APOB, DGKK, HP, SYTL5, SLC7A7, TTR, FRZB, RSPO3, GCNT1, DIO3, TMEM27, APOC1, EPHA4, C4orf18, GLIPR2, PCDH10, F10, BMP5, FMO5, FOLR1, STMN2, SLC5A9, PORCN, EGFLAM, RAB17, CST2, PNPLA3, MOSPD1, ELMO1, CHST9, SLC30A10, TMC7, C8orf49, CDH12, ST8SIA4, SLCO2A1, MANEA, LRIG3, HCN1, ADAMTS12, FOLH1, TMEM144, VTN, CAMK2N1, ABCC4, PCDH7, OR2T4, UNC93A, COL4A6, PAMR1, SLC1A1, PROS1, APOM, APOM, APOM, LYPD6B, TMEM88, ITLN2, BMPER, GPR141, VEGFA, PRTG, DKK1, APOA2, AFP, APOB, FLRT3, KIAA1772, FBN2, FRZB, KLK6, FREM2, RSPO3, APOA1, APOA1, SEMA3D, KEL, BMP5, HEPH, STMN2, CACNB3, CHST9, TMC7, FAM171B, ATP5G1, FOLR1, ABCC2, EFNA5, CPT1C, MAGED1, RASA4, KDELR3, ST6GALNAC2, EDNRA, LRRC37B, ABCC4, CLCN5, MBOAT2, SLC44A5, NPC2, ELFN1, MMD, SLC5A3, IMPAD1, OSTC, DSC2, SLC31A1, SLC5A12, LRRN3, NPIPL3, GDPD1, NPIPL3, NPIPL3, LINGO2, SLC40A1, SLC30A10, CCKBR, VIPR2, COLEC12, FLRT3, LGR5, GPR141, BST2, SLC5A9, GPR128, KEL, LRIG3, LYPD6B, FSHR, LIFR, FOLH1, CXCR4, ITGA5, AMOT, LY6E, SEMA6D, GJA5, PRTG, CD34, TMEM144, ROR2, GPR177, OR2T4, SLC7A7, KCNJ3, CLDN18, GPR151, SLC44A5, CDH10, TMEM27, SLC1A1, TMEM56, CD177, PLXNA2, SLC26A2, DSCAM, TMEM133, IL13RA1, ATP2B1, CD302, MEGF9, EDNRA, CDH2, GPR161, TYRO3, FLRT2, LRIT3, PCDH7, NRCAM, SMAGP, AMHR2, ELTD1, GRPR, EPHA4, CD99, GATA3, SEMA3E, HHEX, ZNF280A, FAM184A, WDR72, PDZK1, RLBP1L2, SHISA2, VIL1, STMN2, APOA2, SERHL, PPFIBP2, DKK1, MUM1L1, IGFBP5, ST6GALNAC2, TSPYL5, STC1, SYTL5, EPSTI1, ANKRD1, ARHGAP24, KRT18P49, PRSS2, RHOBTB3, FRZB, RARB, ADAMTS9, ARL4D, PRDM1, HP, FZD5, TRY6, ATP6V0D2, ANGPT2, DENND2C, BMP5, FOXA2, HAS2, BMP2, S100A16, FOLH1B, FAM122C, and FZD4, wherein upregulation above a predetermined threshold of an expression level of the marker positively associated with definite endodermal cells as compared to the expression level of the marker in a reference cell, wherein said reference cell is an undifferentiated human embryonic stem cell (hESC), is indicative of a definite endodermal cell, thereby identifying the definite endodermal cells.

[0037] According to some embodiments of the invention, the at least one marker positively associated with pancreatic differentiation is selected from the group consisting of: TACSTD2 (TROP-2), GPR50, BST2, LGI1, VIPR2, SLC2A1, MUC15, MUC12, LPHN3, MUC16, VTCN1, MMP16, FZD3, ITGB6, GFRA3, ROBO1, NLGN1, MUC12, CNTFR, LPHN1, SULF1, ADAM23, SCUBE3, PLAU, CDON, SLIT2, C7orf68, PLXDC2, CD74, MUC15, GPR56, VTCN1, ITGB6, NTRK2, AREG, BOC, ITGA4, KLRK1, PRTG, PTPRZ1, GABRP, SILV, KIAA1772, PLP1, OVOS, HAPLN1, EPHA7, ENO2, PCDHB5, OVOS, SYT1, DCT, GPAM, SLITRK6, DCC, FREM2, SDK2, CGA, ATP1B2, SEMA3D, PCDHB15, CDH1, WNT8B, LPAR4, NPIPL3, FAM171B, PTN, ABCC2, ADAMTS3, RASA4, CPT1C, SLC6A6, PCDHB3, LRRC37B, RNFT2, KCNG3, TRPC1, ALPPL2, OR4F21, CCL2, KIF5A, OLFM2, CACNG7, MPHOSPH9, SLC13A4, MOXD1, C6orf186, SLC4A8, STX16, AMY2A, SPARCL1, MGP, A2M, DCN, ATP8B1, MMRN1, EMP1, PLA2G2A, PDE3A, TLR3, CYP1B1, PTGIS, RFTN2, PLEKHA2, SMOC1, STOM, JAM2, CHL1, SCG5, IGFBP7, NPR3, IFI6, CR1L, OR2A4, and OR2A7.

[0038] According to some embodiments of the invention, the at least one marker positively associated with pancreatic differentiation is selected from the group consisting of: TACSTD2 (TROP-2), BST2, GPR50, ROBO1, NTRK2, ITGA4, LGI1, VIPR2, SLC2A1, MUC15, MUC12, LPHN3, MUC16, VTCN1, MMP16, FZD3, ITGB6, GFRA3, NLGN1, MUC12, CNTFR, LPHN1, SULF1, ADAM23, SCUBE3, PLAU, CDON, SLIT2, C7orf68, PLXDC2, CD74, MUC15, GPR56, VTCN1, ITGB6, AREG, BOC, and KLRK1.

[0039] According to some embodiments of the invention, the at least one marker positively associated with pancreatic differentiation is TROP-2.

[0040] According to some embodiments of the invention, the at least one marker positively associated with pancreatic differentiation is GPR50.

[0041] According to some embodiments of the invention, the at least one marker positively associated with pancreatic differentiation comprises at least two markers, said at least two markers are TROP-2 and GPR50.

[0042] According to some embodiments of the invention, the at least one marker positively associated with pancreatic differentiation comprises at least three markers, said at least three markers comprise TROP-2, GPR50 and a marker selected from the group consisting of BST2, NTRK2, ITGA4, KDR, PTPRN, LGI1, VIPR2, SLC2A1, MUC15, MUC12, LPHN3, MUC16, VTCN1, MMP16, FZD3, ITGB6, GFRA3, ROBO1, NLGN1, MUC12, CNTFR, LPHN1, SULF1, ADAM23, SCUBE3, PLAU, CDON, SLIT2, C7orf68, PLXDC2, CD74, MUC15, GPR56, VTCN1, ITGB6, AREG, BOC, KLRK1, PRTG, PTPRZ1, GABRP, SILV, KIAA1772, PLP1, OVOS, HAPLN1, EPHA7, ENO2, PCDHB5, OVOS, SYT1, DCT, GPAM, SLITRK6, DCC, FREM2, SDK2, CGA, ATP1B2, SEMA3D, PCDHB15, CDH1, WNT8B, LPAR4, NPIPL3, FAM171B, PTN, ABCC2, ADAMTS3, RASA4, CPT1C, SLC6A6, PCDHB3, LRRC37B, RNFT2, KCNG3, TRPC1, ALPPL2, OR4F21, CCL2, KIF5A, OLFM2, CACNG7, MPHOSPH9, SLC13A4, MOXD1, C6orf186, SLC4A8, STX16, AMY2A, SPARCL1, MGP, A2M, DCN, ATP8B1, MMRN1, EMP1, PLA2G2A, PDE3A, TLR3, CYP1B1, PTGIS, RFTN2, PLEKHA2, SMOC1, STOM, JAM2, CHL1, SCG5, IGFBP7, NPR3, IFI6, CR1L, OR2A4, OR2A7, KCNG3, CACNG7, GRID2, CDH1, LPAR3, SEMA6A, PTPRZ1, ATP1A3, CAMKV, SCNN1G, SYT6, SLC18A2, PCDHB5, ABCG2, HLA-DRA, CR1L, HTR2C, EDNRB, PCDH11X, SLC17A7, SCNN1A, CD9, CXCL16, FXYD5, GABRQ, GFRA3, CACNA2D2, CLDN4, PLP1, PDPN, MMP24, SDK2, GPR176, GPR64, GPR160, PCDH11Y, NKAIN4, ATP1B2, SCN8A, THBS4, CR2, HLA-DQA1, HLA-DRA, HTR7, SLC2A1, HLA-DRA, KCNS3, SLC7A3, HLA-DPB2, CACNA1B, and GPR143

[0043] According to some embodiments of the invention, the at least one marker positively associated with definite endodermal cells is selected from the group consisting of: COLEC12, ROR2, FLRT3, LGR5, LIFR, KEL, FSHR, TRPA1, FOLR1, LRP2, FOLH1, CD177, CCKBR, ITGA5, FZD5, FN1, BMP2, ADAMTS9, DPP4, FGA, GPR128, IGFBP5, FZD4, STC1, TNFSF4, CD177, IHH, APOA1, LAMA1, GPC3, LGI1, FN1, LPHN3, FGB, KIT, DPP4, TRO, SPA17, ROBO2, DLK1, CST1, DKK1, HAS2, APOA2, CDH2, AFP, APOB, DGKK, HP, SYTL5, SLC7A7, TTR, FRZB, RSPO3, GCNT1, DIO3, TMEM27, APOC1, EPHA4, C4orf18, GLIPR2, PCDH10, F10, BMP5, FMO5, STMN2, SLC5A9, PORCN, EGFLAM, RAB17, CST2, PNPLA3, MOSPD1, ELMO1, CHST9, SLC30A10, TMC7, C8orf49, CDH12, ST8SIA4, SLCO2A1, MANEA, LRIG3, HCN1, ADAMTS12, TMEM144, VTN, CAMK2N1, ABCC4, PCDH7, OR2T4, UNC93A, COL4A6, PAMR1, SLC1A1, PROS1, APOM, APOM, APOM, LYPD6B, TMEM88, ITLN2, BMPER, GPR141, VEGFA, PRTG, DKK1, APOA2, AFP, APOB, FLRT3, KIAA1772, FBN2, FRZB, KLK6, FREM2, RSPO3, APOA1, APOA1, SEMA3D, KEL, BMP5, HEPH, STMN2, CACNB3, CHST9, TMC7, FAM171B, ATP5G1, FOLR1, ABCC2, EFNA5, CPT1C, MAGED1, RASA4, KDELR3, ST6GALNAC2, EDNRA, LRRC37B, ABCC4, CLCN5, MBOAT2, SLC44A5, NPC2, ELFN1, MMD, SLC5A3, IMPAD1, OSTC, DSC2, SLC31A1, SLC5A12, LRRN3, NPIPL3, GDPD1, NPIPL3, NPIPL3, LINGO2, and LYPD6B.

[0044] According to some embodiments of the invention, the at least one marker positively associated with definite endodermal cells is selected from the group consisting of: FSHR, LIFR, COLEC12, ROR2, ITGA5, CD177, CCKBR, APOA1, APOA1, FZD5, FN1, BMP2, ADAMTS9, DPP4, FGA, GPR128, IGFBP5, FZD4, STC1, TNFSF4, CD177, IHH, LRP2, LAMA1, GPC3, LGI1, FN1, LPHN3, FGB, KIT, DPP4, TRO, SPA17, ROBO2, and DLK1.

[0045] According to some embodiments of the invention, the cell sample comprises the isolated pancreatic progenitor cells of some embodiments of the invention.

[0046] According to some embodiments of the invention, presence of at least a predetermined percentage of the pancreatic progenitor cells in the cell sample indicates the suitability of the pancreatic progenitor cells for transplantation in a subject.

[0047] According to some embodiments of the invention, the method further comprising determining in the population of cells which comprises definite endodermal cells at least one marker that is positively associated with definite endodermal cells, the marker being selected from the group consisting of: FSHR, COLEC12, ROR2, LIFR, LIFR, FLRT3, KEL, LGR5, FOLR1, CD177, CCKBR, APOA1, APOA1, FZD5, FN1, BMP2, ADAMTS9, DPP4, FGA, GPR128, IGFBP5, FZD4, ITGA5, STC1, TNFSF4, CD177, IHH, LRP2, LAMA1, GPC3, LGI1, FN1, LPHN3, FGB, KIT, DPP4, TRO, SPA17, ROBO2, DLK1, CST1, DKK1, HAS2, APOA2, CDH2, AFP, APOB, DGKK, HP, SYTL5, SLC7A7, TTR, FRZB, RSPO3, GCNT1, TRPA1, DIO3, TMEM27, APOC1, EPHA4, C4orf18, GLIPR2, PCDH10, F10, BMP5, FMO5, STMN2, SLC5A9, PORCN, EGFLAM, RAB17, CST2, PNPLA3, MOSPD1, ELMO1, CHST9, SLC30A10, TMC7, C8orf49, CDH12, ST8SIA4, SLCO2A1, MANEA, LRIG3, HCN1, ADAMTS12, FOLH1, TMEM144, VTN, CAMK2N1, ABCC4, PCDH7, OR2T4, UNC93A, COL4A6, PAMR1, SLC1A1, PROS1, APOM, APOM, APOM, LYPD6B, TMEM88, ITLN2, BMPER, GPR141, VEGFA, PRTG, DKK1, APOA2, AFP, APOB, FLRT3, KIAA1772, FBN2, FRZB, KLK6, FREM2, RSPO3, APOA1, APOA1, SEMA3D, KEL, BMP5, HEPH, STMN2, CACNB3, CHST9, TMC7, FAM171B, ATP5G1, FOLR1, ABCC2, EFNA5, CPT1C, MAGED1, RASA4, KDELR3, ST6GALNAC2, EDNRA, LRRC37B, ABCC4, CLCN5, MBOAT2, SLC44A5, NPC2, ELFN1, MMD, SLC5A3, IMPAD1, OSTC, DSC2, SLC31A1, SLC5A12, LRRN3, NPIPL3, GDPD1, NPIPL3, NPIPL3, LINGO2, LYPD6B, TRPA1, SLC40A1, SLC30A10, CCKBR, VIPR2, COLEC12, FLRT3, LGR5, GPR141, BST2, SLC5A9, GPR128, KEL, LRIG3, LYPD6B, FSHR, LIFR, FOLH1, CXCR4, ITGA5, AMOT, LY6E, SEMA6D, GJA5, PRTG, CD34, TMEM144, ROR2, GPR177, OR2T4, SLC7A7, KCNJ3, CLDN18, GPR151, SLC44A5, CDH10, TMEM27, SLC1A1, TMEM56, CD177, PLXNA2, SLC26A2, DSCAM, TMEM133, IL13RA1, ATP2B1, CD302, MEGF9, EDNRA, CDH2, GPR161, TYRO3, FLRT2, LRIT3, PCDH7, NRCAM, SMAGP, AMHR2, ELTD1, GRPR, EPHA4, CD99, GATA3, SEMA3E, HHEX, ZNF280A, FAM184A, WDR72, PDZK1, RLBP1L2, SHISA2, VIL1, STMN2, APOA2, SERHL, PPFIBP2, DKK1, MUM1L1, IGFBP5, ST6GALNAC2, TSPYL5, STC1, SYTL5, EPSTI1, ANKRD1, ARHGAP24, KRT18P49, PRSS2, RHOBTB3, FRZB, RARB, ADAMTS9, ARL4D, PRDM1, HP, FZD5, TRY6, ATP6V0D2, ANGPT2, DENND2C, BMP5, FOXA2, HAS2, BMP2, S100A16, FOLH1B, FAM122C, and FZD4, wherein upregulation above a predetermined threshold of an expression level of the marker positively associated with definite endodermal cells as compared to the expression level of the marker in a reference cell, wherein said reference cell is an undifferentiated human embryonic stem cell (hESC), is indicative of a definite endodermal cell.

[0048] According to some embodiments of the invention, the method further comprising determining in the population of cells which comprises definite endodermal cells at least one marker that is positively associated with definite endodermal cells, the marker being selected from the group consisting of: GATA3, SEMA3E, HHEX, ZNF280A, FAM184A, WDR72, PDZK1, RLBP1L2, SHISA2, VIL1, STMN2, APOA2, SERHL, PPFIBP2, DKK1, MUM1L1, IGFBP5, ST6GALNAC2, TSPYL5, STC1, SYTL5, EPSTI1, ANKRD1, ARHGAP24, KRT18P49, PRSS2, RHOBTB3, FRZB, RARB, ADAMTS9, ARL4D, PRDM1, HP, FZD5, TRY6, ATP6V0D2, ANGPT2, DENND2C, BMP5, FOXA2, HAS2, BMP2, S100A16, FOLH1B, FAM122C, and FZD4, wherein upregulation above a predetermined threshold of an expression level of the definite endodermal cells as compared to the expression level of the marker in a reference cell, wherein said reference cell is an undifferentiated human embryonic stem cell (hESC), is indicative of a definite endodermal cell.

[0049] According to some embodiments of the invention, the method further comprising determining in the population of cells which comprises definite endodermal cells at least one marker that is negatively associated with definite endodermal cells, the marker being selected from the group consisting of: KDR, PCDHB5, FAT4, FLT1, NRN1, THBS2, PTPRZ1, SLC6A15, GPR176, SEMA6A, THBS1, CDH11, GRID2, SLC7A11, CDH1, LRFN5, EDNRB, THY1, NETO1, KCND2, TMPRSS11E, CD44, PDPN, SLC7A1, KAL1, KCNG3, GPM6B, FXYD5, PCDH18, ICAM3, MCTP1, TACR3, TMEM155, ZFP42, THUMPD3, ANXA1, SPP1, PRDM14, GNA14, EDIL3, CXCL12, PSMD5, PRRX1, NANOG, TRIM22, NANOG, RASGRF2, POU5F1B, POLR3G, HHLA1, POU5F1, VSNL1, SCG3, B3GALT1, LECT1, NTS, MBNL1, CKMT1A, NECAB1, FGF2, SFRP2, DCLK1, DACT1, CRABP1, TFAP2C, SCGB3A2, LRAT, CUZD1, GLB1L3, METTL7A, VAT1L, COL12A1, OLFML3, SOX2, USP44, HIST1H4F, KGFLP1, CPT1A, and DBC1, wherein downregulation above a predetermined threshold of an expression level of the marker negatively associated with definite endodermal cells as compared to the expression level of the marker in a reference cell, wherein said reference cell is an undifferentiated human embryonic stem cell (hESC), is indicative of a definite endodermal cell.

[0050] According to some embodiments of the invention, the at least one marker positively associated with definite endodermal cells is selected from the group consisting of: FSHR, COLEC12, ROR2 ITGA5, LRP2, CD177, CCKBR, TRPA1, KEL, FOLR1, FOLH1, APOA1, APOA1, FZD5, FN1, BMP2, ADAMTS9, DPP4, FGA, GPR128, IGFBP5, LIFR, FZD4, PRTG, STC1, TNFSF4, CD177, IHH, LAMA1, GPC3, LGI1, FN1, LPHN3, FGB, KIT, DPP4, TRO, SPA17, ROBO2, DLK1, CST1, DKK1, HAS2, APOA2, CDH2, LGR5, AFP, FLRT3, APOB, DGKK, HP, SYTL5, SLC7A7, TTR, FRZB, RSPO3, GCNT1, DIO3, TMEM27, APOC1, EPHA4, C4orf18, GLIPR2, PCDH10, F10, BMP5, FMO5, STMN2, SLC5A9, PORCN, EGFLAM, RAB17, CST2, PNPLA3, MOSPD1, ELMO1, CHST9, SLC30A10, TMC7, C8orf49, CDH12, ST8SIA4, SLCO2A1, MANEA, LRIG3, HCN1, ADAMTS12, TMEM144, VTN, CAMK2N1, ABCC4, PCDH7, OR2T4, UNC93A, COL4A6, PAMR1, SLC1A1, PROS1, APOM, APOM, APOM, LYPD6B, TMEM88, ITLN2, BMPER, GPR141, VEGFA, DKK1, APOA2, AFP, APOB, FLRT3, KIAA1772, FBN2, FRZB, KLK6, FREM2, RSPO3, APOA1, APOA1, SEMA3D, KEL, BMP5, HEPH, STMN2, CACNB3, CHST9, TMC7, FAM171B, ATP5G1, FOLR1, ABCC2, EFNA5, CPT1C, MAGED1, RASA4, KDELR3, ST6GALNAC2, EDNRA, LRRC37B, ABCC4, CLCN5, MBOAT2, SLC44A5, NPC2, ELFN1, MMD, SLC5A3, IMPAD1, OSTC, DSC2, SLC31A1, SLC5A12, LRRN3, NPIPL3, GDPD1, NPIPL3, NPIPL3, LINGO2, and LYPD6B.

[0051] According to some embodiments of the invention, the at least one marker positively associated with definite endodermal cells is selected from the group consisting of: FSHR, COLEC12, ROR2 ITGA5, LRP2, CD177, CCKBR, TRPA1, KEL, FOLR1, FOLH1, APOA1, APOA1, FZD5, FN1, BMP2, ADAMTS9, DPP4, FGA, GPR128, IGFBP5, LIFR, FZD4, PRTG, STC1, TNFSF4, CD177, IHH, LAMA1, GPC3, LGI1, FN1, LPHN3, FGB, KIT, DPP4, TRO, SPA17, ROBO2, and DLK1.

[0052] According to some embodiments of the invention, the at least one marker positively associated with definite endodermal cells is selected from the group consisting of: CD177, CCKBR, APOA1, APOA1, FSHR, FZD5, FN1, BMP2, ADAMTS9, DPP4, FGA, COLEC12, ROR2, GPR128, IGFBP5, LIFR, FZD4, ITGA5, STC1, TNFSF4, CD177 and IHH.

[0053] According to some embodiments of the invention, the isolated population of pancreatic progenitor cells are further characterized by an expression signature of PDX1+/ngn3+/pax4+/hlxb9+/nkx6.1+/Hnf6+/sox9+.

[0054] According to some embodiments of the invention, the pancreatic progenitor cells are genetically unmodified.

[0055] According to some embodiments of the invention, the definite endodermal cells are genetically unmodified.

[0056] According to some embodiments of the invention, the definite endodermal cells are characterized by a SOX17+/SOX7+ expression signature.

[0057] According to some embodiments of the invention, the definite endodermal cells are characterized by a SOX17+/SOX7+/GSC+/CER+/FOXA2+/CD34+/CXCR4+/NANOG− expression signature.

[0058] According to some embodiments of the invention, the definite endodermal cells are characterized by a SOX17+/SOX7+/GSC+/CER+/FOXA2+/CXCR4+/NANOG− expression signature.

[0059] According to some embodiments of the invention, the undifferentiated embryonic stem cells (ESCs) are characterized by Oct4+ expression pattern.

[0060] According to some embodiments of the invention, the pancreatic progenitor cells are obtained by differentiating stem cells into pancreatic progenitor cells.

[0061] According to some embodiments of the invention, the definite endodermal cells are obtained by differentiating stem cells into the definite endodermal cells.

[0062] According to some embodiments of the invention, the stem cells are undifferentiated pluripotent stem cells.

[0063] According to some embodiments of the invention, the stem cells are adult stem cells.

[0064] According to some embodiments of the invention, the stem cells are fetal stem cells.

[0065] According to some embodiments of the invention, the undifferentiated pluripotent stem cells are embryonic stem cells (ESCs).

[0066] According to some embodiments of the invention, the undifferentiated pluripotent stem cells are induced pluripotent stem cells (iPSCs).

[0067] According to some embodiments of the invention, the cells are human cells.

[0068] According to some embodiments of the invention, differentiating the undifferentiated pluripotent stem cells into the pancreatic progenitor cells is performed by: (a) differentiating the pluripotent stem cells into definite endodermal cells to thereby obtain a population of cells which comprises definite endodermal cells, and (b) differentiating the population of cells which comprises the definite endodermal cells into the pancreatic progenitor cells, thereby inducing the differentiation of the pluripotent stem cells into the pancreatic progenitor cells.

[0069] According to some embodiments of the invention, differentiating the undifferentiated pluripotent stem cells into the pancreatic progenitor cells is performed by differentiation of the pluripotent stem cells into embryoid bodies.

[0070] According to some embodiments of the invention, the embryoid bodies are differentiated until about day 7-21 of human EBs differentiation.

[0071] According to some embodiments of the invention, differentiating the undifferentiated pluripotent stem cells into the definite endodermal cells is performed by culturing the pluripotent stem cells in the presence of activin A, Wnt3A, a small molecule Induce Definitive Endoderm 1 (IDE1) and/or a small molecule Induce Definitive Endoderm 2 (IDE2).

[0072] According to some embodiments of the invention, differentiating the definite endodermal cells into the pancreatic progenitor cells is performed by culturing the definite endodermal cells in the presence of retinoic acid.

[0073] According to some embodiments of the invention, differentiating the definite endodermal cells into the pancreatic progenitor cells is performed by culturing the definite endodermal cells in the presence of bFGF, KGF, FGF10, noggin, cyclopamine, KAAD cyclopamine, B27, Indolactam V, nicotinamide and/or epidermal growth factor.

[0074] According to some embodiments of the invention, step (b) of the method of some embodiments of the invention is effected by an immunological isolation assay selected from the group consisting of fluorescent activated cell sorter (FACS), Magnetic-activated cell sorting (MACS) or immunopanning

[0075] According to some embodiments of the invention, the nucleic acid construct is a bacterial artificial chromosome (BAC).

[0076] According to some embodiments of the invention, the cell is a stem cell.

[0077] According to some embodiments of the invention, the stem cell is an embryonic stem cell or an induced pluripotent stem cell.

[0078] According to some embodiments of the invention, the cell is a human cell.

[0079] According to some embodiments of the invention, the method further comprising synthesizing the compound capable of inducing differentiation of the undifferentiated pluripotent stem cells to the definite endodermal cells.

[0080] According to some embodiments of the invention, the undifferentiated pluripotent stem cell is an embryonic stem cell, an adult stem cell or an adult-derived stem cell such as induced pluripotent stem cells (iPSC).

[0081] According to some embodiments of the invention, the pluripotent stem cell is characterized by an Oct4+/SSEA4+/SSEA3+/TRA1-60+ expression signature.

[0082] According to some embodiments of the invention, the method further comprising synthesizing the compound capable of inducing differentiation of the definite endodermal cells or undifferentiated pluripotent stem cells to the pancreatic progenitor cells.

[0083] According to some embodiments of the invention, the kit further comprising a pluripotent stem cell.

[0084] According to some embodiments of the invention, the kit further comprising at least one agent suitable for detecting an expression level of a marker of interest.

[0085] According to some embodiments of the invention, the expression level is detected by an RNA detection method.

[0086] According to some embodiments of the invention, the expression level is detected by a protein detection method.

[0087] According to some embodiments of the invention, the kit further comprising a genetic micro array chip.

[0088] Unless otherwise defined, all technical and/or scientific terms used herein have the same meaning as commonly understood by one of ordinary skill in the art to which the invention pertains. Although methods and materials similar or equivalent to those described herein can be used in the practice or testing of embodiments of the invention, exemplary methods and/or materials are described below. In case of conflict, the patent specification, including definitions, will control. In addition, the materials, methods, and examples are illustrative only and are not intended to be necessarily limiting.

### BRIEF DESCRIPTION OF THE DRAWINGS

[0089] Some embodiments of the invention are herein described, by way of example only, with reference to the accompanying drawings. With specific reference now to the drawings in detail, it is stressed that the particulars shown are by way of example and for purposes of illustrative discussion of embodiments of the invention. In this regard, the description taken with the drawings makes apparent to those skilled in the art how embodiments of the invention may be practiced.

[0090] In the drawings:

[0091] FIGS. 1A-C depict generation and expression of the SOX17-GFP reporter constructs. EGFP and floxed neomycin resistance gene was knocked into the SOX17 gene locus in a human genomic BAC by replacing the coding sequence of SOX17 (ATG to TGA) with the coding sequence of GFP and also the floxed neomycin resistance gene. FIG. 1A schematically illustrates the structure of a recombinant SOX17-GFP BAC construct (using BAC RP11-53M11) according to some embodiments of the invention. FIG. 1B schematically illustrates the structure of a recombinant SOX17-GFP plasmid according to some embodiments of the invention. The positions of the 5′-arm, the 3′-arm in the plasmid construct are shown relative to nucleotide number 1 of the recombinant BAC RP11-53M11 SOX17-GFP (SEQ ID NO:1). In addition the positions of two non repetative 3′ external screening probes are also shown with positions relative to nucleotide number 1 of the recombinant BAC RP11-53M11 SOX17-GFP (SEQ ID NO:1). “Ext.”=external. FIG. 1C schematically illustrates the structure of the recombinant RP11-47H10 SOX17-GFP BAC construct according to some embodiments of the invention.

[0092] FIGS. 2A-H depict expression of the SOX17-GFP reporter construct in human embryonic stem cells and cells differentiated therefrom. FIG. 2A-FACS (fluorescence-activated cell sorting) of GFP expressing cells in two day old embryoid bodies (EBs) of a SOX17-GFP clone grown in the presence of activin A (66 ng/ml). A hESC clone containing the SOX17 reporter BAC was allowed to differentiate to form EBs. At day 2, the cells were dissociated and subjected to sorting by FACS into GFP⁺ (GFP-positive cells; green cells in gate R2) and GFP⁻ (GFP-negative cells; red cells) cell populations. The GFP⁺ population represents a population of SOX17⁺ (SOX17-positive) endoderm progenitor cells. FIGS. 2B-2E are microscopic images depicting SOX17 GFP reporter cells observed in phase contrast (FIGS. 2B-C) or using fluorescent microscopy (FIGS. 2D-E). A SOX17 GFP reporter clone was grown in the presence of activin A (66 ng/ml) for three days, and GFP expression was observed using a fluorescent microscope. FIG. 2F-A microscopic image depicting SOX17 expression in a SOX17 reporter clone. An 80% confluent monolayer of the SOX17-GFP reporter ES cell line was treated for three days with activin A (66 ng/ml), following which immunohistochemistry was performed with anti-SOX17 (red staining) and anti-GFP (green staining) antibodies. Note the clear correlation between SOX17 and GFP expression. FIG. 2G-A microscopic image depicting double staining of the cells described in FIG. 2F with both OCT4 (green staining), which marks undifferentiated cells, and SOX17 (red staining), which marks the definitive endoderm population. Note that OCT4 positive cells are negative for SOX17. FIG. 2H-A histogram depicting relative gene expression levels in SOX17-GFP+ cells as compared to SOX17-GFP-cells. SOX17-GFP reporter cells were grown as a monolayer in the presence of activin A (66 ng/ml), were harvested and FACS-sorted into GFP⁺ and GFP⁻ cells. RNA was extracted from the sorted populations which was reverse transcribed and was analyzed by real-time qPCR. The relative expression of various genes in the SOX17-GFP⁺ population as compared to the SOX17-GFP⁻ population is presented. Note that while SOX17, SOX7, GSC, CER, FOXA2, CD34 and CXCR4 are highly expressed in SOX17-GFP⁺ cells as compared to the SOX17-GFP⁻ cells, the expression of NANOG, a marker of pluripotency, is higher in SOX17-GFP⁻ cells as compared to SOX17-GFP⁺ cells.

[0093] FIGS. 3A-E depict generation of PDX1-GFP reporter constructs according to some embodiments of the invention. FIG. 3A—a schematic illustration of the PDX1 ATG-GFP-knock in recombinant BAC construct of some embodiments of the invention. FIG. 3B—a schematic illustration with a nucleotide positions of the 5′-arm, GFP gene, floxed neomycin resistance gene and 3′-arm of the PDX1 ATG-GFP-knock in BAC construct of some embodiments of the invention. FIG. 3C—a schematic illustration of the PDX1 ATG-GFP-knock in plasmid construct (which includes the 5′-arm, the GFP gene, the floxed neomycin resistance gene and the 3′-arm) along with the relative position of the 3′-external probe (not included in the plasmid construct) in the recombinant BAC which was used to generate the recombinant plasmid construct; FIG. 3D—a schematic illustration of the PDX1-IRES-GFP plasmid construct according to some embodiments of the invention. FIG. 3E—a schematic illustration of the PDX1-mCherry BAC construct according to some embodiments of the invention.

[0094] FIGS. 4A-D depicts expression of the PDX1-GFP reporter BAC. FIGS. 4A-B—Dot plots depicting FACS analyses of 15 day-old EBs from PDX1 GFP reporter BAC clones. The PDX1 BAC reporter clone was allowed to form EBs for fifteen days. The EBs were then dissociated into single cells which were analysed by FACS. FIG. 4A-represents control cells from wild type hESCs that do not contain a reporter construct. FIG. 4B—represents GFP expression (R2) in EBs from PDX1-GFP reporter clone. Note that while in the control cells there are no cells which express GFP (R2), cells harbouring the PDX1-GFP construct express GFP (R2). FIG. 4C-A confocal microscopy image depicting 15 day-old EBs developed from a hESC harbouring the PDX1-GFP reporter clone that were subjected to immunostaining. Note that the EBs contain cells which express PDX1 in the nucleus (red staining) and GFP in the cytoplasm (green staining) The nuclei were counterstained with TO-PRO-3 (blue stain). FIG. 4D-A histogram depicting gene expression levels in PDX1-GFP⁺ cells and PDX1-GFP⁻ cells as compared to unsorted EBs. The PDX1 BAC reporter clone was allowed to form EBs for fifteen days after which they were dissociated into single cells and the PDX1-GFP⁺ cells and PDX1-GFP⁻ cells were sorted by FACS, and RNA was extracted from the GFP⁺ and GFP⁻ populations. qRT-PCR (quantitative RT-PCR) was performed to compare expression of various markers in the two different cell populations. Red bars=GFP⁺ cells; Blue bars=GFP− cells. Note that PDX1 is enriched in the GFP⁺ population. Also note the upregulation of markers of pancreatic differentiation HLXB9, HNF6, NGN3 and PAX4 in PDX1-GFP+ cells as compared to PDX1-GFP⁻ cells.

[0095] FIGS. 5A-E depict gene profiling of the SOX17⁺ and PDX1⁺ precursor cells. FIG. 5A—Schematic description of the strategy for identification of unique, stage specific expression markers. Each colored ellipse represents a different differentiation stage in pancreatic development from undifferentiated embryonic cells (OCT4 positive cells), through endodermal progenitor cells (50×17 positive cells); pancreatic progenitor cells (PDX1 positive cells) to mature pancreatic cells (insulin positive cells). RNA from each cell group was extracted and expression profiling was performed. Comparison between each group enables stage specific identification. FIGS. 5B-E—graphs depicting clustering of gene expression profiles obtained by Affymetrix analysis of mRNA extracted from GFP positive cells that were isolated by FACS from SOX17 reporter clones or from PDX1 reporter clones, and compared with the gene expression profile of undifferentiated hESC and of mature pancreas (as reported in the Affymetrix site). FIG. 5B—“SOX17 only genes” (definite endodermal-associated genes, represented by the newly identified markers: TMEM45A, RELL2 and PPFIA4; FIG. 5C—PDX1 only genes, represented by SILV (Official gene symbol PMEL) and GPR50; FIG. 5D—SOX17 and PDX1 genes, represented by the STX16, DLK1, CPT1C, LRP2 and BST2; and FIG. 5E—PDX1 and Pancreases genes, represented by TROP-2 (also known as TROP2; official gene symbol TACSTD2).

[0096] FIGS. 6A-B depict cell sorting using antibodies which specifically bind GPR50 and TROP-2 in twenty five day old genetically-unmodified EBs and gene expression analysis of the various subgroups. FIG. 6A-Twenty five day old disociated EBs were immunostained with GPR50 (FITC-labeled) and TROP-2 (APC, Allophycocyanin-labeled) antibodies. Four populations were separated by FACS: GPR50−/TROP-2−, GPR50−/TROP-2⁺, GPR50⁺/TROP-2− and GPR50⁺/TROP-2⁺. FIG. 6B—RT-qPCR was performed to compare expression of various pancreatic markers in the four different cell populations isolated by FACS as described in FIG. 6B.

[0097] FIG. 7 is a graph depicting gene clustering by Partek analysis. The x axis: cell types; The y axis: normalized expression means value. Purple, red, green and blue curves represent the specific genes for the SOX17⁺, SOX17⁺/PDX1⁺, PDX1⁺ and PDX1⁺/Pancreas cell populations, respectively.

[0098] FIG. 8 is a histogram depicting SOX17⁺ stage specific genes. The x axis: genes; The y axis: expression±SE. Blue, red, green and purple bars represent HESC, SOX17, PDX1 and Pancreas expression, respectively.

[0099] FIG. 9 is a histogram depicting PDX1⁺ stage-specific genes. The x axis: genes; The y axis: expression±SE. Blue, red, green and purple bars represent HESC, SOX17, PDX1 and Pancreas expression, respectively.

[0100] FIG. 10 is a histogram depicting SOX17⁺/PDX1⁺ stage specific genes. The x axis: genes; The y axis: expression±SE. Blue, red, green and purple bars represent HESC, SOX17, PDX1 and Pancreas expression, respectively.

[0101] FIG. 11 is a histogram depicting PDX1⁺-Pancreas specific genes. The x axis: genes; The y axis: expression±SE. Blue, red, green and purple bars represent HESC, SOX17, PDX1 and Pancreas expression, respectively.

[0102] FIGS. 12A-E are FACS analyses depicting the expression of the new endodermal surface markers BST (FIG. 12A), FLRT3 (FIG. 12B), COLEC12 (FIG. 12C), GPR49 (FIG. 12D) and LIFR (FIG. 12E) in cells of day-7 embryoid bodies. Embryoid bodies were prepared from H9.2 hESCs grown for 7 days and then separated to single cells with TrypLE Select. Next, the cells were incubated for 30 minutes at room temperature with one of the following antibodies: Rabbit anti BST-2 1:200; Rabbit anti FLRT-3 1:50; Goat anti CL-P1/COLEC12 1:40; Rabbit anti GPR-49/LGRS 1:100; Anti human LIF-R-PE 1:10 or control non treated cells, followed by secondary antibodies anti rabbit Cy3 (for BST2, FLRT-3 and GPR-49) or anti goat Cy3 (COLEC12) for 15 minutes at room temperature. The expression of these markers in the EBs (green) were compared to undifferentiated hESCs cells (red) by FACS calibrator (BD) using Flow-Jo analysis. Note that 43.3% of the EBs cells are BST+(FIG. 12A), 70.19% of the EBs cells are COLEC12+ (FIG. 12C), 38.32% of the EBs cells are PGR49+ (FIG. 12D), and 16.13% of the EBs cells are LIFR+(FIG. 12E).

[0103] FIGS. 13A-D are FACS analyses depicting BST2, KDR and CXCR4 expression in IDE treated cells. Undifferentiated H9.2 cells were treated with IDE1/2 and then stained with an anti-BST2 antibody (1:200), an anti-KDR antibody Fitc conjugated (1:10) or with a combination of both, followed by a cy3-conjugated secondary antibody; or stained with 1:10 anti-human CXCR4-PerCP and 1:10 anti-human VEGF R2/KDR-Fitc, and taken for FACS analysis. Note that incubation with an anti-BST2 antibody resulted in isolation of 11.9% BST2+ cells from the IDE-treated cells (FIG. 13A); incubation with an anti-KDR antibody resulted in 4.32% KDR+ cells from IDE-treated cells (FIG. 13B); incubation with an anti-BST2 and anti-KDR antibodies resulted in 10.7% Bst2⁺/KDR⁻ (BST2 positive and KDR negative) cells of the IDE-treated cells and 0.39% of KDR+/BST2− (KDR positive and BST2 negative) cells of the IDE-treated cells (FIG. 13C); and incubation with the anti-CXCR4 and anti-KDR antibodies resulted in 1.05% CXCR4+/KDR− (CXCR4 positive and KDR negative) cells of the IDE-treated cells (FIG. 13D).

[0104] FIGS. 14A-C are representative images of confocal microscopy depicting expression of PDX1 in day-28 of human embryoid bodies which were sorted with an anti-TROP-2 antibody, demonstrating enrichment of a pancreatic progenitor cells. Blue-DAPI, nuclear staining; Red—PDX1. Note that most of the cells presented in each of the microscopic fields express PDX1 in their cytoplasm.

### DETAILED DESCRIPTION OF THE INVENTION

[0105] The present invention, in some embodiments thereof, relates to methods of isolating pancreatic progenitor cells, definite endodermal cells and isolated cell population obtained thereby and, to nucleic acid constructs, cells and kit for identifying markers which characterize pancreatic progenitor cells or definite endodermal cells, and to methods and kits using same for identifying compounds involved in the differentiation of same.

[0106] Before explaining at least one embodiment of the invention in detail, it is to be understood that the invention is not necessarily limited in its application to the details set forth in the following description or exemplified by the Examples. The invention is capable of other embodiments or of being practiced or carried out in various ways.

[0107] In the quest for developing cutting edge therapeutics, a significant effort is put on the production of stem cells (hESC and/or iPS) derived treatments. A key step in a successful production of new insulin secreting cells is the identification, isolation and characterization of stage-specific progenitor cells. The present inventors used genetic labeling for screening stage specific genes, and examined the expression profiling of cells in specific stages of the pancreatic differentiation process.

[0108] FIG. 5A depicts the general strategy used to identify markers presenting differential expression across different cell types. To achieve that goal, pluripotent stem cells were used for two major differentiation stages: (1) Definitive endoderm stage represented by SOX17 positive population; (2) Pancreatic progenitor cells represented by PDX1 positive population. Undifferentiated pluripotent stem cells (e.g., ESCs) were used as control for the experiment. In addition, DNA microarray data from pancreas cells was used for further comparisons. To enhance the reliability of the analysis, three replicas from each cell type were included in the experiment.

[0109] Thus, the present inventors have uncovered various markers which characterize the endoderm progenitor population and the pancreatic progenitor population, two intermediate stages along the differentiation pathway to insulin producing cells. As described in the Examples section which follows, the present inventors have generated human embryonic stem cells clones harboring SOX17 (definitive endoderm marker) regulatory sequences fused to a reporter gene (e.g., GFP) (FIGS. 1A-C, Example 1 of the Examples section which follows), and the PDX1 (pancreatic progenitor marker) regulatory sequences fused to a reporter gene (e.g., GFP or mCherry) (FIGS. 3A-E, Example 2 of the Examples section which follows), introduced the constructs into embryonic stem cells and identified subpopulations of GFP cells [FIG. 2A (SOX17+ cells) and FIG. 4B (PDX1+ cells); Example 1 and 2 of the Examples section which follows]. Using FACS-based purification, the present inventors identified and isolated stage-specific human progenitor cell populations. As is further shown in FIGS. 2H and 4D, Tables 1-12 and described in Examples 1-3 of the Examples section which follows, the present inventors have determined the expression level of various genes in the isolated SOX17+ or PDX1+ stage-specific populations and identified genes that are upregulated or downregulated at specific stages of differentiation and hence define those stages. The identified markers (genes) are involved in the differentiation process and can be used for optimizing conditions for ultimately producing beta cells for transplantation therapy, for selecting pancreatic progenitors from mixed populations of differentiating cells and for carrying out quality control of candidate islet replacement cells. In addition, as is shown in Tables 13-20 and described in Example 4 of the Examples section which follows, by employing the PARTEK cluster analysis the present inventors have identified additional genes/markers which can be used to identify pancreatic progenitor cells, definite endodermal cells, SOX17 and PDX1 expressing cells, and PDX1+ and pancreatic cells. Further experiments using some of the novel markers identified herein were used to isolate pancreatic progenitor cells. Thus, as shown in FIGS. 14A-C and described in Example 5 of the Examples section which follows, cells of embryoid bodies (day 28), which were sorted using an anti-TROP-2 antibody, were found to include at least 84% of PDX1-positive cells. In addition, as is shown in FIGS. 12A-E and described in Table 21 (Example 6 of the Examples section which follows), cells of 7-day-old EBs were found to express high levels of BST2, FLRT3, COLEC12, GPR-49/LGRS and LIF-R as compared to undifferentiated hESCs. Moreover, induction of undifferentiated hESCs towards the definite endoderm stage by treatment with IDE1/IDE2 resulted in cells which are BST2+/KDR−, and cells which are CXCR4+/KDR− (FIGS. 13A-D, Example 7 of the Examples section which follows).

[0110] Thus, according to an aspect of some embodiments of the invention there is provided a method of identifying pancreatic progenitor cells. The method is effected by determining in a population of cells which comprises pancreatic progenitor cells at least one marker that is:

[0111] (i) positively associated with pancreatic differentiation, the marker being selected from the group consisting of: TACSTD2 (TROP-2), GPR50, BST2, NTRK2, ITGA4, KDR, PTPRN, LGI1, VIPR2, SLC2A1, MUC15, MUC12, LPHN3, MUC16, VTCN1, MMP16, FZD3, ITGB6, GFRA3, ROBO1, NLGN1, MUC12, CNTFR, LPHN1, SULF1, ADAM23, SCUBE3, PLAU, CDON, SLIT2, C7orf68, PLXDC2, CD74, MUC15, GPR56, VTCN1, ITGB6, AREG, BOC, KLRK1, PRTG, PTPRZ1, GABRP, SILV, KIAA1772, PLP1, OVOS, HAPLN1, EPHA7, ENO2, PCDHB5, OVOS, SYT1, DCT, GPAM, SLITRK6, DCC, FREM2, SDK2, CGA, ATP1B2, SEMA3D, PCDHB15, CDH1, WNT8B, LPAR4, NPIPL3, FAM171B, PTN, ABCC2, ADAMTS3, RASA4, CPT1C, SLC6A6, PCDHB3, LRRC37B, RNFT2, KCNG3, TRPC1, ALPPL2, OR4F21, CCL2, KIF5A, OLFM2, CACNG7, MPHOSPH9, SLC13A4, MOXD1, C6orf186, SLC4A8, STX16, AMY2A, SPARCL1, MGP, A2M, DCN, ATP8B1, MMRN1, EMP1, PLA2G2A, PDE3A, TLR3, CYP1B1, PTGIS, RFTN2, PLEKHA2, SMOC1, STOM, JAM2, CHL1, SCG5, IGFBP7, NPR3, IFI6, CR1L, OR2A4, OR2A7, KCNG3, CACNG7, GRID2, CDH1, LPAR3, SEMA6A, PTPRZ1, ATP1A3, CAMKV, SCNN1G, SYT6, SLC18A2, PCDHB5, ABCG2, HLA-DRA, CR1L, HTR2C, EDNRB, PCDH11X, SLC17A7, SCNN1A, CD9, CXCL16, FXYD5, GABRQ, GFRA3, CACNA2D2, CLDN4, PLP1, PDPN, MMP24, SDK2, GPR176, GPR64, GPR160, PCDH11Y, NKAIN4, ATP1B2, SCN8A, THBS4, CR2, HLA-DQA1, HLA-DRA, HTR7, SLC2A1, HLA-DRA, KCNS3, SLC7A3, HLA-DPB2, CACNA1B, and GPR143, wherein an upregulation above a predetermined threshold of an expression level of the marker positively associated with the pancreatic differentiation as compared to the expression level of the marker in a reference cell, wherein the reference cell is a definite endodermal cell which expresses SOX17, is indicative of a positive identification of a pancreatic progenitor cell, and alternatively or additionally

[0112] (ii) negatively associated with the pancreatic differentiation, the marker being selected from the group consisting of: LGR5, CCKBR, CXCR4, FLRT3, TRPA1, SLC40A1, LRIG3, COLEC12, EPSTI1, GPR128, CDH2, SLC5A9, FSHR, SLC30A10, IL13RA1, SLC7A7, PCDH10, SLC1A1, GPR141, LIFR, TMEM27, GPC4, LYPD6B, FOLH1, TRPC4, PCDH7, KEL, KCNJ3, OR2T4, VIPR2, FLRT2, CD34, SLC39A8, CLDN11, CXCR7, ITGA5, ITGAV, CALCR, CLDN18, SLC7A5, TMBIM4, SLCO2A1, CDH10, AMHR2, ASAM, CLDN1, DSCAM, TMEM88, PLXNA2, CD177, TMEM144, GPR37, GJA5, SEMA6D, NIPAL2, GPR151, MCC, TMEM136, KCNG1, LHFPL2, MOSPD1, SLC37A1, LRIT3, EPHA4, GPR177, and IL1R1, wherein a downregulation above a predetermined threshold of an expression level of the marker negatively associated with the pancreatic differentiation as compared to the expression level of the marker in a reference cell, wherein the reference cell is a definite endodermal cell which expresses SOX17, is indicative of a positive identification of a pancreatic progenitor cell,

[0113] thereby identifying the pancreatic progenitor cells.

[0114] As used herein the phrase “pancreatic progenitor cell” relates to a cell which express the duodenal homoebox factor-1 (PDX1) and which is not terminally differentiated but has the potential to differentiate to pancreatic endocrine, exocrine and/or duct cells.

[0115] As used herein the phrase “terminally differentiated” refers to a cell which cannot further differentiate in the lineage.

[0116] According to some embodiments of the invention, the pancreatic progenitor cell is capable of differentiating into at least two types of cells present in the pancreas.

[0117] It should be noted that the pancreas includes endocrine, exocrine and duct cells.

[0118] Pancreatic endocrine cells are present in the pancreatic islets of Langerhans, and produce hormones that underlie the endocrine functions of the pancreas, such as insulin, glucagon, and somatostatin. Pancreatic exocrine cells are present in the pancreas and secrete the pancreatic juice containing digestive enzymes that assist the absorption of nutrients and the digestion in the small intestine (e.g., proteases and peptidases, lipases, carbohydrases, and nucleases). Pancreatic duct cells transport bile and pancreatic enzymes from the pancreas to the hepatopancreatic ampulla.

[0119] According to some embodiments of the invention, the pancreatic progenitor cells are capable of differentiating into insulin-producing cells.

[0120] As used herein the term “identifying” refers to classifying a cell according the expression level of a marker characterizing the cell.

[0121] For example, a cell can be classified as being a pancreatic progenitor cell or as being a non-pancreatic progenitor cell based on the expression level of a marker characterizing the pancreatic progenitor cell.

[0122] As used herein the phrase “associated with pancreatic differentiation” refers to a marker which is upregulated (i.e., positively associated) or downregulated (i.e., negatively associated) when a cell is induced towards the pancreatic cell lineage, e.g., in a pancreatic progenitor cell.

[0123] As used herein the phrase “expression level” refers to the degree of gene expression and/or gene product activity in a specific cell. For example, up-regulation or down-regulation of various genes can affect the level of the gene product (i.e., RNA and/or protein) in a specific cell.

[0124] It should be noted that the level of expression can be determined in arbitrary absolute units, or in normalized units (relative to known expression levels of a control reference). For example, when using DNA chips, the expression levels are normalized according to the chips' internal controls or by using quantile normalization such as RMA (Robust Multichip Average).

[0125] As used herein the term “marker” refers to a gene or a gene product described using an accepted gene symbol.

[0126] According to some embodiments of the invention, the level of the marker is determined by the expression level of any of the polynucleotide transcripts which comprise the target nucleotide sequence identified by the Affymetrix probe set ID and/or any of the proteins which comprise the amino acid sequence encoded by the target nucleotide sequence identified by the Affymetrix probe set ID. The target nucleotide sequences identified by each of the Affymetrix probe set IDs are provided in Tables 1-20 in the Examples section which follows. The polynucleotides and polypeptides (which are identified by the Affynetrix probe set ID) are presented in Tables 1-20 by their sequence identifiers (SEQ ID NO:) and in some cases also by their GenBank Accession numbers. All polypeptides and polynucleotides are provided in the sequence listing of the application.

[0127] According to some embodiments of the invention, each of the polynucleotides or polypeptides, for which the expression level is determined, comprises the entire target sequence (with 100% sequence identity) or the amino acid sequence encoded by the target sequence, respectively.

[0128] The cells used by the method of some embodiments of the invention can be isolated cells (at least partially removed from a subject), cultured cells and/or non-cultured cells (e.g., primary cells obtained from a subject). The cells can be obtained from the subject by any known method including, but not limited to, tissue biopsy (e.g., pancreas biopsy) obtained using a surgical tool or a needle), fine needle aspiration, and the like. It should be noted that the cells may be isolated from the subject (e.g., for in vitro detection) or may optionally comprise a cell that has not been physically removed from the subject (e.g., in vivo detection).

[0129] According to some embodiments of the invention, the expression level of the marker in the test cell (e.g., the cell of the population of cells which is subject to the method of identifying pancreatic progenitor cells according to some embodiments of the invention) and in the reference cell (e.g., the definite endodermal cell which expresses SOX17) is determined under identical assay conditions.

[0130] According to some embodiments of the invention, the level of expression of the marker (gene) of the invention is determined using an RNA or a protein detection method.

[0131] According to some embodiments of the invention, the RNA or protein molecules are extracted from the cell of the subject.

[0132] Methods of extracting RNA or protein molecules from cells of a subject are well known in the art. Once obtained, the RNA or protein molecules can be characterized for the expression and/or activity level of various RNA and/or protein molecules using methods known in the arts.

[0133] Non-limiting examples of assays for detecting the expression level of RNA molecules in a cell sample include Northern blot analysis, RT-PCR, RNA in situ hybridization (using e.g., DNA or RNA probes to hybridize RNA molecules present in the cells or tissue sections), in situ RT-PCR (e.g., as described in Nuovo G J, et al. Am J Surg Pathol. 1993, 17: 683-90; Komminoth P, et al. Pathol Res Pract. 1994, 190: 1017-25), and oligonucleotide microarray (e.g., by hybridization of polynucleotide sequences derived from a sample to oligonucleotides attached to a solid surface [e.g., a glass wafer) with addressable location, such as Affymetrix microarray (Affymetrix®, Santa Clara, Calif.)].

[0134] Non-limiting examples of assays for detecting the expression level and/or activity of specific protein molecules in a cell sample include Enzyme linked immunosorbent assay (ELISA), Western blot analysis, radio-immunoassay (RIA), Fluorescence activated cell sorting (FACS), immunohistochemical analysis, in situ activity assay (using e.g., a chromogenic substrate applied on the cells containing an active enzyme), in vitro activity assays (in which the activity of a particular enzyme is measured in a protein mixture extracted from the cells). For example, in case the detection of the expression level of a secreted protein is desired, ELISA assay may be performed on a sample of fluid obtained from the subject (e.g., serum), which contains cell-secreted content.

[0135] According to some embodiments of the invention, the definite endodermal cell, which express SOX17, is characterized by a SOX17+/SOX7+ expression signature.

[0136] According to some embodiments of the invention, the definite endodermal cell is characterized by the SOX17+/SOX7+/GSC+/CER+/FOXA2+/CXCR4+/NANOG− expression signature.

[0137] According to some embodiments of the invention, the definite endodermal cell is characterized by the SOX17+/SOX7+/GSC+/CER+/FOXA2+/CXCR4+/NANOG− expression signature.

[0138] According to some embodiments of the invention, the definite endodermal cell is characterized by the SOX17+/SOX7+/GSC+/CER+/FOXA2+/CXCR4+/CD34+/NANOG− expression signature.

[0139] According to some embodiments of the invention, the expression level of the marker in the definite endodermal cell is determined from at least one definite endodermal cells, e.g., from at least 2, from at least 3, from at least 4, from at least 5, from at least 6, from at least 7, from at least 8, from at least 9, from at least 10, from at least 20, from at least 100, from at least 1000, from at least 1×10⁴, from at least 1×10⁵, e.g., from at least 1×10⁶ definite endodermal cells. It should be noted that when more than one definite endodermal cell is used, the expression level of the marker may comprise an average of the expression level of several or all cells, and those of skills in the art are capable of averaging expression levels from 2 or more cells, using e.g., normalized expression values.

[0140] As used herein the phrase “an upregulation above a predetermined threshold” refers to an increase in the level of expression in the cell relative to a reference cell (e.g., the definite endodermal cell) which is higher than a predetermined threshold such as a about 10%, e.g., higher than about 20%, e.g., higher than about 30%, e.g., higher than about 40%, e.g., higher than about 50%, e.g., higher than about 60%, higher than about 70%, higher than about 80%, higher than about 90%, higher than about 2 times, higher than about three times, higher than about four time, higher than about five times, higher than about six times, higher than about seven times, higher than about eight times, higher than about nine times, higher than about 20 times, higher than about 50 times, higher than about 100 times, higher than about 200 times of at least one reference cell (e.g., definite endodermal cell). The upregulation in the expression level can be also determined using logarithmic fold changes as shown in the Examples section which follows.

[0141] According to some embodiments of the invention, the method further comprising determining in a population of cells which comprises pancreatic progenitor cells at least one marker that is: (i) negatively associated with the pancreatic differentiation, the marker being selected from the group consisting of: CST1, CER1, ANKRD1, TRY6, HAS2, DKK1, PRSS2, HP, APOA2, RHOBTB3, BMP2, ACE2, STC1, PDZK1, HHEX, VIL1, PRDM1, EOMES, DNAJC15, TNIK, IGFBPS, RLBP1L2, ADAMTS9, EPSTI1, C5, ARHGAP24, TRY6, ANGPT2, TTR, MYL7, FST, KITLG, GATA3, ST8SIA4, CCDC141, TSPYLS, EGFLAM, TTN, LEFTY2, FOXA2, FAM184A, STMN2, DIO3, FN1, PRSS1, NPPB, RGSS, MANEA, OTX2, CFLAR, FZD5, LOC151009, IFLTD1, PPFIBP2, SYTLS, ARHGAP28, NTS, APOB, CST2, FOLH1B, TFF1, GPAM, RNF152, SEMA3E, OXCT1, DUSP4, RSPO3, EHHADH, DGKK, VEGFA, APOA1, RAB17, LYPD6B, TNNC1, ZNF280A, FRZB, APOA1, SOX17, SAMD3, BMPS, GATA4, MATN3, FAM122C, SPOCK3, PLOD2, NPL, ATP6V0D2, SERHL, SERPINE2, TGFB2, ELMO1, C8orf49, ENC1, COL5A2, FMO5, COL4A1, MGST2, GLUD2, CLIP4, UNC93A, GLIPR2, GSTA2, H2AFY2, ST6GALNAC2, DUSP6, NTN4, LHX1, PUS7L, TNC, BARB, HNF1B, SHISA2, NEXN, MSL3L2, IRAK4, S100A16, CDK6, FAM159B, ELL2, B3GALNT1, ARL4D, ETS2, MUM1L1, VTN, SEMA3A, ZNF611, VWA5A, ZNF518B, NUDT4P1, RASGEF1B, TPK1, ANXA3, MYL4, BMI1, ODC1, ARSE, PTPN13, ZNF321, NODAL, ANKMY2, LPGAT1, PROS1, KLF8, PAX6, GCNT1, S100Z, ZNF702P, CCDC129, LRRFIP1, TBC1D9, YPEL2, GCNT4, F10, ZNF585B, ELMOD2, GLT8D3, ETS1, SALL1, IAH1, RFC1, ZNF214, DPPA3, FGA, B3GNT5, COL4A6, DENND2C, FZD4, MYOCD, DDIT4L, PLCXD3, ELL2, SPOCK1, IGFBP6, SERHL2, SERPINI1, FAM26E, RNF128, RBM24, GALNT4, CTSL2, ALPK2, ANKRD20B, PLCE1, TAGLN, STAT4, SOAT1, MIXL1, HNF4A, IQCA1, KLHL14, MAML3, EGF, LEFTY1, ANKRD20B, RGS8, TAL2, ADI1, SPA17, KHDRBS2, and MCC, wherein a downregulation above a predetermined threshold of an expression level of the marker negatively associated with the pancreatic differentiation as compared to the expression level of the marker in a reference cell, wherein the reference cell is a definite endodermal cell which expresses SOX17 is indicative of a positive identification of a pancreatic progenitor cell and alternatively or additionally; (ii) positively associated with the pancreatic differentiation, the marker being selected from the group consisting of: ALPPL2, DPPA5, H19, CRYZ, CXCL12, TYW3, ZYG11A, CRABP1, IDO1, POU5F1, HEY2, HIST1H1A, TFAP2C, DPPA2, ZFP42, LECT1, NECAB1, CKMT1A, SAMHD1, FGF2, PLA2G2A, PRDM14, POU5F1, GLI3, GSTT2, OLFML3, DAZL, GALNT3, SOX2, POU5F1B, ACTN3, CPT1A, DCLK1, EDIL3, NANOG, THUMPD3, VASH2, ATCAY, USP44, HIST1H4F, NANOG, PIM2, DNMT3B, ZNF483, FEZF1, SCARNA9L, SCGB3A2, SILV, ENPP1, MYC, NLRP7, TDRD1, HHLA1, MT1G, RASL11B, PYGM, APOBEC3B, COL14A1, PTRF, HOXA1, CYP2S1, NRK, RASGRP2, FBXO2, KIF5A, PLEKHA2, HERC5, TRIML2, ARRDC4, HSPA2, ZNF248, NPTX2, MT1X, SPP1, PHC1, LRAT, NLRP4, GFPT2, ZNF680, MYO1E, B2M, DDX43, FABP3, GRHL2, ACOXL, CDCA7L, LDB2, KIAA1772, SFRP2, TRIM71, PLAU, AIM1, MT1E, STAT3, ZSCAN10, SCG3, VAT1L, HPDL, ZFP57, BNC2, CYP4F22, NOTCH1, LIX1, QPRT, ZNF398, RGS10, MT1G, GAA, PAX3, RHBDL3, POLR3G, FAM46B, MT1F, GLB1L3, RBM46, PRODH, ZNF300, STOM, PLA2G16, GAL, TOX, B3GALT1, MDGA2, MAD2L2, ATP6V0A4, LAMA2, HORMAD1, TRIM22, RNF157, ADD2, UPRT, PSMB8, ZNF562, FAM9C, UGT8, KIF5A, SNRPN, UNC13A, DOC2A, ZNF560, VENTX, RARRES2, CCDC109B, MT2A, ALDOC, STARD9, and AKAP1, wherein an upregulation above a predetermined threshold of an expression level of the marker positively associated with the pancreatic differentiation as compared to the expression level of the marker in a reference cell, wherein the reference cell is a definite endodermal cell which expresses SOX17, is indicative of a positive identification of a pancreatic progenitor cell.

[0142] According to an aspect of some embodiments of the invention, the method of identifying the pancreatic progenitor cells comprising determining in a population of cells which comprises pancreatic progenitor cells at least one marker that is: (i) negatively associated with the pancreatic differentiation, the marker being selected from the group consisting of: LGR5, CCKBR, CXCR4, FLRT3, TRPA1, SLC40A1, LRIG3, COLEC12, EPSTI1, GPR128, CDH2, SLC5A9, FSHR, SLC30A10, IL13RA1, SLC7A7, PCDH10, SLC1A1, GPR141, LIFR, TMEM27, GPC4, LYPD6B, FOLH1, TRPC4, PCDH7, KEL, KCNJ3, OR2T4, VIPR2, FLRT2, CD34, SLC39A8, CLDN11, CXCR7, ITGA5, ITGAV, CALCR, CLDN18, SLC7A5, TMBIM4, SLCO2A1, CDH10, AMHR2, ASAM, CLDN1, DSCAM, TMEM88, PLXNA2, CD177, TMEM144, GPR37, GJA5, SEMA6D, NIPAL2, GPR151, MCC, TMEM136, KCNG1, LHFPL2, MOSPD1, SLC37A1, LRIT3, EPHA4, GPR177, IL1R1, CST1, CER1, ANKRD1, TRY6, HAS2, DKK1, PRSS2, HP, APOA2, RHOBTB3, BMP2, ACE2, STC1, PDZK1, HHEX, VIL1, PRDM1, EOMES, DNAJC15, TNIK, IGFBP5, RLBP1L2, ADAMTS9, EPSTI1, C5, ARHGAP24, TRY6, ANGPT2, TTR, MYL7, FST, KITLG, GATA3, ST8SIA4, CCDC141, TSPYL5, EGFLAM, TTN, LEFTY2, FOXA2, FAM184A, STMN2, DIO3, FN1, PRSS1, NPPB, RGS5, MANEA, OTX2, CFLAR, FZD5, LOC151009, IFLTD1, PPFIBP2, SYTL5, ARHGAP28, NTS, APOB, CST2, FOLH1B, TFF1, GPAM, RNF152, SEMA3E, OXCT1, DUSP4, RSPO3, EHHADH, DGKK, VEGFA, APOA1, RAB17, LYPD6B, TNNC1, ZNF280A, FRZB, APOA1, SOX17, SAMD3, BMP5, GATA4, MATN3, FAM122C, SPOCK3, PLOD2, NPL, ATP6V0D2, SERHL, SERPINE2, TGFB2, ELMO1, C8orf49, ENC1, COL5A2, FMO5, COL4A1, MGST2, GLUD2, CLIP4, UNC93A, GLIPR2, GSTA2, H2AFY2, ST6GALNAC2, DUSP6, NTN4, LHX1, PUS7L, TNC, BARB, HNF1B, SHISA2, NEXN, MSL3L2, IRAK4, S100A16, CDK6, FAM159B, ELL2, B3GALNT1, ARL4D, ETS2, MUM1L1, VTN, SEMA3A, ZNF611, VWA5A, ZNF518B, NUDT4P1, RASGEF1B, TPK1, ANXA3, MYL4, BMI1, ODC1, ARSE, PTPN13, ZNF321, NODAL, ANKMY2, LPGAT1, PROS1, KLF8, PAX6, GCNT1, S100Z, ZNF702P, CCDC129, LRRFIP1, TBC1D9, YPEL2, GCNT4, F10, ZNF585B, ELMOD2, GLT8D3, ETS1, SALL1, IAH1, RFC1, ZNF214, DPPA3, FGA, B3GNT5, COL4A6, DENND2C, FZD4, MYOCD, DDIT4L, PLCXD3, ELL2, SPOCK1, IGFBP6, SERHL2, SERPINI1, FAM26E, RNF128, RBM24, GALNT4, CTSL2, ALPK2, ANKRD20B, PLCE1, TAGLN, STAT4, SOAT1, MIXL1, HNF4A, IQCA1, KLHL14, MAML3, EGF, LEFTY1, ANKRD20B, RGS8, TAL2, ADI1, SPA17, KHDRBS2, and MCC, wherein a downregulation above a predetermined threshold of an expression level of the marker negatively associated with the pancreatic differentiation as compared to the expression level of the marker in a reference cell, wherein the reference cell is a definite endodermal cell which expresses SOX17, is indicative of a positive identification of a pancreatic progenitor cell and alternatively or additionally; (ii) positively associated with the pancreatic differentiation, the marker being selected from the group consisting of: TACSTD2 (TROP-2), GPR50, BST2, NTRK2, ITGA4, KDR, PTPRN, LGI1, VIPR2, SLC2A1, MUC15, MUC12, LPHN3, MUC16, VTCN1, MMP16, FZD3, ITGB6, GFRA3, ROBO1, NLGN1, MUC12, CNTFR, LPHN1, SULF1, ADAM23, SCUBE3, PLAU, CDON, SLIT2, C7orf68, PLXDC2, CD74, MUC15, GPR56, VTCN1, ITGB6, AREG, BOC, KLRK1, PRTG, PTPRZ1, GABRP, SILV, KIAA1772, PLP1, OVOS, HAPLN1, EPHA7, ENO2, PCDHB5, OVOS, SYT1, DCT, GPAM, SLITRK6, DCC, FREM2, SDK2, CGA, ATP1B2, SEMA3D, PCDHB15, CDH1, WNT8B, LPAR4, NPIPL3, FAM171B, PTN, ABCC2, ADAMTS3, RASA4, CPT1C, SLC6A6, PCDHB3, LRRC37B, RNFT2, KCNG3, TRPC1, ALPPL2, OR4F21, CCL2, KIF5A, OLFM2, CACNG7, MPHOSPH9, SLC13A4, MOXD1, C6orf186, SLC4A8, STX16, AMY2A, SPARCL1, MGP, A2M, DCN, ATP8B1, MMRN1, EMP1, PLA2G2A, PDE3A, TLR3, CYP1B1, PTGIS, RFTN2, PLEKHA2, SMOC1, STOM, JAM2, CHL1, SCG5, IGFBP7, NPR3, IFI6, CR1L, OR2A4, OR2A7, KCNG3, CACNG7, GRID2, CDH1, LPAR3, SEMA6A, PTPRZ1, ATP1A3, CAMKV, SCNN1G, SYT6, SLC18A2, PCDHB5, ABCG2, HLA-DRA, CR1L, HTR2C, EDNRB, PCDH11X, SLC17A7, SCNN1A, CD9, CXCL16, FXYD5, GABRQ, GFRA3, CACNA2D2, CLDN4, PDPN, MMP24, SDK2, GPR176, GPR64, GPR160, PCDH11Y, NKAIN4, ATP1B2, SCN8A, THBS4, CR2, HLA-DQA1, HLA-DRA, HTR7, SLC2A1, HLA-DRA, KCNS3, SLC7A3, HLA-DPB2, CACNA1B, GPR143, ALPPL2, DPPA5, H19, CRYZ, CXCL12, TYW3, ZYG11A, CRABP1, IDO1, POU5F1, HEY2, HIST1H1A, TFAP2C, DPPA2, ZFP42, LECT1, NECAB1, CKMT1A, SAMHD1, FGF2, PLA2G2A, PRDM14, POU5F1, GLI3, GSTT2, OLFML3, DAZL, GALNT3, SOX2, POU5F1B, ACTN3, CPT1A, DCLK1, EDIL3, NANOG, THUMPD3, VASH2, ATCAY, USP44, HIST1H4F, NANOG, PIM2, DNMT3B, ZNF483, FEZF 1, SCARNA9L, SCGB3A2, SILV, ENPP1, MYC, NLRP7, TDRD1, HHLA1, MT1G, RASL11B, PYGM, APOBEC3B, COL14A1, PTRF, HOXA1, CYP2S1, NRK, RASGRP2, FBXO2, KIF5A, PLEKHA2, HERC5, TRIML2, ARRDC4, HSPA2, ZNF248, NPTX2, MT1X, SPP1, PHC1, LRAT, NLRP4, GFPT2, ZNF680, MYO1E, B2M, DDX43, FABP3, GRHL2, ACOXL, CDCA7L, LDB2, KIAA1772, SFRP2, TRIM71, PLAU, AIM1, MT1E, STAT3, ZSCAN10, SCG3, VAT1L, HPDL, ZFP57, BNC2, CYP4F22, NOTCH1, LIX1, QPRT, ZNF398, RGS10, MT1G, GAA, PAX3, RHBDL3, POLR3G, FAM46B, MT1F, GLB1L3, RBM46, PRODH, ZNF300, STOM, PLA2G16, GAL, TOX, B3GALT1, MDGA2, MAD2L2, ATP6V0A4, LAMA2, HORMAD1, TRIM22, RNF157, ADD2, UPRT, PSMB8, ZNF562, FAM9C, UGT8, KIF5A, SNRPN, UNC13A, DOC2A, ZNF560, VENTX, RARRES2, CCDC109B, MT2A, ALDOC, STARD9, and AKAP1, wherein an upregulation above a predetermined threshold of an expression level of the marker positively associated with the pancreatic differentiation as compared to the expression level of the marker in a reference cell, wherein the reference cell is a definite endodermal cell which expresses SOX17 is indicative of a positive identification of a pancreatic progenitor cell.

[0143] According to some embodiments of the invention, the method further comprising determining in a population of cells which comprises pancreatic progenitor cells at least one marker that is: (i) negatively associated with the pancreatic differentiation, the marker being selected from the group consisting of: TMPRSS11E, LGR5, SLC39A8, TM4SF18, CUZD1, GPC4, SLC22A3, CXCR4, NRN1, TMBIM4, THBS2, SLC7A5, TMEM47, NTS, CER1, CST1, NODAL, PRRX1, KGFLP1, NFIB, GCNT4, MIXL1, CAV1, LUM, RASGRF2, OXCT1, GLIPR1, VSNL1, FST, POSTN, GNA14, CBR1, TNIK, RGS5, KGFLP1, ETS1, MPPED2, ACTA2, SEMA3A, DACT1, ANXA1, COL12A1, KITLG, MMP2, DLEU2, ACE2, ACTG2, PUS7L, RNU5B-1, COL3A1, LEFTY2, NPPB, S1AE, AFP, ZFP42, HAS2, TRY6, NR5A2, EBF1, RPPH1, NFIX, IAH1, RUNX1T1, COL5A2, VCAN, RNU5E, ADAMT S5, CDK6, LRRC17, DBC1, MYL4, ANKRD1, EOMES, LCP1, TAGLN, TNFAIP6, FAM159B, and PGM5P2, wherein a downregulation above a predetermined threshold of an expression level of the marker negatively associated with the pancreatic differentiation as compared to the expression level of the marker in a reference cell, wherein the reference cell is an undifferentiated embryonic stem cell (hESC), is indicative of a positive identification of a pancreatic progenitor cell, and alternatively or additionally; (ii) positively associated with the pancreatic differentiation, the marker being selected from the group consisting of: TACSTD2 (TROP-2), BST2 LRP2, LAMA1, GPC3, LGI1, FN1, LPHN3, FGB, KIT, DPP4, TRO, SPA17, ROBO2, DLK1, PRTG, DKK1, APOA2, AFP, APOB, FLRT3, KIAA1772, FBN2, FRZB, KLK6, FREM2, RSPO3, APOA1, APOA1, SEMA3D, KEL, BMP5, HEPH, STMN2, CACNB3, CHST9, TMC7, FAM171B, ATP5G1, FOLR1, ABCC2, EFNA5, CPT1C, MAGED1, RASA4, KDELR3, ST6GALNAC2, EDNRA, LRRC37B, ABCC4, CLCN5, MBOAT2, SLC44A5, NPC2, ELFN1, MMD, SLC5A3, IMPAD1, OSTC, DSC2, SLC31A1, SLC5A12, LRRN3, NPIPL3, GDPD1, NPIPL3, NPIPL3, LINGO2, LYPD6B, PRTG, LRP2, CACNG7, DLK1, CACNA2D2, CR1L, SCNN1G, HTR2C, LPAR3, THBS3, KCNG3, SDK2, HLA-DRA, SLC18A2, CXCL16, TMEM63C, SLC17A7, GFRA3, DPPA5, ALPPL2, CRYZ, H19, ZYG11A, TYW3, ARRDC4, TXNIP, FOS, NCRNA00173, GSTT2, C3, DDX43, B2M, PYGM, CYP4F22, ZNF578, ENO2, ZNF248, NLRP4, SNORD59B, SNORD113-4, CASZ1, MIR21, IFI16, ZNF560, TDRD1, ZNF680, HSPA1B, HSPA1A, EGR1, RASGRP2, ASMTL, CPT1C, ATCAY, ACSF2, PAMR1, SILV, ACTN3, HORMAD1, ACSM3, RNF157, SAMHD1, and RCN1, wherein an upregulation above a predetermined threshold of an expression level of the marker positively associated with the pancreatic differentiation as compared to the expression level of the marker in a reference cell, wherein the reference cell is an undifferentiated embryonic stem cell (ESC), is indicative of a positive identification of a pancreatic progenitor cell.

[0144] According to an aspect of some embodiments of the invention, the method of identifying pancreatic progenitor cells comprising determining in a population of cells which comprises pancreatic progenitor cells at least one marker that is: (i) negatively associated with pancreatic differentiation, the marker being selected from the group consisting of: LGR5, CCKBR, CXCR4, FLRT3, TRPA1, SLC40A1, LRIG3, COLEC12, EPSTI1, GPR128, CDH2, SLC5A9, FSHR, SLC30A10, IL13RA1, SLC7A7, PCDH10, SLC1A1, GPR141, LIFR, TMEM27, GPC4, LYPD6B, FOLH1, TRPC4, PCDH7, KEL, KCNJ3, OR2T4, VIPR2, FLRT2, CD34, SLC39A8, CLDN11, CXCR7, ITGA5, ITGAV, CALCR, CLDN18, SLC7A5, TMBIM4, SLCO2A1, CDH10, AMHR2, ASAM, CLDN1, DSCAM, TMEM88, PLXNA2, CD177, TMEM144, GPR37, GJA5, SEMA6D, NIPAL2, GPR151, MCC, TMEM136, KCNG1, LHFPL2, MOSPD1, SLC37A1, LRIT3, EPHA4, GPR177, and IL1R1, wherein downregulation above a predetermined threshold of an expression level of the marker negatively associated with the pancreatic differentiation as compared to the expression level of the marker in a reference cell, wherein the reference cell is a definite endodermal cell which expresses SOX17, is indicative of a positive identification of a pancreatic progenitor cell, and alternatively or additionally; (ii) positively associated with pancreatic differentiation, the marker being selected from the group consisting of: TACSTD2 (TROP-2), GPR50, BST2, NTRK2, ITGA4, KDR, PTPRN, LGI1, VIPR2, SLC2A1, MUC15, MUC12, LPHN3, MUC16, VTCN1, MMP16, FZD3, ITGB6, GFRA3, ROBO1, NLGN1, MUC12, CNTFR, LPHN1, SULF1, ADAM23, SCUBE3, PLAU, CDON, SLIT2, C7orf68, PLXDC2, CD74, MUC15, GPR56, VTCN1, ITGB6, AREG, BOC, KLRK1, PRTG, PTPRZ1, GABRP, SILV, KIAA1772, PLP1, OVOS, HAPLN1, EPHA7, ENO2, PCDHB5, OVOS, SYT1, DCT, GPAM, SLITRK6, DCC, FREM2, SDK2, CGA, ATP1B2, SEMA3D, PCDHB15, CDH1, WNT8B, LPAR4, NPIPL3, FAM171B, PTN, ABCC2, ADAMTS3, RASA4, CPT1C, SLC6A6, PCDHB3, LRRC37B, RNFT2, KCNG3, TRPC1, ALPPL2, OR4F21, CCL2, KIF5A, OLFM2, CACNG7, MPHOSPH9, SLC13A4, MOXD1, C6orf186, SLC4A8, STX16, AMY2A, SPARCL1, MGP, A2M, DCN, ATP8B1, MMRN1, EMP1, PLA2G2A, PDE3A, TLR3, CYP1B1, PTGIS, RFTN2, PLEKHA2, SMOC1, STOM, JAM2, CHL1, SCG5, IGFBP7, NPR3, IFI6, CR1L, OR2A4, OR2A7, KCNG3, CACNG7, GRID2, CDH1, LPAR3, SEMA6A, PTPRZ1, ATP1A3, CAMKV, SCNN1G, SYT6, SLC18A2, PCDHB5, ABCG2, HLA-DRA, CR1L, HTR2C, EDNRB, PCDH11X, SLC17A7, SCNN1A, CD9, CXCL16, FXYD5, GABRQ, GFRA3, CACNA2D2, CLDN4, PTPRN, PLP1, PDPN, MMP24, SDK2, GPR176, GPR64, GPR160, PCDH11Y, NKAIN4, ATP1B2, SCN8A, THBS4, CR2, HLA-DQA1, HLA-DRA, HTR7, SLC2A1, HLA-DRA, KCNS3, SLC7A3, HLA-DPB2, CACNA1B, and GPR143 wherein upregulation above a predetermined threshold of an expression level of the marker positively associated with the pancreatic differentiation as compared to the expression level of the marker in a reference cell, wherein the reference cell is a definite endodermal cell which expresses SOX17, is indicative of a positive identification of a pancreatic progenitor cells, and alternatively or additionally; (iii) negatively associated with pancreatic differentiation, the marker being selected from the group consisting of: TMPRSS11E, LGR5, SLC39A8, TM4SF18, CUZD1, GPC4, SLC22A3, CXCR4, NRN1, TMBIM4, THBS2, SLC7A5, and TMEM47, wherein downregulation above a predetermined threshold of an expression level of the marker negatively associated with pancreatic differentiation as compared to the expression level of the marker in a reference cell, wherein the reference cell is an undifferentiated embryonic stem cell (ESC), is indicative of a positive identification of a pancreatic progenitor cell, and alternatively or additionally; (iv) positively associated with pancreatic differentiation, the marker being selected from the group consisting of: TACSTD2 (TROP-2), LRP2, LAMA1, GPC3, LGI1, FN1, LPHN3, FGB, KIT, DPP4, TRO, SPA17, ROBO2, DLK1, BST2, PRTG, LRP2, CACNG7, DLK1, CACNA2D2, CR1L, SCNN1G, HTR2C, LPAR3, THBS3, KCNG3, SDK2, HLA-DRA, SLC18A2, CXCL16, TMEM63C, SLC17A7, GFRA3, PRTG, DKK1, APOA2, AFP, APOB, FLRT3, KIAA1772, FBN2, FRZB, KLK6, FREM2, RSPO3, APOA1, APOA1, SEMA3D, KEL, BMP5, HEPH, STMN2, CACNB3, CHST9, TMC7, FAM171B, ATP5G1, FOLR1, ABCC2, EFNA5, CPT1C, MAGED1, RASA4, KDELR3, ST6GALNAC2, EDNRA, LRRC37B, ABCC4, CLCN5, MBOAT2, SLC44A5, NPC2, ELFN1, MMD, SLC5A3, IMPAD1, OSTC, DSC2, SLC31A1, SLC5A12, LRRN3, NPIPL3, GDPD1, NPIPL3, NPIPL3, LINGO2, and LYPD6B, wherein upregulation above a predetermined threshold of an expression level of the marker positively associated with pancreatic differentiation as compared to the expression level of the marker in a reference cell, wherein the reference cell is an undifferentiated ESC, is indicative of a positive identification of a pancreatic progenitor cell; thereby identifying the pancreatic progenitor cells.

[0145] As shown in FIG. 4D and described in Example 2 of the Examples section which follows, pancreatic progenitor cells identified according to the method of some embodiments of the invention express typical pancreatic progenitor cell markers, such as PDX1, hlxb9, Hnf6, ngn3, and Pax4.

[0146] According to some embodiments of the invention, the population of cells which comprises pancreatic progenitor cells express a transcription factor selected from the group consisting of PDX1, ngn3, pax4, hlxb9, nkx6.1, Hnf6, and sox9.

[0147] According to some embodiments of the invention, the definite endodermal cells are identified by a method comprising determining in a population of cells which comprises definite endodermal cells at least one marker that is: (i) negatively associated with definite endodermal cells, the marker being selected from the group consisting of: KDR, PCDHB5, FAT4, FLT1, NRN1, THBS2, PTPRZ1, SLC6A15, GPR176, SEMA6A, THBS1, CDH11, GRID2, SLC7A11, CDH1, LRFN5, EDNRB, THY1, NETO1, KCND2, TMPRSS11E, CD44, PDPN, SLC7A1, KAL1, KCNG3, GPM6B, FXYD5, PCDH18, ICAM3, MCTP1, TACR3, TMEM155, ZFP42, THUMPD3, ANXA1, SPP1, PRDM14, GNA14, EDIL3, CXCL12, PSMD5, PRRX1, NANOG, TRIM22, NANOG, RASGRF2, POU5F1B, POLR3G, HHLA1, POU5F1, VSNL1, SCG3, B3GALT1, LECT1, NTS, MBNL1, CKMT1A, NECAB1, FGF2, SFRP2, DCLK1, DACT1, CRABP1, TFAP2C, SCGB3A2, LRAT, CUZD1, GLB1L3, METTL7A, VAT1L, COL12A1, OLFML3, SOX2, USP44, HIST1H4F, KGFLP1, CPT1A, DBC1, CHAC1, CAV1, MT1G, NFIX, FERMT1, GLIPR1, TOX, SNRPN (SNORD116-6), HEY2, T1MP4, IDO1, MT2A, NR5A2, UPRT, MYC, CCDC109B, GAL, ZNF483, RND3, BNC2, COL3A1, LUM, LDB2, MT1E, SNRPN (SNORD116-23), SNRPN (SNORD116-27), GALNT3, PIPDX, PDK1, PREX2, CYP2S1, NRK, VAV3, TNFAIP6, ENPP1, ADD2, SNRPN (SNORD116-24), SNRPN (SNORD109A), STC2, SNORA22, MPPED2, ZNF562, GAP43, FOXB1, TSHZ3, HPGD, ZDHHC22, ACOXL, GLI3, CDCA7L, ZSCAN10, GFPT2, PLP2, HIST1H1A, CAMKV, HERC5, MT1X, TERF1, RAB31, SNRPN (SNORD116-13), ETV1, MT1G, ACTA1, SNRPN (SNORD116-20), NFIB, ZEB2, CBR1, ATXN7L1, SNRPN (SNORD116-1), MT1F, SNRPN (SNORD116-29), AP1M2, ACTG2, CYP2B6, SERPINE1, GRHL2, SLIT2, PIM2, SMARCA2, and RPPH1, wherein downregulation above a predetermined threshold of an expression level of the marker negatively associated with definite endodermal cells as compared to the expression level of the marker in a reference cell, wherein the reference cell is an undifferentiated embryonic stem cell (hESC), is indicative of a positive identification of a definite endodermal cell, and alternatively or additionally; (ii) positively associated with definite endodermal cells, the marker being selected from the group consisting of: FLRT3, FSHR, LIFR, ROR2, KEL, TRPA1, CD177, CCKBR, APOA1, APOA1, FZD5, FN1, BMP2, ADAMTS9, DPP4, FGA, COLEC12, GPR128, IGFBP5, FZD4, ITGA5, STC1, TNFSF4, CD177, IHH, LRP2, LAMA1, GPC3, LGI1, FN1, LPHN3, FGB, KIT, DPP4, TRO, SPA17, ROBO2, DLK1, CST1, DKK1, HAS2, APOA2, CDH2, LGR5, AFP, APOB, DGKK, HP, SYTL5, SLC7A7, TTR, FRZB, RSPO3, GCNT1, DIO3, TMEM27, APOC1, EPHA4, C4orf18, GLIPR2, PCDH10, F10, BMP5, FMO5, FOLR1, STMN2, SLC5A9, PORCN, EGFLAM, RAB17, CST2, PNPLA3, MOSPD1, ELMO1, CHST9, SLC30A10, TMC7, C8orf49, CDH12, ST8SIA4, SLCO2A1, MANEA, LRIG3, HCN1, ADAMTS12, FOLH1, TMEM144, VTN, CAMK2N1, ABCC4, PCDH7, OR2T4, UNC93A, COL4A6, PAMR1, SLC1A1, PROS1, APOM, APOM, APOM, LYPD6B, TMEM88, ITLN2, BMPER, GPR141, VEGFA, PRTG, DKK1, APOA2, AFP, APOB, FLRT3, KIAA1772, FBN2, FRZB, KLK6, FREM2, RSPO3, APOA1, APOA1, SEMA3D, KEL, BMP5, HEPH, STMN2, CACNB3, CHST9, TMC7, FAM171B, ATP5G1, FOLR1, ABCC2, EFNA5, CPT1C, MAGED1, RASA4, KDELR3, ST6GALNAC2, EDNRA, LRRC37B, ABCC4, CLCN5, MBOAT2, SLC44A5, NPC2, ELFN1, MMD, SLC5A3, IMPAD1, OSTC, DSC2, SLC31A1, SLC5A12, LRRN3, NPIPL3, GDPD1, NPIPL3, NPIPL3, LINGO2, TRPA1, SLC40A1, SLC30A10, CCKBR, VIPR2, COLEC12, FLRT3, LGR5, GPR141, BST2, SLC5A9, GPR128, KEL, LRIG3, LYPD6B, FSHR, LIFR, FOLH1, CXCR4, ITGA5, AMOT, LY6E, SEMA6D, GJA5, PRTG, CD34, TMEM144, ROR2, GPR177, OR2T4, SLC7A7, KCNJ3, CLDN18, GPR151, SLC44A5, CDH10, TMEM27, SLC1A1, TMEM56, CD177, PLXNA2, SLC26A2, DSCAM, TMEM133, IL13RA1, ATP2B1, CD302, MEGF9, EDNRA, CDH2, GPR161, TYRO3, FLRT2, LRIT3, PCDH7, NRCAM, SMAGP, AMHR2, ELTD1, GRPR, EPHA4, CD99, GATA3, SEMA3E, HHEX, ZNF280A, FAM184A, WDR72, PDZK1, RLBP1L2, SHISA2, VIL1, STMN2, APOA2, SERHL, PPFIBP2, DKK1, MUM1L1, IGFBP5, ST6GALNAC2, TSPYL5, STC1, SYTL5, EPSTI1, ANKRD1, ARHGAP24, KRT18P49, PRSS2, RHOBTB3, FRZB, RARB, ADAMTS9, ARL4D, PRDM1, HP, FZD5, TRY6, ATP6V0D2, ANGPT2, DENND2C, BMP5, FOXA2, HAS2, BMP2, S100A16, FOLH1B, FAM122C, FZD4, C5, S100A14, VEGFA, CLIP4, GPAM, HNF1B, APOA1, CFLAR, RBM24, RNF152, TTR, TTN, EGFLAM, APOB, DIO3, IFLTD1, ABCC4, CCDC141, ENC1, NEK2, ELMO1, SPOCK3, SERPINI1, ACSL1, GATM, EHHADH, NUDT4, CST1, GLUD2, NPL, ZNF702P, TRY6, SPOCK1, AGL, TFF1, DGKK, SALL1, MANEA, KIT, KRT19, TNNC1, SEPP 1, ST8SIA4, YPEL2, ANKMY2, DNAJC15, RNF128, PTPN13, F10, SAMD3, GCNT1, IPP, PROS1, SV2B, PLOD2, MAGEH1, CHST9, ZNF518B, TMEM106C, SERHL2, NTN4, SOX17, FRRS1, OTX2, RNASEL, ELMOD2, MYCT1, PAX6, MGST2, BBS5, MTSS1, VTN, WBP5, DUB4, CCDC92, BTG2, LPGAT1, FN1, TBX3, PLCE1, KRT19P2, IFI16, PORCN, PRSS1, MYL7, DUSP4, PROS1, ANKRD20B, CTSL2, FMO5, USP27X, LAMA1, ADAM28, ZNF611, ANKRD20B, ZNF137, S100Z, GPSM2, TGFB2, and ARHGAP28, wherein upregulation above a predetermined threshold of an expression level of the marker positively associated with definite endodermal cells as compared to the expression level of the marker in a reference cell, wherein the reference cell is an undifferentiated embryonic stem cell (hESC), is indicative of a positive identification of a definite endodermal cell, thereby identifying the definite endodermal cells.

[0148] According to some embodiments of the invention the at least one marker positively associated with pancreatic differentiation is selected from the group consisting of: TACSTD2 (TROP-2), GPR50, BST2, LGI1, VIPR2, SLC2A1, MUC15, MUC12, LPHN3, MUC16, VTCN1, MMP16, FZD3, ITGB6, GFRA3, ROBO1, NLGN1, MUC12, CNTFR, LPHN1, SULF1, ADAM23, SCUBE3, PLAU, CDON, SLIT2, C7orf68, PLXDC2, CD74, MUC15, GPR56, VTCN1, ITGB6, NTRK2, AREG, BOC, ITGA4, KLRK1, PRTG, PTPRZ1, GABRP, SILV, KIAA1772, PLP1, OVOS, HAPLN1, EPHA7, ENO2, PCDHB5, OVOS, SYT1, DCT, GPAM, SLITRK6, DCC, FREM2, SDK2, CGA, ATP1B2, SEMA3D, PCDHB15, CDH1, WNT8B, LPAR4, NPIPL3, FAM171B, PTN, ABCC2, ADAMTS3, RASA4, CPT1C, SLC6A6, PCDHB3, LRRC37B, RNFT2, KCNG3, TRPC1, ALPPL2, OR4F21, CCL2, KIF5A, OLFM2, CACNG7, MPHOSPH9, SLC13A4, MOXD1, C6orf186, SLC4A8, STX16, AMY2A, SPARCL1, MGP, A2M, DCN, ATP8B1, MMRN1, EMP1, PLA2G2A, PDE3A, TLR3, CYP1B1, PTGIS, RFTN2, PLEKHA2, SMOC1, STOM, JAM2, CHL1, SCG5, IGFBP7, NPR3, IFI6, CR1L, OR2A4, and OR2A7.

[0149] According to some embodiments of the invention the at least one marker positively associated with pancreatic differentiation is selected from the group consisting of: TACSTD2 (TROP-2), BST2, GPR50, ROBO1, NTRK2, ITGA4, LGI1, VIPR2, SLC2A1, MUC15, MUC12, LPHN3, MUC16, VTCN1, MMP16, FZD3, ITGB6, GFRA3, NLGN1, MUC12, CNTFR, LPHN1, SULF1, ADAM23, SCUBE3, PLAU, CDON, SLIT2, C7orf68, PLXDC2, CD74, MUC15, GPR56, VTCN1, ITGB6, AREG, BOC, and KLRK1.

[0150] According to some embodiments of the invention the at least one marker positively associated with pancreatic differentiation is TROP-2.

[0151] According to some embodiments of the invention the at least one marker positively associated with pancreatic differentiation is GPR50.

[0152] According to some embodiments of the invention the at least one marker positively associated with pancreatic differentiation comprises at least two markers, said at least two markers are TROP-2 and GPR50.

[0153] According to some embodiments of the invention the at least one marker positively associated with pancreatic differentiation comprises at least three markers, said at least three markers comprise TROP-2, GPR50 and at least one marker selected from the group consisting of TACSTD2 (TROP-2), GPR50, BST2, NTRK2, ITGA4, KDR, PTPRN, LGI1, VIPR2, SLC2A1, MUC15, MUC12, LPHN3, MUC16, VTCN1, MMP16, FZD3, ITGB6, GFRA3, ROBO1, NLGN1, MUC12, CNTFR, LPHN1, SULF1, ADAM23, SCUBE3, PLAU, CDON, SLIT2, C7orf68, PLXDC2, CD74, MUC15, GPR56, VTCN1, ITGB6, AREG, BOC, KLRK1, PRTG, PTPRZ1, GABRP, SILV, KIAA1772, PLP1, OVOS, HAPLN1, EPHA7, ENO2, PCDHB5, OVOS, SYT1, DCT, GPAM, SLITRK6, DCC, FREM2, SDK2, CGA, ATP1B2, SEMA3D, PCDHB15, CDH1, WNT8B, LPAR4, NPIPL3, FAM171B, PTN, ABCC2, ADAMTS3, RASA4, CPT1C, SLC6A6, PCDHB3, LRRC37B, RNFT2, KCNG3, TRPC1, ALPPL2, OR4F21, CCL2, KIF5A, OLFM2, CACNG7, MPHOSPH9, SLC13A4, MOXD1, C6orf186, SLC4A8, STX16, AMY2A, SPARCL1, MGP, A2M, DCN, ATP8B1, MMRN1, EMP1, PLA2G2A, PDE3A, TLR3, CYP1B1, PTGIS, RFTN2, PLEKHA2, SMOC1, STOM, JAM2, CHL1, SCG5, IGFBP7, NPR3, IFI6, CR1L, OR2A4, OR2A7, KCNG3, CACNG7, GRID2, CDH1, LPAR3, SEMA6A, PTPRZ1, ATP1A3, CAMKV, SCNN1G, SYT6, SLC18A2, PCDHB5, ABCG2, HLA-DRA, CR1L, HTR2C, EDNRB, PCDH11X, SLC17A7, SCNN1A, CD9, CXCL16, FXYD5, GABRQ, GFRA3, CACNA2D2, CLDN4, PLP1, PDPN, MMP24, SDK2, GPR176, GPR64, GPR160, PCDH11Y, NKAIN4, ATP1B2, SCN8A, THBS4, CR2, HLA-DQA1, HLA-DRA, HTR7, SLC2A1, HLA-DRA, KCNS3, SLC7A3, HLA-DPB2, CACNA1B, and GPR143.

[0154] According to some embodiments of the invention, the at least one marker positively associated with definite endodermal cells is selected from the group consisting of: COLEC12, ROR2, FLRT3, LGR5, LIFR, KEL, FSHR, TRPA1, FOLR1, LRP2, FOLH1, CD177, CCKBR, ITGA5, FZD5, FN1, BMP2, ADAMTS9, DPP4, FGA, GPR128, IGFBP5, FZD4, STC1, TNFSF4, CD177, IHH, APOA1, APOA1, LAMA1, GPC3, LGI1, FN1, LPHN3, FGB, KIT, DPP4, TRO, SPA17, ROBO2, DLK1, CST1, DKK1, HAS2, APOA2, CDH2, AFP, APOB, DGKK, HP, SYTL5, SLC7A7, TTR, FRZB, RSPO3, GCNT1, DIO3, TMEM27, APOC1, EPHA4, C4orf18, GLIPR2, PCDH10, F10, BMP5, FMO5, STMN2, SLC5A9, PORCN, EGFLAM, RAB17, CST2, PNPLA3, MOSPD1, ELMO1, CHST9, SLC30A10, TMC7, C8orf49, CDH12, ST8SIA4, SLCO2A1, MANEA, LRIG3, HCN1, ADAMTS12, TMEM144, VTN, CAMK2N1, ABCC4, PCDH7, OR2T4, UNC93A, COL4A6, PAMR1, SLC1A1, PROS1, APOM, APOM, APOM, LYPD6B, TMEM88, ITLN2, BMPER, GPR141, VEGFA, PRTG, DKK1, APOA2, AFP, APOB, FLRT3, KIAA1772, FBN2, FRZB, KLK6, FREM2, RSPO3, APOA1, APOA1, SEMA3D, KEL, BMP5, HEPH, STMN2, CACNB3, CHST9, TMC7, FAM171B, ATP5G1, FOLR1, ABCC2, EFNA5, CPT1C, MAGED1, RASA4, KDELR3, ST6GALNAC2, EDNRA, LRRC37B, ABCC4, CLCN5, MBOAT2, SLC44A5, NPC2, ELFN1, MMD, SLC5A3, IMPAD1, OSTC, DSC2, SLC31A1, SLC5A12, LRRN3, NPIPL3, GDPD1, NPIPL3, NPIPL3, LINGO2, and LYPD6B.

[0155] According to some embodiments of the invention, the at least one marker positively associated with definite endodermal cells is selected from the group consisting of: FSHR, LIFR, COLEC12, ROR2, ITGA5, CD177, CCKBR, APOA1, APOA1, FZD5, FN1, BMP2, ADAMTS9, DPP4, FGA, GPR128, IGFBP5, FZD4, STC1, TNFSF4, CD177, IHH, LRP2, LAMA1, GPC3, LGI1, FN1, LPHN3, FGB, KIT, DPP4, TRO, SPA17, ROBO2, and DLK1.

[0156] The phrase “embryonic stem cell” refers to an embryonic cell capable of differentiating into cells of all three embryonic germ layers (i.e., endoderm, ectoderm and mesoderm), or remaining in an undifferentiated state.

[0157] According to some embodiments of the invention, the ESC which is used as reference cell is a human ESC obtained from the embryonic tissue formed after gestation (e.g., blastocyst) before implantation (i.e., a pre-implantation blastocyst).

[0158] The embryonic stem cells of the invention can be obtained using well-known cell-culture methods. For example, human embryonic stem cells can be isolated from human blastocysts. Human blastocysts are typically obtained from human in vivo preimplantation embryos or from in vitro fertilized (IVF) embryos. Alternatively, a single cell human embryo can be expanded to the blastocyst stage. For the isolation of human ES cells the zona pellucida is removed from the blastocyst and the inner cell mass (ICM) is isolated by immunosurgery, in which the trophectoderm cells are lysed and removed from the intact ICM by gentle pipetting. The ICM is then plated in a tissue culture flask containing the appropriate medium which enables its outgrowth. Following 9 to 15 days, the ICM derived outgrowth is dissociated into clumps either by a mechanical dissociation or by an enzymatic degradation and the cells are then re-plated on a fresh tissue culture medium. Colonies demonstrating undifferentiated morphology are individually selected by micropipette, mechanically dissociated into clumps, and re-plated. Resulting ES cells are then routinely split every 4-7 days. For further details on methods of preparation human ES cells see Thomson et al., [U.S. Pat. No. 5,843,780; Science 282: 1145, 1998; Curr. Top. Dev. Biol. 38: 133, 1998; Proc. Natl. Acad. Sci. USA 92: 7844, 1995]; Bongso et al., [Hum Reprod 4: 706, 1989]; and Gardner et al., [Fertil. Steril. 69: 84, 1998].

[0159] It will be appreciated that commercially available stem cells can also be used with this aspect of the present invention. Human ES cells can be purchased from the NIH human embryonic stem cells registry (www.escr.nih.gov). Non-limiting examples of commercially available embryonic stem cell lines are BG01, BG02, BG03, BG04, CY12, CY30, CY92, CY10, TE03, TE04 and TE06.

[0160] According to the method of some embodiments of the invention, the hESCs are undifferentiated hESCs.

[0161] According to some embodiments of the invention, the undifferentiated hESCs are characterized by an Oct4+ expression pattern.

[0162] According to an aspect of some embodiments of the invention, there is provided a method of isolating pancreatic progenitor cells, comprising: (a) identifying the pancreatic progenitor cells according to the method of some embodiments of the invention, and (b) isolating the pancreatic progenitor cells identified according to step (a) to thereby obtain isolated pancreatic progenitor cells, thereby isolating the pancreatic progenitor cells.

[0163] As used herein the term “isolating” refers to at least partially separating from the natural environment e.g., the population of cells.

[0164] Isolating the pancreatic progenitor cells from the cell population can be performed by any immunological based method which results in the physical isolation of pancreatic progenitor cells having a specific cell surface marker using an antibody or an antibody fragment which specifically recognizes the marker. Examples include, but are not limited to isolation by fluorescence-activated cell sorting (FACS) using the specific antibodies, magnetic beads coated by the specific antibodies [Magnetic-activated cell sorting (MACS)], columns coated by the specific antibodies or immunopanning

[0165] According to some embodiments of the invention, step (b) of the method of some embodiments of the invention is effected by an immunological isolation assay selected from the group consisting of fluorescent activated cell sorter (FACS), Magnetic-activated cell sorting (MACS) or immunopanning

[0166] For example, for isolation using fluorescence-activated cell sorting, the cells are labeled with a fluorescent antibody (e.g., PE-conjugated anti TROP-2 antibody, or PE-conjugated anti GPR50 antibody) and then inserted into a cell sorter (e.g., FACS Aria sorter).

[0167] For isolation using magnetic beads, the cells are labeled with a magnetic bead conjugated antibody anti TROP-2 antibody (Miltenyi Biotec) or anti GPR antibody; alternatively, the cells can be labeled with a non-conjugated antibody and followed by incubation with a match isotype bead conjugated secondary antibody (anti mouse IgG1 bead conjugated). Isolation can be performed using magnetic cell separation column such as MAX (Miltenyi Biotec).

[0168] According to an aspect of some embodiments of the invention, there is provided an isolated population of pancreatic progenitor cells obtained according to the method of some embodiments of the invention.

[0169] According to some embodiments of the invention, the isolated pancreatic progenitor cell population is characterized by TROP-2+ expression pattern.

[0170] According to some embodiments of the invention, the isolated pancreatic progenitor cell population is characterized by TROP-2+/GPR50+ expression pattern.

[0171] According to some embodiments of the invention, the isolated pancreatic progenitor cell population is characterized by an ngn3+/pax4+/hlxb9+/nkx6.1+/Hnf6+/sox9+/PDX1+ expression signature.

[0172] According to an aspect of some embodiments of the invention, there is provided an isolated population of pancreatic progenitor cells, comprising at least about 50%, at least about 60%, e.g., at least about 75% (e.g., 75%), e.g., at least about 80% (e.g., 80%), e.g., at least about 85% (e.g., 85%), e.g., at least about 90% (e.g., 90%), e.g., at least about 95% (e.g., 95%), e.g., at least about 96%, e.g., at least about 97%, e.g., at least about 98%, e.g., at least about 99%, e.g., 100% of cells having a TROP-2+ and/or TROP-2+/GPR50+ expression pattern.

[0173] According to some embodiments of the invention, the isolated population of pancreatic progenitor cells is characterized by a TROP-2+/GPR50+/ngn3+/pax4+/hlxb9+/nkx6.1+/Hnf6+/sox9+/PDX1+ expression signature.

[0174] According to an aspect of some embodiments of the invention, there is provided an isolated population of pancreatic progenitor cells, comprising at least about 50%, at least about 60%, e.g., at least about 75% (e.g., 75%), e.g., at least about 80% (e.g., 80%), e.g., at least about 85% (e.g., 85%), e.g., at least about 90% (e.g., 90%), e.g., at least about 95% (e.g., 95%), e.g., at least about 96%, e.g., at least about 97%, e.g., at least about 98%, e.g., at least about 99%, e.g., 100% of cells PDX1+.

[0175] According to some embodiments of the invention, the isolated population of pancreatic progenitor cells is characterized by a TROP-2+/ngn3+/pax4+/hlxb9+/nkx6.1+/Hnf6+/sox9+/PDX1+ expression signature.

[0176] According to some embodiments of the invention, the pancreatic progenitor cells are genetically unmodified (i.e., were not subjected to genetic manipulation, using e.g., recombinant DNA techniques).

[0177] According to some embodiments of the invention, the isolated population of pancreatic progenitor cells can be further expanded to produce an expanded population of cells.

[0178] Following are non-limiting protocols for culturing and expanding the pancreatic progenitor cells isolated according to some embodiments of the invention, e.g., the TROP-2+/GPR50+ cells:

[0179] Protocol 1:

[0180] The pancreatic progenitor cells (e.g., TROP-2+/GPR50+ cells) are plated on adherent tissue culture plates and cultured in the presence of the DMEM medium (Invitrogen) supplemented with 1% B27 (Invitrogen) [For further details see Kroon 2008 (Nat Biotechnol. 2008; 26:443-52. Epub 2008 February 20) and D'Amour 2006 (Nat Biotechnol. 2006, 24:1392-401. Epub 2006 October 19), each of which is fully incorporated herein by reference]. The medium can be further supplemented with retinoic acid (RA, all trans retinoic acid at a concentration of 2 μM), CYC (KAAD cyclopamine 0.25 μM), and Nog (noggin 50 ng/ml). Additionally or alternatively, the medium can be supplemented with 2 μM RA, 0.25 μM CYC, and 50 ng/m FGF10. Additionally or alternatively, the medium can be supplemented with 50 ng/ml Exendin 4, with or without 1 μM DAPT. Additionally or alternatively, the medium can be CMRL (Invitrogen) supplemented with 1% BSA, 50 ng/ml IGF-1 and 50 ng/ml HGF with or without 50 ng/ml Exendin 4. Additionally or alternatively, the cells can be cultured in DMEM/F12 (Invitrogen), supplemented with N2 (Invitrogen), BSA (2 mg/ml) and bFGF (10 ng/ml) for 4 days, followed by 8 days of culturing in the presence of nicotinamide (10 mM), or alternatively culturing in DMEM/F12 (Invitrogen) supplemented with nicotinamide (10 mM) for 8 days.

[0181] Protocol 2:

[0182] The pancreatic progenitor cells (e.g., TROP-2+/GPR50+ cells) are plated on adherent tissue culture plates and cultured in the presence of the DMEM medium supplemented with 1% B27, with or without Indolactam V (e.g., at a concentration of 330 mM). Additionally or alternatively, the pancreatic progenitor cells are plated on adherent tissue culture plates and cultured in the presence of the DMEM medium supplemented with 1% B27, 2 μM RA, 50 ng/ml FGF10, 0.25 μM KAAD-cyclopamine and cultured for up to 3 days, followed by culturing the cells in the DMEM medium, in the presence of 1% B27, 50 ng/ml FGF10 with or without ILV (e.g., at a concentration of 300 nM) for up to 4 days [for further details see Borowiak 2009 (Cell Stem Cell. 2009; 4: 348-58) and Chen 2009 (Nat Chem Biol. 2009; 5:258-65. Epub 2009 March 15), each of which is fully incorporated herein by reference].

[0183] According to an aspect of some embodiments of the invention, there is provided a method of qualifying a pancreatic progenitor cell population, comprising: determining in a sample of the cell population a percentage of the pancreatic progenitor cells which are identified according to the method of some embodiments of the invention out of the total cells in the sample, thereby qualifying the pancreatic progenitor cell population.

[0184] According to some embodiments of the invention, pancreatic progenitor cell population has been isolated according to the method of some embodiments of the invention.

[0185] According to some embodiments of the invention, presence of at least a predetermined percentage of the pancreatic progenitor cells in the cell sample indicates the suitability of the pancreatic progenitor cells for transplantation in a subject.

[0186] According to some embodiments of the invention, the predetermined percentage of the pancreatic progenitor cells comprises at least about 80%, e.g., at least 81%, 82%, 83%, 84%, 85%, 86%, 87%, 88%, 89%, 90%, 91%, 92%, 93%, 94%, 95%, 96%, 97%, 98%, 99% or 100% pancreatic progenitor cells.

[0187] According to an aspect of some embodiments of the invention, there is provided a method of isolating insulin producing cells, comprising culturing the pancreatic progenitor cells isolated by the method of some embodiments of the invention, or the pancreatic progenitor cell population qualified according to the method of some embodiments of the invention under conditions suitable for maturation of the pancreatic progenitor cells into beta cells, thereby isolating insulin producing cells.

[0188] Methods and conditions suitable for maturation of the pancreatic progenitor cells into beta cells are known in the art and described in Kroon 2008 (Nat Biotechnol. 2008; 26:443-52), D'Amour 2006 (Nat Biotechnol. 2006, 24:1392-401), Borowiak 2009 (Cell Stem Cell. 2009; 4: 348-58) and Chen 2009 (Nat Chem Biol. 2009; 5:258-65. Epub 2009 March 15), each of which is fully incorporated herein by reference in its entirety.

[0189] According to an aspect of some embodiments of the invention, there is provided a method of transplanting pancreatic progenitor cells in a subject, (a) qualifying the pancreatic progenitor cells according to the method of some embodiments of the invention, wherein presence of at least a predetermined percentage of the pancreatic progenitor cells in the cell sample indicates the suitability of the pancreatic progenitor cells for transplantation in a subject, to thereby obtain a pancreatic progenitor cell population being suitable for transplantation in a subject, (b) transplanting in the subject the pancreatic progenitor cell population or cells derived therefrom being suitable for transplantation in a subject, thereby transplanting the pancreatic progenitor cells in the subject.

[0190] As used herein the phrase “cells derived therefrom” refers to cells which are differentiated from the pancreatic progenitor cells.

[0191] According to some embodiments of the invention, the cells which are differentiated from the pancreatic progenitor cells are capable of producing insulin.

[0192] According to some embodiments of the invention, the pancreatic progenitor cell population or cells derived therefrom can be encapsulated prior to transplantation in the subject.

[0193] The primary goal in encapsulation as a cell therapy is to protect allogeneic and xenogeneic cell transplants from destruction by the host immune system, thereby eliminating or reducing the need for immuno-suppressive drug therapy. Techniques for macro and microencapsulation of cells are known to those of skill in the art (see, for example, Chang, P. et al. 1999; Matthew, H. W. et al. 1991; Yanagi, K. et al. 1989; Cai Z. H. et al. 1988; Chang, T. M. 1992).

[0194] Encapsulation techniques are generally classified as microencapsulation, involving small spherical vehicles and macroencapsulation, involving larger flat-sheet and hollow-fiber membranes (Uludag, H. et al. Technology of mammalian cell encapsulation. Adv Drug Deliv Rev. 2000; 42: 29-64).

[0195] Methods of preparing microcapsules are known in the arts and include for example those disclosed by Lu M Z, et al., Cell encapsulation with alginate and alpha-phenoxycinnamylidene-acetylated poly(allylamine) Biotechnol Bioeng. 2000, 70: 479-83, Chang T M and Prakash S. Procedures for microencapsulation of enzymes, cells and genetically engineered microorganisms. Mol Biotechnol. 2001, 17: 249-60, and Lu M Z, et al., A novel cell encapsulation method using photosensitive poly(allylamine alpha-cyanocinnamylideneacetate). J. Microencapsul. 2000, 17: 245-51.

[0196] For example, microcapsules are prepared by complexing modified collagen with a ter-polymer shell of 2-hydroxyethyl methylacrylate (HEMA), methacrylic acid (MAA) and methyl methacrylate (MMA), resulting in a capsule thickness of 2-5 μm. Such microcapsules can be further encapsulated with additional 2-5 μm ter-polymer shells in order to impart a negatively charged smooth surface and to minimize plasma protein absorption (Chia, S. M. et al. Multi-layered microcapsules for cell encapsulation Biomaterials. 2002 23: 849-56).

[0197] Other microcapsules are based on alginate, a marine polysaccharide (Sambanis, A. Encapsulated islets in diabetes treatment. Diabetes Thechnol. Ther. 2003, 5: 665-8) or its derivatives. For example, microcapsules can be prepared by the polyelectrolyte complexation between the polyanions sodium alginate and sodium cellulose sulphate with the polycation poly(methylene-co-guanidine) hydrochloride in the presence of calcium chloride.

[0198] It will be appreciated that cell encapsulation is improved when smaller capsules are used. Thus, the quality control, mechanical stability, diffusion properties, and in vitro activities of encapsulated cells improved when the capsule size was reduced from 1 mm to 400 μm (Canaple L. et al., Improving cell encapsulation through size control. J Biomater Sci Polym Ed. 2002; 13: 783-96). Moreover, nanoporous biocapsules with well-controlled pore size as small as 7 nm, tailored surface chemistries and precise microarchitectures were found to successfully immunoisolate microenvironments for cells (Williams D. Small is beautiful: microparticle and nanoparticle technology in medical devices. Med Device Technol. 1999, 10: 6-9; Desai, T. A. Microfabrication technology for pancreatic cell encapsulation. Expert Opin Biol Ther. 2002, 2: 633-46).

[0199] Additional methods of cell encapsulation are well known in the art, such as those described in European Patent Publication No. 301,777 or U.S. Pat. Nos. 4,353,888; 4,744,933; 4,749,620; 4,814,274; 5,084,350; 5,089,272; 5,578,442; 5,639,275; and 5,676,943, each of which is incorporated herein by reference. Other methods are described U.S. Pat. No. 6,281,341,; Desai 2002 Exp. Opin. Biol. Hortelano et al. 1996 Blood 87:5095-5103; Pelegrin et al. 1998 Gene Ther. 5:828-834; Lohr et al. 2001 Lancet 357:1591-1592; Cirone et al. Hum. Gene Ther. 13: 1157-1166, each of which is hereby incorporated by reference in it's entirety.

[0200] The ordinary skilled artisan will select a biocompatible, as well as a mechanically and chemically stable membrane of a suitable permeability cut-off value that provides immune protection to the implant, functional performance, biosafety and long term survival of the graft.

[0201] Encapsulated cells generated according to the present teachings can be used in a myriad of research and clinical applications.

[0202] As used herein the term “subject” includes mammals, preferably human beings at any age which may benefit from transplantation of pancreatic cells.

[0203] According to some embodiments of the invention, the subject suffers from insulin insufficiency.

[0204] According to some embodiments of the invention, the subject has diabetes.

[0205] According to some embodiments of the invention, the subject has insulin-dependent diabetes such as type I or type II diabetes.

[0206] According to some embodiments of the invention, the subject has loss or reduced of insulin production. For example, the subject has an injured pancreas (e.g., due to a trauma), suffers from pancreatitis and/or suffers from a pancreatic tumor.

[0207] According to some embodiments of the invention, the subject has pancreatic cancer and being treated with an agent which kills or reduces the number of beta cells, such as Zanosar (streptozotocin).

[0208] According to an aspect of some embodiments of the invention, there is provided a method of identifying definite endodermal cells, comprising determining in a population of cells which comprises definite endodermal cells at least one marker that is negatively associated with definite endodermal cells, the marker being selected from the group consisting of: KDR, PCDHB5, FAT4, FLT1, NRN1, THBS2, PTPRZ1, SLC6A15, GPR176, SEMA6A, THBS1, CDH11, GRID2, SLC7A11, CDH1, LRFN5, EDNRB, THY1, NETO1, KCND2, TMPRSS11E, CD44, PDPN, SLC7A1, KAL1, KCNG3, GPM6B, FXYD5, PCDH18, ICAM3, MCTP1, TACR3, and TMEM155, wherein downregulation above a predetermined threshold of an expression level of the marker negatively associated with the definite endodermal cells as compared to the expression level of the marker in a reference cell, wherein the reference cell is an undifferentiated human ESC, is indicative of a positive identification of a definite endodermal cell.

[0209] According to some embodiments of the invention, the method further comprising determining in the population of cells which comprises definite endodermal cells at least one marker that is positively associated with definite endodermal cells, the marker being selected from the group consisting of: FSHR, COLEC12, ROR2, LIFR, LIFR, FLRT3, KEL, LGR5, FOLR1, CD177, CCKBR, APOA1, APOA1, FZD5, FN1, BMP2, ADAMTS9, DPP4, FGA, GPR128, IGFBP5, FZD4, ITGA5, STC1, TNFSF4, CD177, IHH, LRP2, LAMA1, GPC3, LGI1, FN1, LPHN3, FGB, KIT, DPP4, TRO, SPA17, ROBO2, DLK1, CST1, DKK1, HAS2, APOA2, CDH2, AFP, APOB, DGKK, HP, SYTL5, SLC7A7, TTR, FRZB, RSPO3, GCNT1, TRPA1, DIO3, TMEM27, APOC1, EPHA4, C4orf18, GLIPR2, PCDH10, F10, BMP5, FMO5, STMN2, SLC5A9, PORCN, EGFLAM, RAB17, CST2, PNPLA3, MOSPD1, ELMO1, CHST9, SLC30A10, TMC7, C8orf49, CDH12, ST8SIA4, SLCO2A1, MANEA, LRIG3, HCN1, ADAMTS12, FOLH1, TMEM144, VTN, CAMK2N1, ABCC4, PCDH7, OR2T4, UNC93A, COL4A6, PAMR1, SLC1A1, PROS1, APOM, APOM, APOM, LYPD6B, TMEM88, ITLN2, BMPER, GPR141, VEGFA, PRTG, DKK1, APOA2, AFP, APOB, FLRT3, KIAA1772, FBN2, FRZB, KLK6, FREM2, RSPO3, APOA1, APOA1, SEMA3D, KEL, BMP5, HEPH, STMN2, CACNB3, CHST9, TMC7, FAM171B, ATP5G1, FOLR1, ABCC2, EFNA5, CPT1C, MAGED1, RASA4, KDELR3, ST6GALNAC2, EDNRA, LRRC37B, ABCC4, CLCN5, MBOAT2, SLC44A5, NPC2, ELFN1, MMD, SLC5A3, IMPAD1, OSTC, DSC2, SLC31A1, SLC5A12, LRRN3, NPIPL3, GDPD1, NPIPL3, NPIPL3, LINGO2, LYPD6B, TRPA1, SLC40A1, SLC30A10, CCKBR, VIPR2, COLEC12, FLRT3, LGR5, GPR141, BST2, SLC5A9, GPR128, KEL, LRIG3, LYPD6B, FSHR, LIFR, FOLH1, CXCR4, ITGA5, AMOT, LY6E, SEMA6D, GJA5, PRTG, CD34, TMEM144, ROR2, GPR177, OR2T4, SLC7A7, KCNJ3, CLDN18, GPR151, SLC44A5, CDH10, TMEM27, SLC1A1, TMEM56, CD177, PLXNA2, SLC26A2, DSCAM, TMEM133, IL13RA1, ATP2B1, CD302, MEGF9, EDNRA, CDH2, GPR161, TYRO3, FLRT2, LRIT3, PCDH7, NRCAM, SMAGP, AMHR2, ELTD1, GRPR, EPHA4, CD99, GATA3, SEMA3E, HHEX, ZNF280A, FAM184A, WDR72, PDZK1, RLBP1L2, SHISA2, VIL1, STMN2, APOA2, SERHL, PPFIBP2, DKK1, MUM1L1, IGFBP5, ST6GALNAC2, TSPYL5, STC1, SYTL5, EPSTI1, ANKRD1, ARHGAP24, KRT18P49, PRSS2, RHOBTB3, FRZB, RARB, ADAMTS9, ARL4D, PRDM1, HP, FZD5, TRY6, ATP6V0D2, ANGPT2, DENND2C, BMP5, FOXA2, HAS2, BMP2, S100A16, FOLH1B, FAM122C, FZD4, C5, S100A14, VEGFA, CLIP4, GPAM, HNF1B, APOA1, CFLAR, RBM24, RNF152, TTR, TTN, EGFLAM, APOB, DIO3, IFLTD1, ABCC4, CCDC141, ENC1, NEK2, ELMO1, SPOCK3, SERPINI1, ACSL1, GATM, EHHADH, NUDT4, CST1, GLUD2, NPL, ZNF702P, TRY6, SPOCK1, AGL, TFF1, DGKK, SALL1, MANEA, KIT, KRT19, TNNC1, SEPP1, ST8SIA4, YPEL2, ANKMY2, DNAJC15, RNF128, PTPN13, F10, SAMD3, GCNT1, IPP, PROS1, SV2B, PLOD2, MAGEH1, CHST9, ZNF518B, TMEM106C, SERHL2, NTN4, SOX17, FRRS1, OTX2, RNASEL, ELMOD2, MYCT1, PAX6, MGST2, BBS5, MTSS1, VTN, WBP5, DUB4, CCDC92, BTG2, LPGAT1, FN1, TBX3, PLCE1, KRT19P2, IFI16, PORCN, PRSS1, MYL7, DUSP4, PROS1, ANKRD20B, CTSL2, FMO5, USP27X, LAMA1, ADAM28, ZNF611, ANKRD20B, ZNF137, S100Z, GPSM2, TGFB2, and ARHGAP28, wherein upregulation above a predetermined threshold of an expression level of the marker positively associated with definite endodermal cells as compared to the expression level of the marker in a reference cell, wherein the reference cell is an undifferentiated hESC, is indicative of a positive identification of a definite endodermal cell.

[0210] According to an aspect of some embodiments of the invention, there is provided a method of identifying definite endodermal cells, comprising determining in a population of cells which comprises definite endodermal cells at least one marker that is positively associated with definite endodermal cells, the marker being selected from the group consisting of: FSHR, COLEC12, ROR2 ITGA5, LRP2, CD177, CCKBR, TRPA1, KEL, FOLR1, FOLH1, APOA1, APOA1, FZD5, FN1, BMP2, ADAMTS9, DPP4, FGA, GPR128, IGFBP5, LIFR, FZD4, PRTG, STC1, TNFSF4, CD177, IHH, LAMA1, GPC3, LGI1, FN1, LPHN3, FGB, KIT, DPP4, TRO, SPA17, ROBO2, DLK1, CST1, DKK1, HAS2, APOA2, CDH2, LGR5, AFP, FLRT3, APOB, DGKK, HP, SYTL5, SLC7A7, TTR, FRZB, RSPO3, GCNT1, DIO3, TMEM27, APOC1, EPHA4, C4orf18, GLIPR2, PCDH10, F10, BMP5, FMO5, STMN2, SLC5A9, PORCN, EGFLAM, RAB17, CST2, PNPLA3, MOSPD1, ELMO1, CHST9, SLC30A10, TMC7, C8orf49, CDH12, ST8SIA4, SLCO2A1, MANEA, LRIG3, HCN1, ADAMTS12, TMEM144, VTN, CAMK2N1, ABCC4, PCDH7, OR2T4, UNC93A, COL4A6, PAMR1, SLC1A1, PROS1, APOM, APOM, APOM, LYPD6B, TMEM88, ITLN2, BMPER, GPR141, VEGFA, DKK1, APOA2, AFP, APOB, FLRT3, KIAA1772, FBN2, FRZB, KLK6, FREM2, RSPO3, APOA1, APOA1, SEMA3D, KEL, BMP5, HEPH, STMN2, CACNB3, CHST9, TMC7, FAM171B, ATP5G1, FOLR1, ABCC2, EFNA5, CPT1C, MAGED1, RASA4, KDELR3, ST6GALNAC2, EDNRA, LRRC37B, ABCC4, CLCN5, MBOAT2, SLC44A5, NPC2, ELFN1, MMD, SLC5A3, IMPAD1, OSTC, DSC2, SLC31A1, SLC5A12, LRRN3, NPIPL3, GDPD1, NPIPL3, NPIPL3, LINGO2, LYPD6B, TRPA1, SLC40A1, SLC30A10, CCKBR, VIPR2, COLEC12, FLRT3, LGR5, GPR141, BST2, SLC5A9, GPR128, KEL, LRIG3, LYPD6B, FSHR, LIFR, FOLH1, CXCR4, ITGA5, AMOT, LY6E, SEMA6D, GJA5, PRTG, CD34, TMEM144, ROR2, GPR177, OR2T4, SLC7A7, KCNJ3, CLDN18, GPR151, SLC44A5, CDH10, TMEM27, SLC1A1, TMEM56, CD177, PLXNA2, SLC26A2, DSCAM, TMEM133, IL13RA1, ATP2B1, CD302, MEGF9, EDNRA, CDH2, GPR161, TYRO3, FLRT2, LRIT3, PCDH7, NRCAM, SMAGP, AMHR2, ELTD1, GRPR, EPHA4, and CD99, wherein upregulation above a predetermined threshold of an expression level of the marker positively associated with the definite endodermal cells as compared to the expression level of the marker in a reference cell, wherein the reference cell is an undifferentiated hESCs, is indicative of a positive identification of a definite endodermal cell.

[0211] According to some embodiments of the invention, the method further comprising determining in the population of cells which comprises definite endodermal cells at least one marker that is positively associated with definite endodermal cells, the marker being selected from the group consisting of: GATA3, SEMA3E, HHEX, ZNF280A, FAM184A, WDR72, PDZK1, RLBP1L2, SHISA2, VIL1, STMN2, APOA2, SERHL, PPFIBP2, DKK1, MUM1L1, IGFBP5, ST6GALNAC2, TSPYL5, STC1, SYTL5, EPSTI1, ANKRD1, ARHGAP24, KRT18P49, PRSS2, RHOBTB3, FRZB, RARB, ADAMTS9, ARL4D, PRDM1, HP, FZD5, TRY6, ATP6V0D2, ANGPT2, DENND2C, BMP5, FOXA2, HAS2, BMP2, S100A16, FOLH1B, FAM122C, FZD4, C5, S100A14, VEGFA, CLIP4, GPAM, HNF1B, APOA1, CFLAR, RBM24, RNF152, TTR, TTN, EGFLAM, APOB, DIO3, IFLTD1, ABCC4, CCDC141, ENC1, NEK2, ELMO1, SPOCK3, SERPINI1, ACSL1, GATM, EHHADH, NUDT4, CST1, GLUD2, NPL, ZNF702P, TRY6, SPOCK1, AGL, TFF1, DGKK, SALL1, MANEA, KIT, KRT19, TNNC1, SEPP1, ST8SIA4, YPEL2, ANKMY2, DNAJC15, RNF128, PTPN13, F10, SAMD3, GCNT1, IPP, PROS1, SV2B, PLOD2, MAGEH1, CHST9, ZNF518B, TMEM106C, SERHL2, NTN4, SOX17, FRRS1, OTX2, RNASEL, ELMOD2, MYCT1, PAX6, MGST2, BBS5, MTSS1, VTN, WBP5, DUB4, CCDC92, BTG2, LPGAT1, FN1, TBX3, PLCE1, KRT19P2, IFI16, PORCN, PRSS1, MYL7, DUSP4, PROS1, ANKRD20B, CTSL2, FMO5, USP27X, LAMA1, ADAM28, ZNF611, ANKRD20B, ZNF137, S100Z, GPSM2, TGFB2, and ARHGAP28, wherein upregulation above a predetermined threshold of an expression level of the marker positively associated with the definite endodermal cells as compared to the expression level of the marker in a reference cell, wherein the reference cell is an undifferentiated hESC, is indicative of a positive identification of a definite endodermal cell.

[0212] According to some embodiments of the invention, the at least one marker positively associated with definite endodermal cells is selected from the group consisting of: FSHR, COLEC12, ROR2 ITGA5, LRP2, CD177, CCKBR, TRPA1, KEL, FOLR1, FOLH1, APOA1, APOA1, FZD5, FN1, BMP2, ADAMTS9, DPP4, FGA, GPR128, IGFBP5, LIFR, FZD4, PRTG, STC1, TNFSF4, CD177, IHH, LAMA1, GPC3, LGI1, FN1, LPHN3, FGB, KIT, DPP4, TRO, SPA17, ROBO2, DLK1, CST1, DKK1, HAS2, APOA2, CDH2, LGR5, AFP, FLRT3, APOB, DGKK, HP, SYTL5, SLC7A7, TTR, FRZB, RSPO3, GCNT1, DIO3, TMEM27, APOC1, EPHA4, C4orf18, GLIPR2, PCDH10, F10, BMP5, FMO5, STMN2, SLC5A9, PORCN, EGFLAM, RAB17, CST2, PNPLA3, MOSPD1, ELMO1, CHST9, SLC30A10, TMC7, C8orf49, CDH12, ST8SIA4, SLCO2A1, MANEA, LRIG3, HCN1, ADAMTS12, TMEM144, VTN, CAMK2N1, ABCC4, PCDH7, OR2T4, UNC93A, COL4A6, PAMR1, SLC1A1, PROS1, APOM, APOM, APOM, LYPD6B, TMEM88, ITLN2, BMPER, GPR141, VEGFA, DKK1, APOA2, AFP, APOB, FLRT3, KIAA1772, FBN2, FRZB, KLK6, FREM2, RSPO3, APOA1, APOA1, SEMA3D, KEL, BMP5, HEPH, STMN2, CACNB3, CHST9, TMC7, FAM171B, ATP5G1, FOLR1, ABCC2, EFNA5, CPT1C, MAGED1, RASA4, KDELR3, ST6GALNAC2, EDNRA, LRRC37B, ABCC4, CLCN5, MBOAT2, SLC44A5, NPC2, ELFN1, MMD, SLC5A3, IMPAD1, OSTC, DSC2, SLC31A1, SLC5A12, LRRN3, NPIPL3, GDPD1, NPIPL3, NPIPL3, LINGO2, and LYPD6B.

[0213] According to some embodiments of the invention, the at least one marker positively associated with definite endodermal cells is selected from the group consisting of: FSHR, COLEC12, ROR2 ITGA5, LRP2, CD177, CCKBR, TRPA1, KEL, FOLR1, FOLH1, APOA1, APOA1, FZD5, FN1, BMP2, ADAMTS9, DPP4, FGA, GPR128, IGFBP5, LIFR, FZD4, PRTG, STC1, TNFSF4, CD177, IHH, LAMA1, GPC3, LGI1, FN1, LPHN3, FGB, KIT, DPP4, TRO, SPA17, ROBO2, and DLK1.

[0214] According to some embodiments of the invention, the at least one marker positively associated with definite endodermal cells is selected from the group consisting of: CD177, CCKBR, APOA1, APOA1, FSHR, FZD5, FN1, BMP2, ADAMTS9, DPP4, FGA, COLEC12, ROR2, GPR128, IGFBP5, LIFR, FZD4, ITGA5, STC1, TNFSF4, CD177 and IHH.

[0215] According to an aspect of some embodiments of the invention, there is provided a method of identifying definite endodermal cells. The method is effected by determining in a population of cells which comprises definite endodermal cells at least one marker that is positively associated with definite endodermal cells, the marker being selected from the group consisting of: TRPA1, SLC40A1, SLC30A10, CCKBR, VIPR2, COLEC12, FLRT3, LGR5, GPR141, BST2, SLC5A9, GPR128, KEL, LRIG3, LYPD6B, FSHR, LIFR, FOLH1, CXCR4, ITGA5, AMOT, LY6E, SEMA6D, GJA5, PRTG, CD34, TMEM144, ROR2, GPR177, OR2T4, SLC7A7, KCNJ3, CLDN18, GPR151, SLC44A5, CDH10, TMEM27, SLC1A1, TMEM56, CD177, PLXNA2, SLC26A2, DSCAM, TMEM133, IL13RA1, ATP2B1, CD302, MEGF9, EDNRA, CDH2, GPR161, TYRO3, FLRT2, LRIT3, PCDH7, NRCAM, SMAGP, AMHR2, ELTD1, GRPR, EPHA4, and CD99, wherein upregulation above a predetermined threshold of an expression level of the marker positively associated with the definite endodermal cells as compared to the expression level of the marker in a reference cell, wherein the reference cell is an undifferentiated hESC, is indicative of a positive identification of a definite endodermal cell.

[0216] According to some embodiments of the invention, the method further comprising determining in the population of cells which comprises definite endodermal cells at least one marker that is positively associated with definite endodermal cells, the marker being selected from the group consisting of: GATA3, SEMA3E, HHEX, ZNF280A, FAM184A, WDR72, PDZK1, RLBP1L2, SHISA2, VIL1, STMN2, APOA2, SERHL, PPFIBP2, DKK1, MUM1L1, IGFBP5, ST6GALNAC2, TSPYL5, STC1, SYTL5, EPSTI1, ANKRD1, ARHGAP24, KRT18P49, PRSS2, RHOBTB3, FRZB, RARB, ADAMTS9, ARL4D, PRDM1, HP, FZD5, TRY6, ATP6V0D2, ANGPT2, DENND2C, BMP5, FOXA2, HAS2, BMP2, S100A16, FOLH1B, FAM122C, FZD4, C5, S100A14, VEGFA, CLIP4, GPAM, HNF1B, APOA1, CFLAR, RBM24, RNF152, TTR, TTN, EGFLAM, APOB, DIO3, IFLTD1, ABCC4, CCDC141, ENC1, NEK2, ELMO1, SPOCK3, SERPINI1, ACSL1, GATM, EHHADH, NUDT4, CST1, GLUD2, NPL, ZNF702P, TRY6, SPOCK1, AGL, TFF1, DGKK, SALL1, MANEA, KIT, KRT19, TNNC1, SEPP1, ST8 SIA4, YPEL2, ANKMY2, DNAJC15, RNF128, PTPN13, F10, SAMD3, GCNT1, IPP, PROS1, SV2B, PLOD2, MAGEH1, CHST9, ZNF518B, TMEM106C, SERHL2, NTN4, SOX17, FRRS1, OTX2, RNASEL, ELMOD2, MYCT1, PAX6, MGST2, BBS5, MTSS1, VTN, WBP5, DUB4, CCDC92, BTG2, LPGAT1, FN1, TBX3, PLCE1, KRT19P2, IFI16, PORCN, PRSS1, MYL7, DUSP4, PROS1, ANKRD20B, CTSL2, FMO5, USP27X, LAMA1, ADAM28, ZNF611, ANKRD20B, ZNF137, S100Z, GPSM2, TGFB2, and ARHGAP28, wherein upregulation above a predetermined threshold of an expression level of the marker positively associated with the definite endodermal cells as compared to the expression level of the marker in a reference cell, wherein the reference cell is an undifferentiated hESC, is indicative of a positive identification of a definite endodermal cell.

[0217] According to some embodiments of the invention, the method further comprising determining in the population of cells which comprises definite endodermal cells at least one marker that is negatively associated with definite endodermal cells, the marker being selected from the group consisting of: KDR, PCDHB5, FAT4, FLT1, NRN1, THBS2, PTPRZ1, SLC6A15, GPR176, SEMA6A, THBS1, CDH11, GRID2, SLC7A11, CDH1, LRFN5, EDNRB, THY1, NETO1, KCND2, TMPRSS11E, CD44, PDPN, SLC7A1, KAL1, KCNG3, GPM6B, FXYD5, PCDH18, ICAM3, MCTP1, TACR3, TMEM155, ZFP42, THUMPD3, ANXA1, SPP1, PRDM14, GNA14, EDIL3, CXCL12, PSMD5, PRRX1, NANOG, TRIM22, NANOG, RASGRF2, POU5F1B, POLR3G, HHLA1, POU5F1, VSNL1, SCG3, B3GALT1, LECT1, NTS, MBNL1, CKMT1A, NECAB1, FGF2, SFRP2, DCLK1, DACT1, CRABP1, TFAP2C, SCGB3A2, LRAT, CUZD1, GLB1L3, METTL7A, VAT1L, COL12A1, OLFML3, SOX2, USP44, HIST1H4F, KGFLP1, CPT1A, DBC1, CHAC1, CAV1, MT1G, NFIX, FERMT1, GLIPR1, TOX, SNRPN (SNORD116-6), HEY2, T1MP4, IDO1, MT2A, NR5A2, UPRT, MYC, CCDC109B, GAL, ZNF483, RND3, BNC2, COL3A1, LUM, LDB2, MT1E, SNRPN (SNORD116-23), SNRPN (SNORD116-27), GALNT3, PIPDX, PDK1, PREX2, CYP2S1, NRK, VAV3, TNFAIP6, ENPP1, ADD2, SNRPN (SNORD116-24), SNRPN (SNORD109A), STC2, SNORA22, MPPED2, ZNF562, GAP43, FOXB1, TSHZ3, HPGD, ZDHHC22, ACOXL, GLI3, CDCA7L, ZSCAN10, GFPT2, PLP2, HIST1H1A, CAMKV, HERC5, MT1X, TERF1, RAB31, SNRPN (SNORD116-13), ETV1, MT1G, ACTA1, SNRPN (SNORD116-20), NFIB, ZEB2, CBR1, ATXN7L1, SNRPN (SNORD116-1), MT1F, SNRPN (SNORD116-29), AP1M2, ACTG2, CYP2B6, SERPINE1, GRHL2, SLIT2, PIM2, SMARCA2, and RPPH1, wherein downregulation above a predetermined threshold of an expression level of the marker negatively associated with definite endodermal cells as compared to the expression level of the marker in a reference cell, wherein the reference cell is an undifferentiated hESC, is indicative of a positive identification of a definite endodermal cell.

[0218] According to an aspect of some embodiments of the invention, there is provided a method of isolating definite endodermal cells. The method is effected by (a) identifying the definite endodermal cells according to the method of some embodiments of the invention, (b) isolating the definite endodermal cells identified according to step (a) to thereby obtain an isolated population of the definite endodermal cells, thereby isolating the definite endodermal cells.

[0219] According to an aspect of some embodiments of the invention, there is provided an isolated population of definite endodermal cells obtained according to the method of some embodiments of the invention.

[0220] According to some embodiments of the invention, the isolated cell population of definite endodermal cells is characterized by a SOX17+/SOX7+ expression pattern.

[0221] According to an aspect of some embodiments of the invention, there is provided an isolated population of definite endodermal cells, comprising at least about 20%, at least about 25%, at least about 30%, at least about 35%, at least about 40%, at least about 45%, at least about 50% (e.g., 50%), at least about 55% (e.g., 55%), at least about 60% (e.g., 60%), at least about 65% (e.g., 65%), at least about 70% (e.g., 70%), at least about 75% (e.g., 75%), at least about 80% (e.g., 80%), at least about 85% (e.g., 85%), at least about 90% (e.g., 90%), at least about 95% (e.g., 95%), at least about 96% (e.g., 96%), at least about 97% (e.g., 97%), at least about 98% (e.g., 98%), at least about 99% (e.g., 99%), e.g., 100% cells having a SOX17+/SOX7+ expression pattern.

[0222] According to an aspect of some embodiments of the invention, there is provided a method qualifying a definite endodermal cell population. The method is effected by determining in a sample of the cell population a percentage of the definite endodermal cells which are identified according to the method of some embodiments of the invention out of the total cells in the sample, thereby qualifying the definite endodermal cell population.

[0223] According to some embodiments of the invention, the pancreatic progenitor cells or the definite endodermal cells are obtained by differentiating stem cells into pancreatic progenitor cells.

[0224] According to some embodiments of the invention, the stem cells are undifferentiated pluripotent stem cells.

[0225] As used herein the phrase “pluripotent stem cells” refers to cells which are capable of differentiating into cells of all three embryonic germ layers (i.e., endoderm, ectoderm and mesoderm). The phrase “pluripotent stem cells” may read on embryonic stem cells (ESCs) and/or induced pluripotent stem cells (iPS cells).

[0226] The ESCs which are used to generate the pancreatic progenitor cells or the definite endodermal cells can be obtained from the embryonic tissue formed after gestation (e.g., blastocyst) before implantation (i.e., a pre-implantation blastocyst); extended blastocyst cells (EBCs) which are obtained from a post-implantation/pre-gastrulation stage blastocyst (see WO2006/040763]; and/or embryonic germ (EG) cells which are obtained from the genital tissue of a fetus any time during gestation, preferably before 10 weeks of gestation.

[0227] Extended blastocyst cells (EBCs) can be obtained from a blastocyst of at least nine days post fertilization at a stage prior to gastrulation. Prior to culturing the blastocyst, the zona pellucida is digested [for example by Tyrode's acidic solution (Sigma Aldrich, St Louis, Mo., USA)] so as to expose the inner cell mass. The blastocysts are then cultured as whole embryos for at least nine and no more than fourteen days post fertilization (i.e., prior to the gastrulation event) in vitro using standard embryonic stem cell culturing methods.

[0228] Embryonic germ (EG) cells are prepared from the primordial germ cells obtained from fetuses of about 8-11 weeks of gestation (in the case of a human fetus) using laboratory techniques known to anyone skilled in the arts. The genital ridges are dissociated and cut into small chunks which are thereafter disaggregated into cells by mechanical dissociation. The EG cells are then grown in tissue culture flasks with the appropriate medium. The cells are cultured with daily replacement of medium until a cell morphology consistent with EG cells is observed, typically after 7-30 days or 1-4 passages. For additional details on methods of preparation human EG cells see Shamblott et al., [Proc. Natl. Acad. Sci. USA 95: 13726, 1998] and U.S. Pat. No. 6,090,622.

[0229] The phrase “induced pluripotent stem (iPS) cell” (or embryonic-like stem cell) as used herein refers to a proliferative and pluripotent stem cell which is obtained by de-differentiation of a somatic cell (e.g., an adult somatic cell).

[0230] According to some embodiments of the invention, the iPS cell is characterized by a proliferative capacity which is similar to that of ESCs and thus can be maintained and expanded in culture for an almost unlimited time.

[0231] IPS cells can be endowed with pluripotency by genetic manipulation which re-program the cell to acquire embryonic stem cells characteristics. For example, the iPS cells of the invention can be generated from somatic cells by induction of expression of Oct-4, Sox2, Kfl4 and c-Myc in a somatic cell essentially as described in Takahashi and Yamanaka, 2006, Takahashi et al, 2007, Meissner et al, 2007, and Okita K., et al, 2007, Nature 448: 313-318). Additionally or alternatively, the iPS cells of the invention can be generated from somatic cells by induction of expression of Oct4, Sox2, Nanog and Lin28 essentially as described in Yu et al, 2007, and Nakagawa et al, 2008. It should be noted that the genetic manipulation (re-programming) of the somatic cells can be performed using any known method such as using plasmids or viral vectors, or by derivation without any integration to the genome [Yu J, et al., Science. 2009, 324: 797-801].

[0232] The iPS cells of the invention can be obtained by inducing de-differentiation of embryonic fibroblasts [Takahashi and Yamanaka, 2006; Meissner et al, 2007], fibroblasts formed from hESCs [Park et al, 2008], Fetal fibroblasts [Yu et al, 2007; Park et al, 2008], foreskin fibroblast [Yu et al, 2007; Park et al, 2008], adult dermal and skin tissues [Hanna et al, 2007; Lowry et al, 2008], b-lymphocytes [Hanna et al 2007] adult liver and stomach cells [Aoi et al, 2008] and beta-cells derived iPSCs (Bar-Nur O., et al., 2011m Cell Stem Cell 9: 1-7).

[0233] IPS cell lines are also available via cell banks such as the WiCell bank. Non-limiting examples of commercially available iPS cell lines include the iPS foreskin clone 1 [WiCell Catalogue No. iPS(foreskin)-1-DL-1], the iPSIMR90 clone 1 [WiCell Catalogue No. iPS(IMR90)-1-DL-1], and the iPSIMR90 clone 4 [WiCell Catalogue No. iPS(IMR90)-4-DL-1].

[0234] According to some embodiments of the invention, the induced pluripotent stem cells are human induced pluripotent stem cells.

[0235] According to some embodiments of the invention, the stem cells are adult stem cells.

[0236] The phrase “adult stem cells” (also called “tissue stem cells” or a stem cell from a somatic tissue) refers to any stem cell derived from a somatic tissue [of either a postnatal or prenatal animal (especially the human)]. The adult stem cell is generally thought to be a multipotent stem cell, capable of differentiation into multiple cell types. Adult stem cells can be derived from any adult, neonatal or fetal tissue such as adipose tissue, skin, kidney, liver, prostate, pancreas, intestine, bone marrow and placenta. Non-limiting examples include mesenchymal stem cells (MSCs), cord blood stem cells, fetal stem cells and the like.

[0237] Hematopoietic stem cells, which may also referred to as adult tissue stem cells, include stem cells obtained from blood or bone marrow tissue of an individual at any age or from cord blood of a newborn individual. Preferred stem cells according to this aspect of some embodiments of the invention are embryonic stem cells, preferably of a human or primate (e.g., monkey) origin.

[0238] Placental and cord blood stem cells may also be referred to as “young stem cells”.

[0239] According to some embodiments of the invention, the cells are human cells.

[0240] According to some embodiments of the invention, differentiating the undifferentiated pluripotent stem cells into the pancreatic progenitor cells is performed by: (a) differentiating the pluripotent stem cells into definite endodermal cells to thereby obtain a population of cells which comprises definite endodermal cells, and (b) differentiating the population of cells which comprises the definite endodermal cells into the pancreatic progenitor cells, thereby inducing the differentiation of the pluripotent stem cells into the pancreatic progenitor cells.

[0241] According to some embodiments of the invention, differentiating the undifferentiated pluripotent stem cells into the definite endodermal cells is performed by culturing the pluripotent stem cells in the presence of activin A, Wnt3A, a small molecule Induce Definitive Endoderm 1 (IDE1) and/or a small molecule Induce Definitive Endoderm 2 (IDE2) as described in the Examples section which follows and in Jiang J., et al., 2007 (Generation of insulin-producing islet-like clusters from human embryonic stem cells. Stem Cells 25:1940-1953) and/or in D'Amour et al., 2006 (Nat Biotechnol 24:1392-1401), each of which is fully incorporated herein by reference in its entirety.

[0242] Differentiation of the definite endodermal cells into the pancreatic progenitor cells can be performed by culturing the definite endodermal cells in the presence of bFGF, KGF, FGF10, noggin, cyclopamine, KAAD cyclopamine, B27, Indolactam V, nicotinamide and/or epidermal growth factor.

[0243] According to some embodiments of the invention, differentiating the definite endodermal cells into the pancreatic progenitor cells is performed by culturing the definite endodermal cells in the presence of bFGF, noggin and epidermal growth factor (additional description is provided in Jiang J, Stem Cells. 2007; 25(8):1940-53, which is fully incorporated herein by reference in its entirety.

[0244] According to some embodiments of the invention, differentiating the undifferentiated pluripotent stem cells into the pancreatic progenitor cells is performed by differentiation of the pluripotent stem cells into embryoid bodies.

[0245] As used herein the phrase “embryoid bodies” (EBs) refers to three dimensional multicellular aggregates of differentiated and undifferentiated cells derivatives of three embryonic germ layers.

[0246] Embryoid bodies are formed upon the removal of embryonic stem cells (ESCs) or induced pluripotent stem cells (iPSCs) from feeder layers or feeder cells-free culture systems. ESCs and/or iPSCs removal can be effected using type IV Collagenase treatment for a limited time. Following dissociation from the culturing surface, the cells are transferred to tissue culture plates containing a culture medium supplemented with serum and amino acids.

[0247] During the culturing period, EBs are further monitored for their differentiation state. Cell differentiation can be determined upon examination of cell or tissue-specific markers which are known to be indicative of differentiation. For example, EB-derived-differentiated cells may express the neurofilament 68 KD which is a characteristic marker of the ectoderm cell lineage.

[0248] The differentiation level of the EB cells can be monitored by following the loss of expression of Oct-4, and the increased expression level of other markers such as α-fetoprotein, NF-68 kDa, α-cardiac and albumin. Methods useful for monitoring the expression level of specific genes are well known in the art and include RT-PCR, semi-quantitative RT-PCR, Northern blot, RNA in situ hybridization, Western blot analysis and immunohistochemistry.

[0249] Embryoid bodies can be generated from various primates and mammals such as human, monkeys and rodents (e.g., mouse, rat).

[0250] According to some embodiments of the invention, the embryoid bodies are obtained from human embryoid bodies.

[0251] According to some embodiments of the invention, the embryoid bodies are obtained by spontaneous differentiation of pluripotent stem cells.

[0252] According to some embodiments of the invention, for differentiation into pancreatic progenitor cells, the embryoid bodies are differentiated until about day 7-21 of human EBs differentiation.

[0253] According to some embodiments of the invention, for differentiation into definite endodermal cells, the embryoid bodies are differentiated until about day 3-7 of human EBs differentiation.

[0254] According to an aspect of some embodiments of the invention there is provided a nucleic acid construct comprising a first polynucleotide encoding a reporter protein and a second polynucleotide which comprises a human endogenous SOX17 regulatory sequence, wherein the first polynucleotide being under transcriptional regulation of the SOX17 regulatory sequence, wherein the SOX17 regulatory sequence comprises an upstream sequence and a downstream sequence.

[0255] According to some embodiments of the invention, expression of the reporter protein is under the transcriptional regulation of the SOX17 regulatory sequences.

[0256] As used herein the phrase “reporter protein” refers to any polypeptide which can be detected in a cell. According to some embodiments of the invention, the reporter polypeptide can be directly detected in the cell (no need for a detectable moiety with an affinity to the reporter) by exerting a detectable signal which can be viewed in living cells (e.g., using a fluorescent microscope). Non-limiting examples of a nucleic acid sequence encoding a reporter polypeptide according to this aspect of the present invention include the red fluorescent protein (RFP), the green fluorescent protein (GFP) (e.g., SEQ ID NO:2) or mCherry (e.g., SEQ ID NO:33).

[0257] Alternatively, the reporter polypeptide can be indirectly detected such as when the reporter polypeptide is an epitope tag. Indirect detection can be effected by introducing a detectable moiety (labeled antibody) having an affinity to the reporter or when the reporter is an enzyme by introducing a labeled substrate. For example, the reporter polypeptide can be an antigen which is recognized by and binds to a specific antibody. Preferably, when such a reporter polypeptide is utilized the antibody or the polypeptide capable of binding the reporter protein is labeled (e.g., by covalently attaching to a label such as a fluorescent dye).

[0258] Non-limiting examples of suitable SOX17 upstream regulatory sequences which can be used in the nucleic acid construct of some embodiments of the invention include the sequences comprising SEQ ID NO: 7, 36, and 38.

[0259] Non-limiting examples of suitable SOX17 downstream regulatory sequences which can be used in the nucleic acid construct of some embodiments of the invention include the sequences comprising SEQ ID NO: 8, 37 and 39.

[0260] According to an aspect of some embodiments of the invention there is provided a nucleic acid construct comprising a first polynucleotide encoding a reporter protein and a second polynucleotide which comprises a human endogenous SOX17 regulatory sequence, wherein the first polynucleotide being under transcriptional regulation of the SOX17 regulatory sequence, wherein the SOX17 regulatory sequence comprises an upstream sequence and a downstream sequence, wherein the upstream sequence comprises the nucleotide sequence set forth in SEQ ID NO:38; and wherein the downstream sequence comprises the nucleotide sequence set forth in SEQ ID NO:39.

[0261] According to an aspect of some embodiments of the present invention there is provided a nucleic acid construct comprising a first polynucleotide encoding a reporter protein and a second polynucleotide which comprises a human endogenous PDX1 regulatory sequence, wherein the first polynucleotide being under transcriptional regulation of the PDX1 regulatory sequence, wherein the PDX1 regulatory sequence comprises an upstream sequence and a downstream sequence.

[0262] Non-limiting examples of suitable PDX1 upstream regulatory sequences which can be used in the nucleic acid construct of some embodiments of the invention include the sequences comprising SEQ ID NO: 16, 19, 23, and 31.

[0263] Non-limiting examples of suitable PDX1 downstream regulatory sequences which can be used in the nucleic acid construct of some embodiments of the invention include the sequences comprising SEQ ID NO: 17, 20, 24, and 32.

[0264] According to an aspect of some embodiments of the present invention there is provided a nucleic acid construct comprising a first polynucleotide encoding a reporter protein and a second polynucleotide which comprises a human endogenous PDX1 regulatory sequence, wherein the first polynucleotide being under transcriptional regulation of the PDX1 regulatory sequence, wherein the PDX1 regulatory sequence comprises an upstream sequence and a downstream sequence, wherein the upstream sequence comprises the nucleotide sequence set forth in SEQ ID NO:16 (corresponds to nucleotides 1 to 8640 of AL353195.14); and wherein the downstream sequence comprises the nucleotide sequence set forth in SEQ ID NO:17 (corresponds to nucleotides 13321 to 32526 of AL353195.14 (SEQ ID NO:34)). According to some embodiments of the invention, the nucleic acid construct is a bacterial artificial chromosome (BAC).

[0265] Non-limiting examples of suitable BACs which comprise the SOX17 genomic sequence include the RP11-53M11 BAC (SEQ ID NO:35; GenBank Accession No. AC091076.7), and the RP11-47H10 BAC (SEQ ID NO:40).

[0266] A non-limiting example of a suitable BACs which comprise the PDX1 genomic sequence include the RP11-322P28 (SEQ ID NO:34; GenBank Accession No. AL353195.14).

[0267] According to an aspect of some embodiments of the invention there is provided a cell comprising the nucleic acid construct of some embodiments of the invention. According to some embodiments of the invention, the cell is a stem cell.

[0268] According to some embodiments of the invention, the stem cell is an embryonic stem cell or an induced pluripotent stem cell.

[0269] According to some embodiments of the invention, the cell is a human cell.

[0270] According to an aspect of some embodiments of the invention there is provided a method of screening for markers which differentiate a definite endodermal cell from an undifferentiated pluripotent stem cell, comprising comparing the expression level of markers between the undifferentiated pluripotent stem cell and the cell of some embodiments of the invention (e.g., the cell which comprises the reporter protein under the transcriptional regulation of the SOX17 upstream and downstream regulatory sequence), wherein upregulation or downregulation in the expression level above a predetermined threshold indicates that the markers differentiate the definite endodermal cell from the undifferentiated pluripotent stem cell, thereby screening for markers which differentiate the definite endodermal cell from the undifferentiated pluripotent stem cell.

[0271] According to an aspect of some embodiments of the invention there is provided a method of screening for compounds capable of inducing differentiation of undifferentiated pluripotent stem cells to definite endodermal cells, comprising: (a) contacting undifferentiated pluripotent stem cells which comprise the nucleic acid construct of some embodiments of the invention (e.g., the construct which comprises the reporter protein under the transcriptional regulation of the SOX17 upstream and downstream regulatory sequence) with at least one compound of a plurality of candidate compounds, and; (b) monitoring an expression level of the reporter protein in the cells following the contacting, wherein an increase above a predetermined level in the expression level of the reporter protein following the contacting as compared to the expression level prior to the contacting is indicative that the at least one compound is capable of inducing differentiation of the undifferentiated pluripotent stem cells to the definite endodermal cells, thereby screening for the compounds capable of inducing differentiation of undifferentiated pluripotent stem cells to definite endodermal cells.

[0272] According to some embodiments of the invention, the method further comprising synthesizing the compound capable of inducing differentiation of the undifferentiated pluripotent stem cells to the definite endodermal cells.

[0273] According to an aspect of some embodiments of the invention there is provided a method of screening for markers which differentiate a pancreatic progenitor cell from a definite endodermal cell, comprising comparing the expression level of markers between the cell which comprises the reporter protein under the transcriptional regulation of the SOX17 upstream and downstream regulatory sequence of some embodiments of the invention and the cell which comprises the reporter protein under the transcriptional regulation of the PDX1 upstream and downstream regulatory sequence of some embodiments of the invention, wherein upregulation or downregulation in the expression level above a predetermined threshold indicates that the markers differentiate the pancreatic progenitor cell from the definite endodermal cell, thereby screening for markers which differentiate the pancreatic progenitor cell from the definite endodermal cell.

[0274] According to an aspect of some embodiments of the invention there is provided a method of screening for compounds capable of inducing differentiation of definite endodermal cells or undifferentiated pluripotent stem cells to pancreatic progenitor cells, comprising: (a) contacting definite endodermal cells or undifferentiated pluripotent stem cells which comprise the nucleic acid construct of some embodiments of the invention (which comprises the reporter protein under the transcriptional regulation of the PDX1 upstream and downstream regulatory sequences) with at least one compound of a plurality of candidate compounds, and; (b) monitoring an expression level of the reporter protein in the cells following the contacting, wherein an increase above a predetermined level in the expression level of the reporter protein following the contacting as compared to the expression level prior to the contacting is indicative that the at least one compound is capable of inducing differentiation of the definite endodermal cells or undifferentiated pluripotent stem cells to the pancreatic progenitor cells, thereby screening for the compounds capable of inducing differentiation of definite endodermal cells or undifferentiated pluripotent stem cells to the pancreatic progenitor cells.

[0275] According to some embodiments of the invention the method further comprising synthesizing the compound capable of inducing differentiation of the definite endodermal cells or undifferentiated pluripotent stem cells to the pancreatic progenitor cells.

[0276] The agents of some embodiments of the invention which are described hereinabove for screening for markers which differentiate a definite endodermal cell from an undifferentiated pluripotent stem cell, for screening for compounds capable of inducing differentiation of undifferentiated pluripotent stem cells to definite endodermal cells, for screening for markers which differentiate a pancreatic progenitor cell from a definite endodermal cell, and/or for screening for compounds capable of inducing differentiation of definite endodermal cells or undifferentiated pluripotent stem cells to pancreatic progenitor cells may be included in a diagnostic kit/article of manufacture preferably along with appropriate instructions for use and labels indicating FDA approval for the above described use.

[0277] Such a kit can include, for example, at least one container including at least one of the above described agents (e.g., the nucleic acid constructs, the cells comprising same) and an imaging reagent packed in another container (e.g., enzymes, antibodies, buffers, chromogenic substrates, fluorogenic material). The kit may also include appropriate buffers and preservatives for improving the shelf-life of the kit.

[0278] According to an aspect of some embodiments of the invention there is provided a kit for screening for markers which differentiate a definite endodermal cell from a pluripotent stem cell, comprising the cell of some embodiments of the invention.

[0279] According to some embodiments of the invention the kit further comprising a pluripotent stem cell.

[0280] According to an aspect of some embodiments of the invention there is provided a kit for screening for markers which differentiate a pancreatic progenitor cell from a definite endodermal cell, comprising the cell of some embodiments of the invention and the cell of some embodiments of the invention.

[0281] According to some embodiments of the invention the kit further comprising at least one agent suitable for detecting an expression level of a marker of interest.

[0282] According to some embodiments of the invention the expression level is detected by an RNA detection method.

[0283] According to some embodiments of the invention the expression level is detected by a protein detection method.

[0284] According to some embodiments of the invention the kit further comprising a genetic micro array chip.

[0285] As used herein the term “about” refers to ±10%.

[0286] The terms “comprises”, “comprising”, “includes”, “including”, “having” and their conjugates mean “including but not limited to”.

[0287] The term “consisting of” means “including and limited to”.

The term “consisting essentially of” means that the composition, method or structure may include additional ingredients, steps and/or parts, but only if the additional ingredients, steps and/or parts do not materially alter the basic and novel characteristics of the claimed composition, method or structure.
As used herein, the singular form “a”, “an” and “the” include plural references unless the context clearly dictates otherwise. For example, the term “a compound” or “at least one compound” may include a plurality of compounds, including mixtures thereof.

[0288] Throughout this application, various embodiments of this invention may be presented in a range format. It should be understood that the description in range format is merely for convenience and brevity and should not be construed as an inflexible limitation on the scope of the invention. Accordingly, the description of a range should be considered to have specifically disclosed all the possible subranges as well as individual numerical values within that range. For example, description of a range such as from 1 to 6 should be considered to have specifically disclosed subranges such as from 1 to 3, from 1 to 4, from 1 to 5, from 2 to 4, from 2 to 6, from 3 to 6 etc., as well as individual numbers within that range, for example, 1, 2, 3, 4, 5, and 6. This applies regardless of the breadth of the range.

[0289] Whenever a numerical range is indicated herein, it is meant to include any cited numeral (fractional or integral) within the indicated range. The phrases “ranging/ranges between” a first indicate number and a second indicate number and “ranging/ranges from” a first indicate number “to” a second indicate number are used herein interchangeably and are meant to include the first and second indicated numbers and all the fractional and integral numerals therebetween.

[0290] As used herein the term “method” refers to manners, means, techniques and procedures for accomplishing a given task including, but not limited to, those manners, means, techniques and procedures either known to, or readily developed from known manners, means, techniques and procedures by practitioners of the chemical, pharmacological, biological, biochemical and medical arts.

[0291] As used herein, the term “treating” includes abrogating, substantially inhibiting, slowing or reversing the progression of a condition, substantially ameliorating clinical or aesthetical symptoms of a condition or substantially preventing the appearance of clinical or aesthetical symptoms of a condition.

[0292] It is appreciated that certain features of the invention, which are, for clarity, described in the context of separate embodiments, may also be provided in combination in a single embodiment. Conversely, various features of the invention, which are, for brevity, described in the context of a single embodiment, may also be provided separately or in any suitable subcombination or as suitable in any other described embodiment of the invention. Certain features described in the context of various embodiments are not to be considered essential features of those embodiments, unless the embodiment is inoperative without those elements.

[0293] Various embodiments and aspects of the present invention as delineated hereinabove and as claimed in the claims section below find experimental support in the following examples.

### EXAMPLES

[0294] Reference is now made to the following examples, which together with the above descriptions illustrate some embodiments of the invention in a non limiting fashion.

[0295] Generally, the nomenclature used herein and the laboratory procedures utilized in the present invention include molecular, biochemical, microbiological and recombinant DNA techniques. Such techniques are thoroughly explained in the literature. See, for example, “Molecular Cloning: A laboratory Manual” Sambrook et al., (1989); “Current Protocols in Molecular Biology” Volumes I-III Ausubel, R. M., ed. (1994); Ausubel et al., “Current Protocols in Molecular Biology”, John Wiley and Sons, Baltimore, Md. (1989); Perbal, “A Practical Guide to Molecular Cloning”, John Wiley & Sons, New York (1988); Watson et al., “Recombinant DNA”, Scientific American Books, New York; Birren et al. (eds) “Genome Analysis: A Laboratory Manual Series”, Vols. 1-4, Cold Spring Harbor Laboratory Press, New York (1998); methodologies as set forth in U.S. Pat. Nos. 4,666,828; 4,683,202; 4,801,531; 5,192,659 and 5,272,057; “Cell Biology: A Laboratory Handbook”, Volumes I-III Cellis, J. E., ed. (1994); “Current Protocols in Immunology” Volumes I-III Coligan J. E., ed. (1994); Stites et al. (eds), “Basic and Clinical Immunology” (8th Edition), Appleton & Lange, Norwalk, Conn. (1994); Mishell and Shiigi (eds), “Selected Methods in Cellular Immunology”, W. H. Freeman and Co., New York (1980); available immunoassays are extensively described in the patent and scientific literature, see, for example, U.S. Pat. Nos. 3,791,932; 3,839,153; 3,850,752; 3,850,578; 3,853,987; 3,867,517; 3,879,262; 3,901,654; 3,935,074; 3,984,533; 3,996,345; 4,034,074; 4,098,876; 4,879,219; 5,011,771 and 5,281,521; “Oligonucleotide Synthesis” Gait, M. J., ed. (1984); “Nucleic Acid Hybridization” Hames, B. D., and Higgins S. J., eds. (1985); “Transcription and Translation” Hames, B. D., and Higgins S. J., Eds. (1984); “Animal Cell Culture” Freshney, R. I., ed. (1986); “Immobilized Cells and Enzymes” IRL Press, (1986); “A Practical Guide to Molecular Cloning” Perbal, B., (1984) and “Methods in Enzymology” Vol. 1-317, Academic Press; “PCR Protocols: A Guide To Methods And Applications”, Academic Press, San Diego, Calif. (1990); Marshak et al., “Strategies for Protein Purification and Characterization—A Laboratory Course Manual” CSHL Press (1996); all of which are incorporated by reference as if fully set forth herein. Other general references are provided throughout this document. The procedures therein are believed to be well known in the art and are provided for the convenience of the reader. All the information contained therein is incorporated herein by reference.

[0296] General Materials and Experimental Methods

[0297] hESC Culture and Differentiation

[0298] H9 (4), I3, I6 (13) and CSES2 (14, 15) cells were routinely cultured on mouse embryonic fibroblasts (MEFs) that have been mitotically inactivated by mitomycin C. The cells were grown in ES cell medium consisting of: 80% knockout Dulbeco's Modified Eagle's Medium (Invitrogen, Paisley, UK), 20% knockout serum replacement (Invitrogen), 1 mM glutamine (Biological Industries, Israel) and 1% non-essential amino acids (Biological Industries, Israel), 0.1 mM 2-mercaptoethanol (Sigma Chemical Co.) and 4 ng/ml basic fibroblast growth factor (bFGF) (PeproTech, Rehovot, Israel). Karyotyping of hESCs and transfected clones was performed as described (16). Embryonic bodies (EBs) were formed by harvesting the cells with a trypsin solution which contains calcium and magnesium (Biological Industries, Israel). When cell clusters began to detach from the MEF feeders, the cells were collected, centrifuged and transferred to plastic non coated UV-irradiated bacteriological Petri dishes in EB medium in order to allow their aggregation. The EB medium used is essentially the same as the ES cell medium except bFGF was not included. The EB medium consisted of: 80% knockout Dulbecco's Modified Eagle's Medium (Invitrogen, Paisley, UK), 20% knockout serum replacement (Invitrogen), 1 mM glutamine (Biological Industries, Israel) and 1% non-essential amino acids (Biological Industries, Israel).

[0299] Transfections

[0300] BAC Transgenesis of a SOX17-GFP Reporter BAC

[0301] The SOX17 BAC reporter construct was built using recombineering (recombination-mediated genetic engineering) (17) in which the coding sequence of the SOX17 gene was replaced by the coding sequence of the GFP gene together with a floxed neomycin resistance gene. BACs were obtained from the Australian Genome Research Facility and specifically RP11-53M11 and RP11-47H10 were modified. The modified BACs were electroporated into hESCs essentially according to the protocol of Zwaka and Thomson (18). Briefly, hESCs cells were harvested from the plate with a trypsin solution containing calcium and magnesium and were centrifuged and the pellet was resuspended in 500 microliters of ES cell medium. Fifty micrograms of BAC DNA were mixed with PBS to a final volume of 300 microliters and the DNA solution was mixed with the cell suspension and was transferred to a 4 mm cuvette (Bio-Rad, Richmond, Calif.). The cells were electroporated using a Bio-Rad Gene Pulser at 320V and 200 mF. After electroporation the cuvette was allowed to stand for ten minutes and then the contents were transferred to a plate of MEFs in ES cell medium. For selection of resistant colonies, the hESCs were cultured on MEFs harboring the neomycin resistance gene (derived from DR4 mice; Jackson Laboratories USA). To obtain optimal survival of the cells after electroporation, Rho-associated kinase (ROCK) Inhibitor (Alexis Biochemicals, San Diego, Calif., USA) was added to the medium at a concentration of 10 mM. Two days later, selection with G418 (40 microgram/ml effective concentration) was initiated and selection medium was changed every two or three days. At about day 14, G418 resistant clones were isolated and expanded.

[0302] The various clones were allowed to form embryoid bodies (EBs) in the presence of activin A (66 ng/ml) (Peprotech) and two days later, the EBs were dissociated into single cells with TrypLE select (Invitrogen) and were analysed by FACS.

[0303] BAC Transgenesis of PDX1-GFP Reporter BAC

[0304] A PDX1 BAC reporter construct was built in which the coding sequence of the PDX1 gene was replaced by the coding sequence of the GFP gene together with a floxed Neo gene in a BAC spanning the genomic region of the PDX1 gene (RP11-328P22, GenBank Accession No. AL353195.14 (SEQ ID NO:34)). The BAC included about 8.6 kb of upstream promoter sequence of the PDX1 gene (SEQ ID NO:16) and about 19.2 Kb of the downstream sequence of the PDX1 gene (SEQ ID NO:17).

[0305] Similarly to the SOX17-BAC, various hESC clones harbouring the PDX1—GFP reporter BAC were isolated and were allowed to differentiate by forming EBs. At day 14, the EBs were dissociated into single cells and were analysed by FACS.

[0306] Cell Culture and Genetic Labeling

[0307] Human Embryonic Stem Cells (HESC) clones carrying either SOX17 or PDX1 BAC GFP reporter protein were generated for the screening. Cells were grown in a tissue culture facility and received standard treatments and medium replacement. Differentiations to definitive endoderm (SOX17⁺) and to pancreatic cells (PDX1⁺) were achieved by applying the appropriate protocols as described below. Positive monitoring of SOX17-GFP⁺ cells and PDX1-GFP⁺ cells enables the isolation of semi-homogenous population for the expression analysis.

[0308] Differentiation of Pluripotent Stem Cells into Definite Endodermal Cells

[0309] To differentiate hESCs toward definitive endoderm, the present inventors used the protocol described by D'Amour (D'Amour 2006, Nat Biotechnol 24:1392-1401) which includes culturing the cells in the presence of Activin A or its substitute IDE2 (Borowiak M, 2009 (Cell Stem Cell 4, 348-358)). In brief, 80-90% confluent hESCs were cultured for 1 day in RPMI (Invitrogen) medium supplemented with 1 mM glutamine and either 25 ng/ml Wnt3a (R&D) and 100 ng/ml Activin A (Peprotec), or 5 μM IDE2 (Enzo Life Sciences Inc, Lausen, Switzerland). The medium was then changed to RPMI with 0.2% Foetal bovine serum (FBS) (Invitrogen), 1 mM glutamine and 100 ng/ml Activin A or 5 μM IDE2 for culturing of 2 additional days.

[0310] Differentiation of Definite Endodermal Cells into Pancreatic Progenitor Cells

[0311] Definite endodermal cells can be further differentiated into pancreatic progenitor cells by following the differentiation protocol(s) described by D'Amour 2006 (Nat Biotechnol 24:1392-1401), Kroon 2008 (Nat Biotechnol. 2008; 26:443-52. Epub 2008 Feb. 20) and/or Borowiak 2009 (Cell Stem Cell 4, 348-358, Apr. 3, 2009).

[0312] Microarray

[0313] RNA was extracted from FACS sorted cell populations using Qiagen micro RNA isolation kit. The integrity of the RNA was confirmed using an RNA Pico Bioanalyzer and microarray analysis was performed on the Human Gene ST1.0 chip (Affymetrix, Santa Clara, Calif.). Three replicas from each differentiation stage (SOX17⁺ and PDX1⁺ cells) were loaded on microarray chips. Analysis was performed on the Human Gene ST1.0 chip (Affymetrix, Santa Clara, Calif.). Evaluation of changes in gene expression was performed by comparing array results to a previous Human Embryonic Stem Cells (HESC) microarray data (3 replicas) and to Pancreas microarray results (3 replicas).

[0314] Data Analysis

[0315] In accordance with the aim of the current study, an emphasis was put on genes with known surface characteristics. The Gene Ontology (G0) Cellular Component Term information from the Affymetrix database was analyzed, enabling an efficient prioritization of the relevant genes and sequences. The present inventors used the Partek® Genomics Suite™ (Partek Incorporated, St. Louis, Mo., U.S.A) for the bioinformatic analysis. Following the first analysis, a refinement of each selected gene was done by crossing the results with the comprehensive GeneCards database (http://www(dot)genecards(dot)org/). Following the cross check, genes were divided into two groups: cell surface genes; and putative surface and membranal genes.

[0316] Statistical Analysis

[0317] The Fold Change (FC) threshold was set on FC=2.0. Expression comparisons were calculated by using Student's test. Significance was taken as P<0.05.

[0318] Selection of PDX1 Expressing Cells

[0319] 14 day-old EBs or older EBs were used to select for TROP-2 and GPR50 expressing cells.

[0320] FACS Sorting

[0321] FACS sorting was performed on single cells that had been dissociated using TrypLE select (Invitrogen) using a FACS ARIA (Becton Dickinson, Bedford, Mass.). GFP positive (GFP+) and GFP negative (GFP−) cells were isolated. FACS sorting was also performed using allophycocyanin (APC) conjugated mouse monoclonal anti human TROP-2 (1:100) and mouse monoclonal anti human GPR50 (1:200) (both from R&D Systems Inc., Minneapolis, Minn.) followed by secondary anti-mouse immunoglobulin G (IgG) fluorescence isothiocyanate (FITC) conjugated antibody 1:100 (Chemicon/Millipore, Billerica, Mass.).

[0322] RT-PCR

[0323] Total RNA was isolated from differentiated hESCs using RNeasy micro kit (Qiagen, Hilden, GmbH) according to the manufacturer's recommended protocol. cDNA was synthesized using Superscript reverse transcriptase (Invitrogen). Quantitative Real Time (QRT) PCR (RT-qPCR) analysis was performed in triplicate and normalized to the internal endogene GAPDH gene expression. The reaction was performed in an ABI Prism 7000 (Applied Biosystems, Warrington, UK) with the TaqMan Universal PCR Master Mix (Applied Biosystems) using Taqman probes (Applied Biosystems) and analyzed using the relative Quantification (RQ) study in the Sequence Detection Software (V. 1.2; Applied Biosystems).

[0324] Immunofluorescence

[0325] The cells were seeded on 13 mm glass cover slides in E-well culture plates. Forty-eight hours after seeding, cells were fixed for 20 minutes in 4% paraformaldehyde in PBS; permeabilized using 0.5% TritonX-100 in PBS/1% fetal bovine serum, and incubated overnight with the primary antibodies: goat anti-SOX17 1:400 (R&D), goat anti-OCT4 1:200 (Santa Cruz), rabbit anti-green florescent protein (GFP) polyclonal antibody 1:100 (Chemicon/Millipore, Billerica, Mass.), or goat anti-PDX1 1:10,000 (Abcam plc, Cambridge, UK). After rinsing, secondary anti-mouse or anti-goat IgG Cy3 and anti-rabbit IgG Cy2 (Jackson Laboratories, West Grove, Pa.) were added to the samples, which were then incubated for an additional hour. Finally, the cells were rinsed once more and mounted with mounting media (VECTASHIELD, Vector Lab, CA). The slides were analyzed using a confocal microscope (Bio-Rad MRC 1024, Richmond Calif., USA).

### Example 1

[0326] The differentiation of hESCs into pancreatic beta cells is a stepwise process by which the initially pluripotent cell gradually becomes more committed towards the final cell fate of a functional insulin-producing cell. Initially, the pluripotent stem cells differentiate via mesendoderm into definitive endoderm. The definitive endoderm then commits towards a pancreatic cell fate, and these cells in turn differentiate towards an endocrine pancreatic cell fate, after which they commit to beta cells. FIG. 5A depicts a schematic illustration of differentiation of stem cells into pancreatic cells.

[0327] In order to fully characterize the differentiation of hESCs into insulin-producing cells it is important to identify and isolate these stage specific progenitor cells and characterize their properties on the molecular level. By obtaining a transcriptional profile of these cells and by identifying transcription factors that they express, a clearer picture of the differentiation process can be obtained. The present inventors took the approach of genetically labeling hESCs with stage specific fluorescent reporter constructs, thus generating hESCs reporter clones. These provide a simple, accurate and sensitive readout of the appearance of the progenitors thus enabling optimization of conditions for inducing their differentiation. The fluorescent reporter lines also provide valuable tools for isolating progenitor cells by FACS and further studying their gene profile.

[0328] The present inventors chose two key transcription factors expressed during differentiation towards beta cells: SOX17 and PDX1. SOX17 is expressed early at the definitive endoderm stage while PDX1 is expressed at a critical point in the pathway at which the cells decide to differentiate into pancreas or non-pancreas endodermal derivatives. Using genetically modified hESCs expressing EGFP under the control of SOX17 or PDX1 promoters, the present inventors were able to isolate the stage specific cells by FACS and characterize their transcriptional profile by qPCR and microarray analysis.

[0329] Experimental Results

[0330] BAC Transgenesis of a SOX17-GFP Reporter BAC

[0331] The simplest method to generate reporter cells is to introduce a reporter plasmid expressing EGFP under a minimal promoter. The problem with this approach is that the random integration of a plasmid is subject to position effects, and also that the minimal promoter might not mimic the exact in vivo expression pattern of the gene. A different approach that alleviates some of these problems is to modify a BAC that spans the genomic region of the gene by inserting IRES-EGFP into the 3′UTR of the gene or by replacing the coding sequence of the gene with the coding sequence of EGFP. In such a way, EGFP is expressed under the control of a more extensive genomic sequence that presumably contains all or most of the critical transcriptional regulatory elements of the gene. Furthermore, the large size of the BAC may, to some extent, buffer the reporter construct from position effects.

[0332] A SOX17—BAC reporter construct was built in which the coding sequence of the SOX17 gene was replaced by the coding sequence of the GFP gene together with a floxed neo gene.

[0333] Preparation of RP11-53M11 BAC SOX17-Reporter

[0334] EGFP and floxed neo was knocked into the SOX17 gene locus in a human genomic BAC RP11-53M11 by replacing the coding sequence of SOX17 (ATG to TGA) with the coding sequence of GFP and also the floxed neo. FIG. 1A schematically illustrates the structure of the recombinant construct. The BAC includes approximately 28.3 kb of SOX17 upstream sequence (SEQ ID NO:36) and approximately 132 kb of the SOX17 downstream sequence (SEQ ID NO:37). The sequence of the recombinant BAC (SEQ ID NO:1) includes the GFP coding sequence (SEQ ID NO:2), along with the SV40 poly A sequence (SEQ ID NO:27), a loxP site (SEQ ID NO:4), the neomycin resistance gene sequence (SEQ ID NO:3) with the SV40 early promoter/enhancer (SEQ ID NO:28), and the TK polyadenylation site (SEQ ID NO:29), a second loxP site (SEQ ID NO:4), encompassed by the human endogenous SOX17 upstream and downstream regulatory sequences.

[0335] Preparation of SOX17-GFP Knock in (KI) Plasmid Construct

[0336] The present inventors have then subloned out a region of the recombinant RP11-53M11 BAC SOX17-reporter BAC into a plasmid in order to generate a gene trageting vector (SEQ ID NO:6). The genomic sequence encompassing the SOX17-GFP sequence (from nucleotide 15487 of SEQ ID NO:1 to nucleotide 32492 of SEQ ID NO:1) was subcloned into the Bluescript plasmid (Stratagene) (FIG. 1B, the sequence marked as 5′-arm, EGFP, Floxed Neo and 3′-arm). The 5′-arm includes about 9 kb of SOX17 upstream regulatory sequence (SEQ ID NO:7) and the 3′-arm includes about 5 kb of SOX17 downstream regulatory sequence (SEQ ID NO:8).

[0337] Two 3′-external probes were prepared (SEQ ID NOs:9 and 10) in order to detect correct targeting of the vector into the genomic DNA of the host cell. For example, Southern blot screening of targeting at the 3′ end, the 3′-external probe (2) (SEQ ID NO:10) is used on XbaI digested genomic DNA (gDNA). The expected wild type band is 16.7 kb and the expected targeted band is 10.3 kb. The vector can be linearized with NruI. The targeted clone should be ampicillin and kanamycin resistant.

[0338] Preparation of BAC SOX17-Reporter RP11-47H10:

[0339] EGFP and floxed neo was knocked into the SOX17 gene locus in a human genomic BAC RP11-47H10 by replacing the coding sequence of SOX17 (ATG to TGA) with the coding sequence of GFP and the floxed neo. FIG. 1C schematically illustrates the structure of the recombinant construct. There is approximately 74 kb upstream of the SOX17 upstream regulatory sequence (SEQ ID NO:38) and approximately 73 kb of the downstream regulatory sequence (SEQ ID NO:39). The sequence of the recombinant BAC (SEQ ID NO:5) includes the GFP coding sequence (SEQ ID NO:2), along with the SV40 poly A sequence (SEQ ID NO:27), a loxP site (SEQ ID NO:4), the neomycin resistance gene sequence (SEQ ID NO:3) with the SV40 early promoter/enhancer (SEQ ID NO:28), and the TK polyadenylation site (SEQ ID NO:29), a second loxP site (SEQ ID NO:4), encompassed by the human endogenous SOX17 upstream (SEQ ID NO:38) and downstream (SEQ ID NO:39) regulatory sequences.

[0340] Preparation of SOX17-GFP Knock-in hESC Clones and Embryoid Bodies Differentiated Therefrom

[0341] The RP11-47H10 GFP reporter BAC was electroporated into hESCs and G418 resistant clones were isolated. The various clones were allowed to form EBs in the presence of activin A (66 ng/ml) and at day 2, the EBs were dissociated into single cells and were analysed by FACS (FIG. 2A) and by fluorescent microscopy (FIGS. 2B-2E). It was previously shown by several groups that high concentrations of activin A induced hESCs to differentiate into definitive endoderm. SOX17 is one of the endodermal genes that are induced using such a protocol, which initiates the path toward insulin producing cell differentiation (19, 20). As shown, there was a clear population of GFP expressing cells in the different clones which varied from about 5% to about 40% (FIG. 2A). Next, an 80% confluent monolayer of the SOX17-GFP reporter line was treated with activin A (66 ng/ml) for three days after which immunohistochemistry was performed. The staining was carried out with anti-SOX17 (red) and anti-GFP (green) and demonstrated a clear correlation between SOX17 and GFP expression (FIG. 2E) thus confirming that the GFP⁺ cells indeed represent the SOX17⁺ population. The present inventors further stained the cells for both OCT4 (green), which marks undifferentiated cells, and SOX17 (red), marking the definitive endoderm population (FIG. 2G). Cells expressing OCT4 indicating the pluripotent state, were not positive for SOX17 and conversely, cells expressing SOX17 had turned off their OCT4 expression.

[0342] Gene Expression Analysis of SOX17+ cells

[0343] The SOX17-GFP reporter cells were grown as a monolayer in the presence of activin A for two days and then they were FACS-sorted into GFP⁺ and GFP⁻ populations. RNA was extracted from both populations and cDNA was synthesized. qPCR was performed comparing the relative expression of various genes between the GFP+ and the GFP⁻ cell populations (FIG. 2H). The present inventors were able to demonstrate that the GFP+ cells were enriched for SOX17 expression as compared to the GFP⁻ cell population, thus confirming that the GFP positive cells indeed represent a SOX17 positive cell population. Moreover, in the GFP+ cell population, an upregulation of genes which are related to definitive endoderm or mesendoderm such as chemokine receptor 4 (CXCR4), Cerebrus (CER), Goosecoid (GSC), CD34, and hepatocyte nuclear factor 3 beta (FOXA2) was observed, while expression of genes, such as NANOG which is primarily a marker of undifferentiated cells, was clearly decreased in the GFP⁺ population. These results further validate that the GFP+ sorted population indeed represent definitive endoderm or mesendoderm.

[0344] Transcriptional Profiling of SOX17⁺ Cells

[0345] Microarray analysis was performed on the SOX17⁺ fraction using an Affymetrix Human Gene ST1.0 chip to obtain a transcriptional profile of this precursor population. Tables 1-2 hereinbelow summarize the findings of the microarray analysis, with information regarding membrane-associated genes (membranal and cell surface markers) which are upregulated (Table 1) and downregulated (Table 2) in the SOX17+ subpopulation of cells as compared to the genetically un-modified hESCs. Tables 3-4 hereinbelow summarize the findings of the microarray analysis, with information regarding non-membrane-associated genes (e.g., non-membranal, intracellular, secreted, transcription factors and the like) which are upregulated (Table 3) and downregulated (Table 4) in the SOX17+ subpopulation of cells as compared to the genetically un-modified hESCs. Examples of transcription factors and growth factors that were enriched in the SOX17⁺ expressing cells include FOXA2, bone morphogenetic protein 2 (BMP2), frizzled homolog 5 (FZDS), HNF1 homeobox B (HNF1b), GATA binding protein 3 (GATA3), paired box 3 (PAX3), vascular endothelial growth factor A (VEGFA) and Kruppel-like factor 8 (KLF8). Examples of secreted proteins that were enriched in the SOX17+ expressing cells include insulin-like growth factor binding protein 5 (IGFBPS), Apolipoprotein A-I (ApoA1) and apolipoprotein B (APOB). Examples of transmembrane proteins enriched in this population include CXCR4 (as was previously reported), CLAUDIN 18, cholecystokinin B receptor (CCKBR), leukemia inhibitory factor receptor alpha (LIFR), G protein-coupled receptor 141 (GPR141), G protein-coupled receptor 128 (GPR128), follicle stimulating hormone receptor (FSHR), CD34, and bone marrow stromal cell antigen 2 (BST2).

TABLE 1
Membranal genes which are upregulated in SOX17+ cells as compared to genetically un-modified hESCs

| | | Affy. target | | SEQ ID NO: | | Log 2 fold |
|---|---|---|---|---|---|---|
| Gene | Probe | nucl. SEQ | Rep. | (Of Rep. | Polyn. SEQ ID NOs: | change |
| Symbol | Set ID | ID NO: | Public ID | Public ID) | rep. by target | [SOX17-HESC] |
| TRPA1 | 8151341 | 44 | NM_007332 | 107 | 4060, 8269, 5433, | +4.18 |
| SLC40A1 | 8057677 | 45 | NM_014585 | 108 | 3154, 4368, 6969, 5406, 7045, | +3.69 |
| | | | | | 8144, 8627, 7674, 6595, 6989, | |
| SLC30A10 | 7924342 | 46 | NM_018713 | 109 | 3493, 3718, 6268, 6130, 8273, | +3.65 |
| | | | | | 8216, | |
| CCKBR | 7938090 | 47 | NM_176875 | 110 | 2809, 5307, 5676, | +3.50 |
| VIPR2 | 8165658 | 48 | X59268 | 111 | 2553, 3426, 3422, 6269, | +3.45 |
| COLEC12 | 8021946 | 49 | NM_130386 | 112 | 2891, 4601, 6579, | +3.12 |
| FLRT3 | 8065071 | 50 | NM_198391 | 113 | 2812, 5172, 5173, 5918, 7056, | +3.11 |
| | | | | | 6380, | |
| LGR5 | 7957140 | 51 | NM_003667 | 114 | 2732, 3193, 6795, 5509, | +3.09 |
| GPR141 | 8132347 | 52 | NM_181791 | 115 | 3313, 3318, 6342, 5701, 6692, | +3.04 |
| BST2 | 8035304 | 53 | NM_004335 | 116 | 3090, 2805, 5403, 7124, | +3.02 |
| SLC5A9 | 7901316 | 54 | NM_001011547 | 117 | 4682, 4626, 4627, 6649, 6403, | +2.94 |
| | | | | | 7403, 7829, 6781, 6361, | |
| GPR128 | 8081298 | 55 | NM_032787 | 118 | 3995, 4847, 5470, 7733, 8308, | +2.93 |
| | | | | | 8445, | |
| KEL | 8143534 | 56 | NM_000420 | 119 | 2886, 2987, 6934, 8187, 8288, | +2.91 |
| | | | | | 6818, 6144, 8559, | |
| LRIG3 | 7964602 | 57 | NM_153377 | 120 | 3457, 3537, 4639, 5656, 6683, | +2.89 |
| | | | | | 7048, | |
| LYPD6B | 8045664 | 58 | NM_177964 | 121 | 3039, 3538, 8714, 5464, 7286, | +2.83 |
| | | | | | 6455, 7123, 7806, 7494, 8341, | |
| | | | | | 7067, 6613, | |
| FSHR | 8052072 | 59 | NM_000145 | 122 | 4265, 5021, 5022, 6252, 5713, | +2.73 |
| | | | | | 7612, 7221, 6397, | |
| LIFR | 8111677 | 60 | NM_001127671 | 123 | 2551, 4403, 4404, 5491, 7187, | +2.72 |
| | | | | | 7919, 8314, 7758, | |
| FOLH1 | 7948058 | 61 | NM_153696 | 124 | 3060, 3615, 2779, 2843, 3871, | +2.70 |
| | | | | | 2598, 4703, 4705, 4140, 4138, | |
| | | | | | 2773, 3026, 3280, 5177, 5176, | |
| | | | | | 2766, 5178, 3821, 6173, 5921, | |
| | | | | | 6307, 5425, 6469, 6968, | |
| CXCR4 | 8055465 | 62 | NM_001008540 | 125 | 2782, 3775, 3776, 5384, 6834, | +2.69 |
| | | | | | 7645, | |
| ITGA5 | 7963786 | 63 | NM_002205 | 126 | 3341, 3761, 5661, 6880, | +2.58 |
| AMOT | 8174576 | 64 | NM_001113490 | 127 | 2826, 4332, 3837, 7904, 5933, | +2.55 |
| | | | | | 6751, 5641, 6093, 6295, | |
| LY6E | 8148572 | 65 | NM_001127213 | 128 | 2668, 4370, 4371, 8116, 5582, | +2.47 |
| | | | | | 7083, 8656, 8711, 8353, 7871, | |
| | | | | | 7878, | |
| SEMA6D | 7983527 | 66 | NM_024966 | 129 | 3078, 3079, 3080, 3081, 3082, | +2.46 |
| | | | | | 4192, 4279, 3184, 3186, 3187, | |
| | | | | | 3185, 3188, 3183, 6040, 7595, | |
| | | | | | 5709, 6809, 6877, 7470, 6289, | |
| | | | | | 5994, | |
| GJA5 | 7919340 | 67 | NM_005266 | 130 | 3364, 4104, 4105, 7691, 6103, | +2.46 |
| | | | | | 6550, 5474, | |
| PRTG | 7989073 | 68 | NM_173814 | 131 | 3710, 4778, 6379, | +2.42 |
| CD34 | 7923978 | 69 | NM_001773 | 132 | 2563, 3891, 3854, 5956, 6086, | +2.40 |
| | | | | | 5785, 6059, 8087, | |
| TMEM144 | 8098041 | 70 | NM_018342 | 133 | 2802, 3163, 3170, 3261, 3319, | +2.40 |
| | | | | | 3506, 3267, 4584, 8697, 8424, | |
| | | | | | 5686, 8259, 8744, 8370, 7977, | |
| | | | | | 8192, 7923, 7849, 8039, 7954, | |
| | | | | | 8413, 7830, | |
| ROR2 | 8162283 | 71 | NM_004560 | 134 | 3804, 4102, 2608, 3151, 3287, | +2.35 |
| | | | | | 5241, 6393, 7306, 6756, 8135, | |
| GPR177 | 7916862 | 72 | NM_024911 | 135 | 3473, 5169, 5171, 5170, 6985, | +2.33 |
| | | | | | 7944, 8040, 5423, 6217, 5957, | |
| | | | | | 7720, 6063, 8128, 6006, | |
| OR2T4 | 7911273 | 73 | NM_001004696 | 136 | 3717, 6107, | +2.33 |
| SLC7A7 | 7977786 | 74 | NM_001126105 | 137 | 2789, 5292, 5291, 7158, 7255, | +2.32 |
| | | | | | 5870, 8255, 6471, 7642, | |
| KCNJ3 | 8045795 | 75 | NM_002239 | 138 | 2667, 3201, 5594, 8178, | +2.31 |
| CLDN18 | 8082928 | 76 | NM_016369 | 139 | 4183, 3788, 3787, 8686, 5317, | +2.29 |
| | | | | | 6211, | |
| TMEM106C | 7955063 | 77 | NM_024056 | 140 | 3447, 4690, 4693, 4691, 4692, | +2.22 |
| | | | | | 5419, 6591, 7332, | |
| GPR151 | 8114896 | 78 | NM_194251 | 141 | 3379, 3780, 5572, | +2.21 |
| SLC44A5 | 7917052 | 79 | NM_152697 | 142 | 3153, 4453, 4454, 7183, 6087, | +2.18 |
| | | | | | 6160, | |
| CDH10 | 8111255 | 80 | NM_006727 | 143 | 2788, 5142, 8497, 5507, 8253, | +2.18 |
| | | | | | 8371, | |
| TMEM27 | 8171472 | 81 | NM_020665 | 144 | 2960, 4942, 6430, | +2.17 |
| SLC1A1 | 8154135 | 82 | NM_004170 | 145 | 3070, 5025, 5401, 7218, 8331, | +2.13 |
| TMEM56 | 7903162 | 83 | NM_152487 | 146 | 4133, 4607, 6302, 7020, 6966, | +2.11 |
| | | | | | 6405, | |
| CD177 | 8037298 | 84 | NM_020406 | 147 | 3744, 4005, 6408, 7480, 7666, | +2.09 |
| PLXNA2 | 7923991 | 85 | NM_025179 | 148 | 4111, 4029, 6303, 8403, 6499, | +2.08 |
| SLC26A2 | 8109194 | 86 | NM_000112 | 149 | 3484, 3972, 5711, 7134, | +2.05 |
| DSCAM | 8070421 | 87 | NM_001389 | 150 | 2796, 3591, 6842, | +2.04 |
| TMEM133 | 7943369 | 88 | NM_032021 | 151 | 2860, 3175, 5703, | +2.02 |
| IL13RA1 | 8169580 | 89 | NM_001560 | 152 | 2683, 3219, 6256, 6220, 8730, | +2.00 |
| | | | | | 6320, | |
| ATP2B1 | 7965359 | 90 | NM_001001323 | 153 | 2655, 3664, 3663, 6331, 5399, | +1.92 |
| | | | | | 6047, 6021, 6425, | |
| CD302 | 8056102 | 91 | NM_014880 | 154 | 3314, 3316, 3317, 3215, 2603, | +1.92 |
| | | | | | 4536, 3431, 3435, 4256, 3004, | |
| | | | | | 4660, 5416, 6685, 8428, 8482, | |
| | | | | | 7955, | |
| MEGF9 | 8163775 | 92 | NM_001080497 | 155 | 4704, 5185, 6235, 6965, | +1.91 |
| EDNRA | 8097692 | 93 | NM_001957 | 156 | 2600, 4920, 4921, 4922, 8628, | +1.89 |
| | | | | | 5591, 5960, 8235, 5962, 8220, | |
| | | | | | 6628, 7962, | |
| CDH2 | 8022674 | 94 | NM_001792 | 157 | 3134, 4668, 5546, | +1.88 |
| GPR161 | 7922108 | 95 | NM_153832 | 158 | 3044, 3194, 7409, 6232, 7729, | +1.86 |
| | | | | | 6084, 8332, 5530, 5999, | |
| TYRO3 | 7982938 | 96 | NM_006293 | 159 | 2646, 5109, 5565, | +1.85 |
| FLRT2 | 7976073 | 97 | NM_013231 | 160 | 4059, 3816, 5667, | +1.82 |
| LRIT3 | 8096839 | 98 | NM_198506 | 161 | 3439, 4440, 5693, 7042, 6600, | +1.82 |
| PCDH7 | 8094520 | 99 | NM_032457 | 162 | 2723, 5014, 5015, 2937, 5262, | +1.80 |
| | | | | | 5768, 5971, | |
| NRCAM | 8142270 | 100 | NM_001037132 | 163 | 3565, 3859, 3993, 3989, 3309, | +1.79 |
| | | | | | 3102, 3441, 4484, 5180, 5181, | |
| | | | | | 5182, 5183, 5184, 8267, 7609, | |
| | | | | | 7127, 6412, 6732, 7550, 6919, | |
| | | | | | 8165, 7672, 6704, 6312, 7407, | |
| | | | | | 7189, 7606, 6991, 7159, 6420, | |
| | | | | | 6482, 6987, | |
| SMAGP | 7963280 | 101 | NM_001033873 | 164 | 3242, 3886, 3885, 6421, 7267, | +1.73 |
| AMHR2 | 7955797 | 102 | NM_020547 | 165 | 4056, 4904, 4903, 4905, 7400, | +1.73 |
| | | | | | 5395, | |
| ELTD1 | 7917182 | 103 | NM_022159 | 166 | 3027, 4175, 6126, 7630, | +1.73 |
| GRPR | 8166202 | 104 | NM_005314 | 167 | 2579, 3797, 6967, | +1.73 |
| EPHA4 | 8059279 | 105 | NM_004438 | 168 | 3926, 3577, 6427, 7497, 5543, | +1.72 |
| CD99 | 8165794 | 106 | NM_001122898 | 169 | 3639, 2591, 2693, 3374, 2887, | +1.70 |
| | | | | | 3376, 3010, 3030, 4292, 4358, | |
| | | | | | 3378, 8134, 6730, 8768, 6667, | |
| | | | | | 6606, 7512, 7524, | |

Table 1. Provided are the description of the membranal genes along with the sequence identifiers of the Affymetrix probes, the target sequence identified by the Affymetrix probe (Affy. target nucl. SEQ ID NO:), and the mRNA sequences represented by the target sequences. Also shown are the log 2 fold change in expression levels of the indicated genes between the SOX17 GFP cells and the genetically unmodified HESCs. The (+) or (−) sign means that the genes are upregulated or downregulated, respectively, in the SOX17-GFP cells as compared to the genetically unmodified HESCs.

TABLE 2
Membranal genes which are downregulated in SOX17+ cells as compared to genetically un-modified ESCs

| | | Affy. target | | SEQ ID NO: | | Log 2 fold |
|---|---|---|---|---|---|---|
| Gene | Probe | nucl. SEQ | Rep. | (of Rep. | Polyn. SEQ ID NOs: | change |
| Symbol | Set ID | ID NO: | Public ID | Public ID) | rep. by target | [SOX17-HESC] |
| KDR | 8100393 | 170 | NM_002253 | 204 | 2708, 4588, 7921, 5498, 8228, | −4.30 |
| PCDHB5 | 8108697 | 171 | NM_015669 | 205 | 2872, 2931, 5379, | −3.42 |
| FAT4 | 8097288 | 172 | NM_024582 | 206 | 3507, 4331, 5697, 7491, | −2.99 |
| FLT1 | 7970763 | 173 | NM_001159920 | 207 | 3763, 4816, 4818, 4819, 4817, 5510, | −2.88 |
| NRN1 | 8123739 | 174 | NM_016588 | 208 | 3230, 3454, 7755, 5387, | −2.87 |
| THBS2 | 8130867 | 175 | NM_003247 | 209 | 4184, 3540, 8063, 7661, 5992, 6904, | −2.85 |
| PTPRZ1 | 8135774 | 176 | NM_002851 | 210 | 2599, 3943, 7457, 8030, 7815, 8011, 8237, 7646, | −2.79 |
| SLC6A15 | 7965206 | 177 | NM_001146335 | 211 | 3618, 4807, 4688, 4689, 5536, 5746, 5761, 7293, | −2.77 |
| GPR176 | 7987439 | 178 | NM_007223 | 212 | 3580, 2783, 5852, | −2.72 |
| SEMA6A | 8113666 | 179 | NM_020796 | 213 | 2844, 4722, 3122, 3148, 4310, 4145, 8137, 8152, | −2.68 |
| | | | | | 7900, 5499, 8724, 8667, 8467, 8111, 5437, 8321, | |
| | | | | | 7896, 5978, 8764, | |
| THBS1 | 7982597 | 180 | NM_003246 | 214 | 4759, 3539, 7996, 5434, 8028, 7563, 6593, 8344, | −2.63 |
| CDH11 | 8001800 | 181 | NM_001797 | 215 | 2639, 2970, 5559, 6928, | −2.51 |
| GRID2 | 8096440 | 182 | NM_001510 | 216 | 2719, 4235, 8429, 5557, 7933, 8154, | −2.51 |
| SLC7A11 | 8102800 | 183 | NM_014331 | 217 | 2916, 3899, 8531, 5555, | −2.46 |
| CDH1 | 7996837 | 184 | NM_004360 | 218 | 4149, 4182, 2614, 4278, 4556, 2794, 2795, 4415, | −2.46 |
| | | | | | 4294, 4315, 4347, 5506, 7453, 5404, 7133, | |
| LRFN5 | 7974109 | 185 | NM_152447 | 219 | 4563, 4583, 5622, | −2.45 |
| EDNRB | 7972157 | 186 | NM_003991 | 220 | 2606, 5247, 5246, 5248, 5597, 7819, 7369, | −2.44 |
| THY1 | 7952268 | 187 | NM_006288 | 221 | 3096, 4729, 5694, | −2.36 |
| NETO1 | 8023828 | 188 | NM_138999 | 222 | 3269, 3045, 5252, 5646, 6813, 5692, | −2.28 |
| KCND2 | 8135705 | 189 | NM_012281 | 223 | 3907, 3225, 5604, 8488, | −2.28 |
| TMPRSS11E | 8095380 | 190 | NM_014058 | 224 | 3472, 4222, 5579, 8653, | −2.21 |
| TMPRSS11E | 8095364 | 191 | NM_014058 | 225 | 3472, 4222, 5579, 8653, | −2.19 |
| CD44 | 7939341 | 192 | NM_000610 | 226 | 3067, 3068, 2739, 3276, 4538, 2566, 2586, 2564, | −2.17 |
| | | | | | 2565, 2660, 4282, 4552, 4163, 4631, 2890, 3277, | |
| | | | | | 3579, 3658, 3659, 3660, 3661, 3662, 6650, 7581, | |
| | | | | | 7244, 6542, 7096, 5461, 6031, 7241, 6225, 7493, | |
| | | | | | 6898, 5515, 6679, 5545, 5516, | |
| PDPN | 7898057 | 193 | NM_001006624 | 227 | 3236, 2746, 2747, 3084, 3519, 2965, 3133, 4305, | −2.08 |
| | | | | | 4306, 3747, 3748, 3745, 3746, 8458, 8786, 8213, | |
| | | | | | 5840, 7528, 8392, 8050, 7659, 7822, 8446, | |
| SLC7A1 | 7970810 | 194 | NM_003045 | 228 | 3517, 4636, 6881, | −2.08 |
| KAL1 | 8171248 | 195 | NM_000216 | 229 | 2607, 4088, 5560, 8200, | −2.07 |
| KCNG3 | 8051785 | 196 | NM_133329 | 230 | 3647, 5227, 5228, 5783, 7561, | −2.05 |
| GPM6B | 8171359 | 197 | NM_005278 | 231 | 4714, 3686, 3685, 3687, 3684, 6150, 8294, 6043, | −2.04 |
| | | | | | 5590, 7105, | |
| FXYD5 | 8027778 | 198 | NM_144779 | 232 | 3228, 3470, 2828, 3419, 3286, 4528, 3008, 3388, | −1.96 |
| | | | | | 4895, 4896, 4898, 4897, 6381, 7395, 6565, 5906, | |
| | | | | | 7311, 8512, | |
| PCDH18 | 8102792 | 199 | NM_019035 | 233 | 4262, 4225, 5888, 7284, | −1.93 |
| ICAM3 | 8033987 | 200 | NM_002162 | 234 | 3247, 4340, 5318, | −1.92 |
| MCTP1 | 8113130 | 201 | NM_024717 | 235 | 3688, 3689, 4710, 3372, 4621, 4622, 8584, 8536, | −1.89 |
| | | | | | 8020, 8738, 8599, 7737, 8789, 5624, 7945, 7981, | |
| | | | | | 7997, 8146, 6686, 7715, 8769, 8630, 7018, | |
| TACR3 | 8102127 | 202 | NM_001059 | 236 | 2592, 5166, 5672, | −1.82 |
| TMEM155 | 8102636 | 203 | NM_152399 | 237 | 3259, 4659, 4024, 8590, 7444, 8029, 8685, 7009, | −1.79 |
| | | | | | 7201, 8783, 5815, 7282, | |

Table 2. Provided are the description of the membranal genes along with the sequence identifiers of the Affymetrix probes, the target sequence identified by the Affymetrix probe, and the mRNA sequences represented by the target sequences. Also shown are the log 2 fold change in expression levels of the indicated genes between the SOX17 GFP cells and the genetically unmodified HESCs. The (+) or (−) sign means that the genes are upregulated or downregulated, respectively, in the SOX17-GFP cells as compared to the genetically unmodified HESCs.

TABLE 3
Non-membranal genes which are up-regulated in SOX17+ cells as compared to genetically un-modified ESCs

| | | Affy. target | | SEQ ID NO: | | Log 2 fold |
|---|---|---|---|---|---|---|
| Gene | Probe | nucl. SEQ | Rep. | (Of Rep. | Polyn. SEQ ID NOs: | change |
| Symbol | Set ID | ID NO: | Public ID | Public ID) | rep. by target | [SOX17-HESC] |
| GATA3 | 7926105 | 238 | NM_002051 | 530 | 2915, 3695, 3696, 6780, 6049, 7381, | +4.48 |
| SEMA3E | 8140650 | 239 | NM_012431 | 531 | 4218, 5112, 5113, 5625, 7193, | +4.11 |
| HHEX | 7929282 | 240 | NM_002729 | 532 | 2961, 4124, 7867, 5797, 8612, | +3.94 |
| ZNF280A | 8074853 | 241 | NM_080740 | 533 | 3304, 3570, 5866, | +3.88 |
| FAM184A | 8129231 | 242 | NM_024581 | 534 | 3503, 4208, 4209, 8021, 7766, 5900, 8495, | +3.82 |
| | | | | | 6262, | |
| WDR72 | 7988990 | 243 | NM_182758 | 535 | 3418, 4240, 6598, 6055, | +3.80 |
| PDZK1 | 7904843 | 244 | NM_002614 | 536 | 3336, 5243, 4204, 7461, 7260, 6532, 6226, | +3.75 |
| | | | | | 7090, 6900, 7707, 7472, 6465, | |
| RLBP1L2 | 8121803 | 245 | NM_001010852 | 537 | 3116, 3869, 5483, 6248, | +3.66 |
| SHISA2 | 7970676 | 246 | NM_001007538 | 538 | 4110, 3758, 5588, | +3.57 |
| VIL1 | 8048319 | 247 | NM_007127 | 539 | 4477, 4578, 5439, | +3.51 |
| STMN2 | 8147030 | 248 | NM_007029 | 540 | 4711, 5225, 5342, | +3.51 |
| APOA2 | 7921834 | 249 | NM_001643 | 541 | 2901, 2758, 6253, 8161, 7460, 7113, 8544, | +3.44 |
| | | | | | 6696, 7530, 7963, 6627, 6449, | |
| SERHL | 8073585 | 250 | NM_014509 | 542 | 4046, 3113, 3203, 4870, 6789, 7257, 7696, | +3.42 |
| | | | | | 6190, 7885, 6148, 8055, 5575, | |
| PPFIBP2 | 7938231 | 251 | NM_003621 | 543 | 3011, 4355, 5626, | +3.39 |
| DKK1 | 7927631 | 252 | NM_012242 | 544 | 3471, 3796, 7543, 8463, 8242, 5959, | +3.38 |
| MUM1L1 | 8169145 | 253 | NM_152423 | 545 | 3142, 4991, 4993, 6316, 5894, 5576, | +3.33 |
| IGFBP5 | 8058857 | 254 | NM_000599 | 546 | 2583, 4357, 8723, 5360, | +3.28 |
| ST6GALNAC2 | 8018761 | 255 | NM_006456 | 547 | 2638, 4437, 5345, | +3.27 |
| TSPYL5 | 8151931 | 256 | NM_033512 | 548 | 3241, 3675, 5757, | +3.26 |
| STC1 | 8149825 | 257 | NM_003155 | 549 | 2725, 3793, 5771, | +3.25 |
| SYTL5 | 8166747 | 258 | NM_001163335 | 550 | 3411, 4887, 4885, 4886, 5912, 6888, 5629, | +3.19 |
| EPSTI1 | 7971296 | 259 | NM_033255 | 551 | 3367, 3694, 3693, 5738, 5732, 7664, 7742, | +3.18 |
| ANKRD1 | 7934979 | 260 | NM_014391 | 552 | 2995, 3511, 5932, | +3.18 |
| ARHGAP24 | 8096160 | 261 | NM_001025616 | 553 | 3856, 4013, 4014, 4012, 8287, 7220, 7970, | +3.08 |
| | | | | | 6456, 8329, 8596, 5517, 8693, 8490, | |
| KRT18P49 | 8169233 | 262 | ENST00000427083 | 554 | 7599, | +3.07 |
| PRSS2 | 8136790 | 263 | — | | | +3.05 |
| RHOBTB3 | 8106986 | 264 | NM_014899 | 555 | 3394, 4041, 7121, 8530, 7782, 8683, 8248, | +3.05 |
| | | | | | 7828, 8218, 8489, | |
| FRZB | 8057506 | 265 | NM_001463 | 556 | 2679, 5106, 5695, | +3.05 |
| RARB | 8078286 | 266 | NM_016152 | 557 | 2681, 3505, 4596, 4598, 8684, 7033, 8333, | +3.03 |
| | | | | | 6707, 5820, 6360, 7180, | |
| ADAMTS9 | 8088560 | 267 | NM_182920 | 558 | 4100, 3333, 8622, 8439, 8457, 6636, 7795, | +3.01 |
| | | | | | 8233, 8784, | |
| ARL4D | 8007493 | 268 | NM_001661 | 559 | 3037, 3901, 5663, | +3.00 |
| PRDM1 | 8121257 | 269 | NM_182907 | 560 | 3253, 5303, 4361, 6228, 6168, 8184, 8624, | +2.96 |
| | | | | | 7700, | |
| HP | 7997188 | 270 | NM_005143 | 561 | 3893, 4016, 4018, 2580, 2622, 2977, 2992, | +2.96 |
| | | | | | 3453, 3617, 4365, 4366, 6921, 6310, 6000, | |
| | | | | | 6001, | |
| FZD5 | 8058498 | 271 | NM_003468 | 562 | 2934, 4015, 5838, | +2.95 |
| TRY6 | 8136807 | 272 | — | | | +2.94 |
| ATP6V0D2 | 8147145 | 273 | NM_152565 | 563 | 3548, 3146, 7959, 8150, 5593, | +2.93 |
| ANGPT2 | 8149071 | 274 | NM_001147 | 564 | 2696, 4344, 4345, 4346, 5744, 7577, | +2.92 |
| DENND2C | 7918768 | 275 | NM_198459 | 565 | 3586, 4103, 6796, 6943, 8236, 8046, 6164, | +2.88 |
| | | | | | 7594, | |
| BMP5 | 8127193 | 276 | NM_021073 | 566 | 2611, 3202, 5997, 7150, | +2.87 |
| FOXA2 | 8065344 | 277 | NM_021784 | 567 | 2770, 4577, 4466, 5823, 7393, 7364, 6571, | +2.83 |
| HAS2 | 8152617 | 278 | NM_005328 | 568 | 2676, 4348, 5843, 6409, | +2.80 |
| BMP2 | 8060850 | 279 | NM_001200 | 569 | 3900, 6567, | +2.79 |
| S100A16 | 7920291 | 280 | NM_080388 | 570 | 3782, 2999, 5985, 6066, 6285, 6298, 8082, | +2.79 |
| FOLH1B | 7942998 | 281 | NM_153696 | 571 | 3060, 2843, 3280, 5177, 2766, 5178, 6173, | +2.78 |
| | | | | | 5921, 6307, 5425, 6469, | |
| FAM122C | 8169995 | 282 | NM_001170779 | 572 | 4513, 4955, 4956, 4957, 4958, 4959, 4960, | +2.77 |
| | | | | | 4954, 6451, 7031, 8034, 6865, 6135, 8059, | |
| | | | | | 8191, 6912, 8587, 6236, | |
| FZD4 | 7950885 | 283 | NM_012193 | 573 | 2784, 5289, | +2.77 |
| C5 | 8163839 | 284 | NM_001735 | 574 | 3997, 3497, 8045, 5344, 6954, 6376, | +2.77 |
| S100A14 | 7920297 | 285 | NM_020672 | 575 | 2827, 2832, 8484, 5892, 5948, 6180, 7538, | +2.76 |
| | | | | | 6036, | |
| VEGFA | 8119898 | 286 | NM_001025366 | 576 | 3808, 4966, 4967, 4968, 4969, 4970, 4971, | +2.74 |
| | | | | | 4972, 4973, 4974, 4975, 4976, 4977, 4978, | |
| | | | | | 4979, 4980, 4981, 8712, 5968, 6175, 7640, | |
| | | | | | 5961, 5690, 7243, 8549, 6759, 6136, 7716, | |
| | | | | | 8136, 8355, 8159, 8018, 7079, 8270, 8120, | |
| | | | | | 7866, 8507, 8066, 7946, | |
| CLIP4 | 8041179 | 287 | NM_024692 | 577 | 4055, 4666, 6910, 6677, 7982, 7631, 5684, | +2.72 |
| | | | | | 7192, 6576, 6387, 7420, 8380, | |
| GPAM | 8165663 | 288 | AK172782 | 578 | 3609, | +2.70 |
| HNF1B | 8014591 | 289 | NM_000458 | 579 | 2989, 4226, 4915, 5347, 6709, 6537, | +2.69 |
| APOA1 | 7951865 | 290 | NM_000039 | 580 | 3902, 2762, 6306, 5375, 6654, 6990, | +2.68 |
| CFLAR | 8047381 | 291 | NM_003879 | 581 | 2698, 2700, 2701, 2702, 2703, 2697, 2727, | +2.67 |
| | | | | | 2728, 2729, 2714, 2715, 2716, 2717, 2718, | |
| | | | | | 3809, 3282, 4540, 4723, 2706, 2695, 2707, | |
| | | | | | 4275, 4518, 2881, 4319, 5254, 5255, 7718, | |
| | | | | | 7181, 7213, 6901, 7210, 7050, 6868, 7797, | |
| | | | | | 7093, 6246, 6301, 6416, 6026, 8088, 7173, | |
| | | | | | 6972, 6669, 7157, 7540, 7179, 6019, 5721, | |
| RBM24 | 8117045 | 292 | NM_153020 | 582 | 3092, 4733, 4735, 4734, 6592, 6373, 5606, | +2.66 |
| | | | | | 8008, 8572, 8110, | |
| RNF152 | 8023598 | 293 | NM_173557 | 583 | 3123, 3946, 5605, | +2.66 |
| TTR | 8020795 | 294 | NM_000371 | 584 | 2722, 4730, 6739, 5362, | +2.66 |
| TTN | 8057056 | 295 | NM_133378 | 585 | 3308, 2656, 3424, 4106, 4107, 3344, 3048, | +2.63 |
| | | | | | 5008, 5009, 5011, 5007, 5010, 7368, 5887, | |
| | | | | | 5945, 7339, 6830, 8194, 6950, 6315, 6321, | |
| | | | | | 6481, 7366, 6697, 6793, 7546, 6131, 5681, | |
| EGFLAM | 8105013 | 296 | NM_152403 | 586 | 3530, 5277, 5276, 5275, 6119, 5859, 8466, | +2.62 |
| | | | | | 5742, 6783, 8384, 6717, 7825, 8629, 8422, | |
| | | | | | 7942, 6265, | |
| APOB | 8050619 | 297 | NM_000384 | 587 | 2558, 3976, 5351, | +2.62 |
| DIO3 | 7976858 | 298 | NM_001362 | 588 | 2990, 4161, 8265, 6088, | +2.61 |
| IFLTD1 | 7961875 | 299 | NM_152590 | 589 | 4498, 4781, 4782, 4784, 4785, 4783, 5790, | +2.60 |
| | | | | | 7143, 6544, 6853, | |
| ABCC4 | 7972297 | 300 | NM_005845 | 590 | 3298, 4237, 4238, 6825, 6506, 6826, 6736, | +2.58 |
| | | | | | 7298, | |
| CCDC141 | 8057377 | 301 | NM_173648 | 591 | 3425, 5152, 5914, 5666, 7929, | +2.58 |
| ENC1 | 8112615 | 302 | NM_003633 | 592 | 2731, 4418, 7756, 5853, 8481, | +2.57 |
| NEK2 | 7924096 | 303 | NM_002497 | 593 | 3232, 5258, 5965, 7142, 6196, | +2.57 |
| ELMO1 | 8139057 | 304 | NM_014800 | 594 | 2968, 3692, 4045, 2861, 3438, 4258, 4520, | +2.56 |
| | | | | | 4479, 2801, 2880, 3542, 5280, 5279, 8359, | |
| | | | | | 7086, 5936, 6939, 6791, 6584, 7972, 7197, | |
| | | | | | 7051, 6279, 5770, 6974, 6770, 7488, 7401, | |
| | | | | | 7549, 6438, 7349, | |
| SPOCK3 | 8103544 | 305 | NM_016950 | 595 | 3468, 4487, 4491, 4493, 4496, 4500, 4505, | +2.54 |
| | | | | | 4506, 4522, 2959, 3354, 2879, 3351, 3951, | |
| | | | | | 3952, 7390, 8151, 7745, 8674, 7862, 8555, | |
| | | | | | 8291, 8542, 7775, 8670, 8212, 7911, 5944, | |
| | | | | | 8680, 8411, 8508, 6200, 8249, 7909, 8528, | |
| | | | | | 8673, 7951, 8415, 8750, 7722, | |
| SERPINI1 | 8083779 | 306 | NM_005025 | 596 | 4280, 4350, 4351, 7428, 8534, 7747, 5615, | +2.54 |
| | | | | | 7839, 7903, | |
| ACSL1 | 8103951 | 307 | NM_001995 | 597 | 2601, 4521, 2572, 4269, 4707, 4709, 3264, | +2.52 |
| | | | | | 3180, 3549, 8277, 8532, 8386, 8421, 8369, | |
| | | | | | 8009, 8062, 6545, 8440, 5566, 8524, 7826, | |
| | | | | | 7554, | |
| GATM | 7988414 | 308 | NM_001482 | 598 | 3346, 4123, 6982, | +2.52 |
| EHHADH | 8092523 | 309 | NM_001166415 | 599 | 3206, 4927, 4926, 5368, 8762, | +2.52 |
| NUDT4 | 7957536 | 310 | NM_199040 | 600 | 3968, 3967, | +2.50 |
| CST1 | 8065412 | 311 | NM_001898 | 601 | 3369, 3033, 5734, 6511, | +2.50 |
| GLUD2 | 8169711 | 312 | NM_012084 | 602 | 2899, 3400, 5864, | +2.47 |
| NPL | 7908003 | 313 | NM_030769 | 603 | 3446, 5244, 8301, 8566, 7329, 6079, 6297, | +2.47 |
| | | | | | 6185, 6208, 6540, 5453, 5873, 5974, 6575, | |
| ZNF702P | 8039025 | 314 | NR_003578 | 604 | 3075, 4190, 5550, | +2.45 |
| TRY6 | 8136801 | 315 | NM_002770 | 605 | 3326, 3327, 4043, 4044, 3896, 4082, 2633, | +2.45 |
| | | | | | 3056, 4031, 3057, 4349, 5199, 5294, 5200, | |
| | | | | | 4875, 7372, 5743, 6222, 8379, | |
| SPOCK1 | 8114287 | 316 | NM_004598 | 606 | 2804, 3903, 8553, 8505, 6817, 7957, 5469, | +2.41 |
| | | | | | 8014, 7754, | |
| AGL | 7903239 | 317 | NM_000028 | 607 | 2687, 4063, 4068, 4064, 4066, 4065, 4067, | +2.40 |
| | | | | | 6243, 5987, 6127, 5817, 5995, 5972, 8735, | |
| | | | | | 6008, | |
| TFF1 | 8070579 | 318 | NM_003225 | 608 | 2552, 3668, 5847, | +2.39 |
| DGKK | 8172670 | 319 | NM_001013742 | 609 | 3778, 5274, 6444, | +2.37 |
| SALL1 | 8001387 | 320 | NM_001127892 | 610 | 4497, 4411, 4078, 6646, 5432, 7163, | +2.36 |
| MANEA | 8121144 | 321 | NM_024641 | 611 | 4179, 5290, 6156, 5952, 8006, | +2.35 |
| KIT | 8095110 | 322 | NM_000222 | 612 | 3646, 4153, 4152, 5648, 8162, | +2.35 |
| KRT19 | 8015349 | 323 | NM_002276 | 613 | 3524, 4126, 7422, 8625, 5885, 6794, 6946, | +2.35 |
| TNNC1 | 8087925 | 324 | NM_003280 | 614 | 3054, 4613, 5365, 7708, | +2.35 |
| SEPP1 | 8111915 | 325 | NM_001093726 | 615 | 3112, 3121, 2969, 3211, 3248, 3487, 4155, | +2.33 |
| | | | | | 4154, 3820, 8621, 7799, 8519, 8258, 7809, | |
| | | | | | 8140, 7833, 8546, 8284, 8435, 8309, 7973, | |
| | | | | | 7743, 7917, 8097, | |
| ST8SIA4 | 8113358 | 326 | NM_005668 | 616 | 3302, 4599, 3244, 7055, 7738, 5386, | +2.32 |
| YPEL2 | 8008819 | 327 | NM_001005404 | 617 | 3716, 3768, 5719, | +2.32 |
| ANKMY2 | 8138370 | 328 | NM_020319 | 618 | 3159, 5132, 7035, 7445, 7172, 5729, | +2.31 |
| DNAJC15 | 7968872 | 329 | NM_013238 | 619 | 3842, 3846, 7013, 8073, | +2.31 |
| RNF128 | 8169174 | 330 | NM_024539 | 620 | 3527, 3478, 3479, 5441, 5712, 6719, | +2.31 |
| PTPN13 | 8096176 | 331 | NM_006264 | 621 | 2621, 4579, 4580, 4581, 4582, 6886, 7770, | +2.31 |
| | | | | | 7790, 7383, 8720, 7840, 6014, 5863, 7589, | |
| F10 | 7970241 | 332 | NM_000504 | 622 | 2567, 2573, 3210, 3246, 4308, 4309, 3935, | +2.30 |
| | | | | | 7894, 6670, 7728, 6624, 7953, 7352, 6493, | |
| SAMD3 | 8129482 | 333 | NM_001017373 | 623 | 3098, 4120, 4122, 7473, 7107, 6192, 5825, | +2.30 |
| | | | | | 7041, 6688, | |
| GCNT1 | 8155930 | 334 | NM_001490 | 624 | 2578, 4156, 4157, 4158, 4159, 4160, 8460, | +2.29 |
| | | | | | 6349, 8001, 7226, 6641, | |
| IPP | 7915775 | 335 | NM_016486 | 625 | 2772, 4084, 4775, 4774, 7978, 7647, 6202, | +2.28 |
| | | | | | 6163, | |
| PROS1 | 8089015 | 336 | NM_000313 | 626 | 2597, 4770, 6690, 8232, | +2.27 |
| SV2B | 7986195 | 337 | NM_001167580 | 627 | 3448, 4936, 4935, 5668, 6488, | +2.26 |
| PLOD2 | 8091283 | 338 | NM_182943 | 628 | 3144, 3823, 3824, 7950, 7025, 6032, 8398, | +2.24 |
| | | | | | 5670, 7845, | |
| MAGEH1 | 8167887 | 339 | NM_014061 | 629 | 2950, 3007, 6141, | +2.24 |
| CHST9 | 8022666 | 340 | NM_031422 | 630 | 3460, 4937, 5865, | +2.23 |
| ZNF518B | 8099364 | 341 | NM_053042 | 631 | 3218, 3781, 5718, 8226, 8286, 7880, 7968, | +2.23 |
| TMEM106C | 7955063 | 342 | NM_024056 | 632 | 3447, 4690, 4693, 4691, 4692, 5419, 6591, | +2.22 |
| | | | | | 7332, | |
| SERHL2 | 8073596 | 343 | NM_014509 | 633 | 3645, 4046, 4023, 4076, 4075, 4492, 4499, | +2.20 |
| | | | | | 3203, 7885, 6148, 6161, 6501, 7434, 5747, | |
| | | | | | 5575, | |
| NTN4 | 7965573 | 344 | NM_021229 | 634 | 2846, 3957, 6056, 5886, | +2.20 |
| SOX17 | 8146462 | 345 | NM_022454 | 635 | 3009, 4141, 5778, | +2.20 |
| FRRS1 | 7917954 | 346 | NM_001013660 | 636 | 3386, 4150, 5573, 8650, 7934, 6212, 6764, | +2.20 |
| OTX2 | 7979357 | 347 | NM_021728 | 637 | 3073, 3223, 3224, 6604, 6242, | +2.19 |
| RNASEL | 7922707 | 348 | NM_021133 | 638 | 3790, 5239, 6286, 6523, | +2.19 |
| ELMOD2 | 8097529 | 349 | NM_153702 | 639 | 3416, 5196, 8425, 7800, 5802, 8102, 8387, | +2.18 |
| | | | | | 8257, 8391, | |
| MYCT1 | 8122860 | 350 | NM_025107 | 640 | 3129, 4215, 6145, | +2.17 |
| PAX6 | 7947338 | 351 | NM_000280 | 641 | 3805, 4400, 4401, 4402, 6733, 7304, 6876, | +2.16 |
| | | | | | 7135, 7188, 7299, 6953, 7333, 7281, 8690, | |
| | | | | | 7478, 7234, 8432, 7017, 6745, 7558, 5383, | |
| MGST2 | 8097513 | 352 | NM_002413 | 642 | 3025, 5261, 8016, 7820, 8094, 5528, 8127, | +2.15 |
| BBS5 | 8046147 | 353 | NM_152384 | 643 | 3608, 3739, 8230, 6450, 7499, 7824, 5869, | +2.14 |
| | | | | | 6872, | |
| MTSS1 | 8152764 | 354 | NM_014751 | 644 | 2790, 4171, 7149, 7038, 8535, 8296, 7813, | +2.13 |
| | | | | | 8241, 8289, 8581, 5899, | |
| VTN | 8013606 | 355 | NM_000638 | 645 | 2897, 3932, 5348, | +2.13 |
| WBP5 | 8169022 | 356 | NM_001006613 | 646 | 3375, 3752, 3755, 3753, 3751, 6158, 6146, | +2.12 |
| DUB4 | 8094134 | 357 | AY533200 | 647 | 3572, 3865, 4780, 7780, 7776, 8514, 8351, | +2.12 |
| CCDC92 | 7967486 | 358 | NM_025140 | 648 | 3339, 2893, 5390, | +2.12 |
| BTG2 | 7908917 | 359 | NM_006763 | 649 | 2680, 3257, 8005, 5749, | +2.12 |
| LPGAT1 | 7924107 | 360 | NM_014873 | 650 | 3152, 4614, 7821, 6002, 6174, | +2.11 |
| FN1 | 8058765 | 361 | NM_054034 | 651 | 3732, 3409, 3983, 4677, 4679, 3284, 3310, | +2.11 |
| | | | | | 3403, 3404, 3405, 3406, 4727, 3110, 4551, | |
| | | | | | 4571, 4572, 4576, 3822, 3494, 2852, 3620, | |
| | | | | | 3621, 3622, 3623, 3624, 3625, 5996, 7280, | |
| | | | | | 7649, 6915, 8364, 8529, 6768, 7398, 5846, | |
| | | | | | 6424, 8736, 8430, 7036, 5993, 8153, 8487, | |
| | | | | | 6324, 6771, 6223, 6205, 5539, 6620, 6121, | |
| | | | | | 6206, 8147, 5687, | |
| TBX3 | 7966690 | 362 | NM_016569 | 652 | 3024, 3627, 3626, 6215, 5414, 6072, | +2.11 |
| PLCE1 | 7929388 | 363 | NM_016341 | 653 | 4217, 4071, 4918, 6138, 5440, 6045, 6266, | +2.11 |
| KRT19P2 | 7957608 | 364 | NM_002276 | 654 | 4928, 4126, 5201, 5885, 6917, | +2.10 |
| IFI16 | 7906400 | 365 | NM_005531 | 655 | 3138, 2735, 2792, 2582, 3114, 4519, 2986, | +2.10 |
| | | | | | 4028, 5903, 7297, 7065, 5990, 6176, 8454, | |
| | | | | | 7984, 8195, 7186, 7588, 5913, 5739, | |
| PORCN | 8167287 | 366 | NM_203473 | 656 | 2854, 2855, 2856, 2857, 4728, 2616, 4468, | +2.09 |
| | | | | | 2979, 2983, 3366, 3574, 3575, 3573, 3576, | |
| | | | | | 5975, 8479, 5883, 6961, 5689, 8317, 8547, | |
| | | | | | 6074, 7887, 5982, 7832, 6053, 6535, | |
| PRSS1 | 8136795 | 367 | NM_002769 | 657 | 4044, 4083, 5224, 7372, 8647, 5627, 7412, | +2.09 |
| | | | | | 7969, | |
| MYL7 | 8139307 | 368 | NM_021223 | 658 | 3043, 3698, 7148, 5334, 7843, 7318, 7526, | +2.08 |
| DUSP4 | 8150076 | 369 | NM_001394 | 659 | 2649, 5265, 5266, 5393, | +2.06 |
| PROS1 | 8089011 | 370 | NM_000313 | 660 | 2597, 4770, 6690, | +2.06 |
| ANKRD20B | 8020349 | 371 | ENST00000400842 | 661 | 0 | +2.05 |
| CTSL2 | 8162652 | 372 | NM_001333 | 662 | 3462, 5253, 8071, 5450, | +2.05 |
| FMO5 | 7919314 | 373 | NM_001461 | 663 | 3169, 4740, 4742, 4741, 5452, 5926, 6568, | +2.05 |
| | | | | | 7792, 6924, | |
| USP27X | 8167601 | 374 | NM_001145073 | 664 | 4754, | +2.04 |
| LAMA1 | 8022176 | 375 | NM_005559 | 665 | 4685, 5278, 8564, 7980, 8761, 6083, | +2.04 |
| | | | | | 7657, | |
| ADAM28 | 8145293 | 376 | NM_014265 | 666 | 4384, 3969, 3970, 7848, 8743, 8310, 7519, | +2.03 |
| | | | | | 7029, 7897, 7794, 7884, 5486, 8614, | |
| ZNF611 | 8038981 | 377 | NM_030972 | 667 | 3136, 4861, 4862, 4863, 4864, 5722, | +2.03 |
| ANKRD20B | 7970381 | 378 | AK057820 | 668 | 2984, 4169, 6891, 6432, 6336, 7704, 6356, | +2.02 |
| | | | | | 7272, 7347, | |
| ZNF137 | 8030954 | 379 | U09414 | 669 | 2628, 4364, | +2.02 |
| S100Z | 8106411 | 380 | NM_130772 | 670 | 3017, 4191, 8752, 5748, | +2.01 |
| GPSM2 | 7903565 | 381 | NM_013296 | 671 | 3143, 4876, 3650, 2672, 4515, 3370, 4289, | +2.01 |
| | | | | | 7669, 5503, 6737, 6476, 6581, 7296, 6065, | |
| | | | | | 7166, 5954, 5917, 5991, | |
| TGFB2 | 7909789 | 382 | NM_003238 | 672 | 2610, 5188, 5189, 7936, 5882, 8554, 5876, | +2.00 |
| ARHGAP28 | 8019964 | 383 | NM_001010000 | 673 | 2803, 5198, 5415, 6442, 5664, 6551, 7534, | +2.00 |
| | | | | | 7585, | |

Table 3. Provided are the description of the non-membranal genes along with the sequence identifiers of the Affymetrix probes, the target sequence identified by the Affymetrix probe, and the mRNA sequences represented by the target sequences. Also shown are the log 2 fold change in expression levels of the indicated genes between the SOX17 GFP cells and the genetically unmodified HESCs. The (+) or (−) sign means that the genes are upregulated or downregulated, respectively, in the SOX17-GFP cells as compared to the genetically unmodified HESCs.

TABLE 4
Non-membranal genes which are down-regulated in SOX17+ cells as compared to genetically un-modified ESCs

| | | Affy. target | | SEQ ID NO: | | Log 2 fold |
|---|---|---|---|---|---|---|
| Gene | Probe | nucl. SEQ | Rep. | (Of Rep. | Polyn. SEQ ID NOs: | change |
| Symbol | Set ID | ID NO: | Public ID | Public ID) | rep. by target | [SOX17-HESC] |
| ZFP42 | 8098690 | 384 | NM_174900 | 674 | 3498, 3937, 5793, 8300, | −5.87 |
| THUMPD3 | 8077513 | 385 | NM_015453 | 675 | 2882, 2944, 4333, 4334, 6458, 6573, 7246, 8510, | −4.50 |
| | | | | | 6238, 6855, 6555, 8394, 7095, 6527, | |
| ANXA1 | 8155849 | 386 | NM_000700 | 676 | 3181, 2757, 6327, 5394, 7974, 6460, 7578, 7227, | −4.42 |
| | | | | | 8129, 8580, | |
| SPP1 | 8096301 | 387 | NM_001040058 | 677 | 4706, 3942, 3501, 3944, 8278, 7992, 5370, 6716, | −4.21 |
| | | | | | 8452, 8651, 6109, 6075, 7831, 7801, | |
| PRDM14 | 8151240 | 388 | NM_024504 | 678 | 2858, 3552, 5534, | −4.18 |
| GNA14 | 8161892 | 389 | NM_004297 | 679 | 2753, 4750, 6030, 7575, | −4.16 |
| EDIL3 | 8112980 | 390 | NM_005711 | 680 | 2720, 3295, 8700, 8201, 7504, 5630, | −4.05 |
| CXCL12 | 7933194 | 391 | NM_199168 | 681 | 2665, 5012, 5013, 5117, 5003, 6588, 8491, 7914, | −3.84 |
| | | | | | 6051, 6656, 6859, | |
| PSMD5 | 8163795 | 392 | NM_005047 | 682 | 4517, 4254, 2800, 2963, 3212, 8729, 8252, 5958, | −3.78 |
| | | | | | 6078, 8378, 5320, 5967, | |
| PRRX1 | 7907222 | 393 | NM_022716 | 683 | 4004, 3771, 3772, 5361, 6117, 8431, 7764, 8243, | −3.77 |
| | | | | | 8582, | |
| NANOG | 7953675 | 394 | NM_024865 | 684 | 3571, 3299, 4206, 5371, | −3.72 |
| TRIM22 | 7938035 | 395 | NM_006074 | 685 | 2821, 2822, 2823, 4283, 4533, 4544, 4481, 3016, | −3.56 |
| | | | | | 3162, 4213, 4312, 4320, 4326, 5229, 7088, 6634, | |
| | | | | | 6762, 8083, 6459, 8567, 6533, 6911, 6474, 7269, | |
| | | | | | 7353, | |
| NANOG | 7987365 | 396 | NM_024865 | 686 | 3571, 3299, 4206, 5371, | −3.53 |
| RASGRF2 | 8106660 | 397 | NM_006909 | 687 | 4058, 5302, 8643, 5518, 8502, 8537, 8352, | −3.52 |
| POU5F1B | 8148315 | 398 | NM_001159542 | 688 | 5084, 4815, 6578, 6639, | −3.50 |
| POLR3G | 8106820 | 399 | NM_006467 | 689 | 4507, 4049, 6583, 8418, | −3.44 |
| HHLA1 | 8152938 | 400 | NM_001145095 | 690 | 2750, 4755, 7527, 8041, | −3.36 |
| POU5F1 | 8124889 | 401 | NM_203289 | 691 | 2865, 2866, 2867, 2868, 3988, 3986, 4587, 5026, | −3.36 |
| | | | | | 5027, 5028, 5029, 5030, 5031, 5032, 5033, 5034, | |
| | | | | | 5035, 5036, 5037, 5038, 5039, 5040, 5041, 5042, | |
| | | | | | 5043, 5044, 5045, 5046, 5047, 5048, 5049, 5050, | |
| | | | | | 5051, 5052, 5053, 5054, 5055, 5056, 5057, 5058, | |
| | | | | | 5059, 5060, 5061, 5062, 5063, 5064, 5065, 5066, | |
| | | | | | 5067, 5068, 5069, 5070, 5071, 5072, 5073, 5074, | |
| | | | | | 5075, 5076, 5077, 5078, 5079, 5080, 5081, 5082, | |
| | | | | | 5083, 5084, 5085, 5086, 5087, 5088, 5089, 5090, | |
| | | | | | 5091, 5092, 5093, 5094, 5095, 5096, 5097, 5098, | |
| | | | | | 5099, 5100, 5101, 5102, 5103, 5104, 4227, 4228, | |
| | | | | | 4229, 4230, 4231, 3958, 3959, 4369, 5016, 5017, | |
| | | | | | 4052, 5175, 5179, 8740, 7043, 6463, 8204, 6434, | |
| | | | | | 6854, 6431, 8068, 6882, 7219, 7760, 8266, 8247, | |
| | | | | | 6495, 7073, 7834, 7275, 7155, 8483, 6801, 7986, | |
| | | | | | 6354, 8509, 6963, 7415, 7877, 6325, 7358, 5405, | |
| | | | | | 7117, 6852, 8575, 6970, 7641, 7552, | |
| VSNL1 | 8040430 | 402 | NM_003385 | 692 | 3384, 3838, 6777, 6629, 8659, 5837, 6389, 6436, | −3.33 |
| SCG3 | 7983718 | 403 | NM_001165257 | 693 | 3014, 4909, 4908, 5333, | −3.33 |
| B3GALT1 | 8046078 | 404 | NM_020981 | 694 | 2763, 5191, 6587, 5756, | −3.28 |
| LECT1 | 7971838 | 405 | NM_007015 | 695 | 3028, 3784, 3785, 7153, 6673, | −3.25 |
| NTS | 7957458 | 406 | NM_006183 | 696 | 2948, 5242, 5429, | −3.19 |
| MBNL1 | 8083429 | 407 | NM_021038 | 697 | 3270, 3597, 3598, 3599, 3600, 3601, 3602, 3603, | −3.18 |
| | | | | | 6944, 7767, 5777, 8388, 7338, 5574, 7958, 5685, | |
| | | | | | 5890, 6259, 8038, 5830, | |
| CKMT1A | 7983239 | 408 | NM_020990 | 698 | 4017, 4725, 3845, 3844, 5618, 8459, 7658, 6700, | −3.18 |
| | | | | | 6805, 7001, 6390, 7746, 7418, 6964, 8012, 7084, | |
| | | | | | 7264, 7777, 8717, 7315, 6930, 7503, 6473, 7092, | |
| | | | | | 7417, 7902, 7582, | |
| NECAB1 | 8147244 | 409 | NM_022351 | 699 | 3290, 4737, 6800, 7785, 7823, 8669, 7989, 8696, | −3.14 |
| FGF2 | 8097256 | 410 | NM_198041 | 700 | 2576, 5304, 4197, 5305, 5478, 5980, 5822, | −3.12 |
| SFRP2 | 8103254 | 411 | NM_003013 | 701 | 2933, 3724, 5471, | −3.07 |
| DCLK1 | 7970954 | 412 | NM_004734 | 702 | 4221, 5192, 5193, 5194, 5195, 5448, 7317, 6024, | −3.07 |
| | | | | | 6492, 7076, | |
| DACT1 | 7974689 | 413 | NM_016651 | 703 | 2815, 4080, 4079, | −3.06 |
| CRABP1 | 7985159 | 414 | NM_004378 | 704 | 3015, 4439, 5645, | −3.02 |
| TFAP2C | 8063536 | 415 | NM_003222 | 705 | 3168, 3531, 5324, | −3.01 |
| SCGB3A2 | 8108995 | 416 | NM_054023 | 706 | 3022, 4995, 8754, 8215, 5614, | −2.89 |
| LRAT | 8097920 | 417 | NM_004744 | 707 | 3566, 3595, 8748, 8069, 7763, 8070, 5620, | −2.88 |
| CUZD1 | 7936798 | 418 | NM_022034 | 708 | 3275, 5260, 6276, 6229, 6120, 6165, 6557, 6134, | −2.86 |
| GLB1L3 | 7945296 | 419 | NM_001080407 | 709 | 3430, 4288, 6702, 8356, 8044, 7094, 7185, 6706, | −2.86 |
| METTL7A | 7955441 | 420 | NM_014033 | 710 | 3523, 3936, 5745, 6365, | −2.85 |
| VAT1L | 7997336 | 421 | NM_020927 | 711 | 3166, 3189, 5813, | −2.81 |
| COL12A1 | 8127563 | 422 | NM_080645 | 712 | 4761, 3954, 3953, 5758, 6009, 7798, 8346, 8170, | −2.80 |
| | | | | | 5484, 6823, | |
| OLFML3 | 7904158 | 423 | NM_020190 | 713 | 3467, 3697, 6147, 5677, 8035, 6986, | −2.78 |
| SOX2 | 8084165 | 424 | NM_003106 | 714 | 3338, 5264, 5632, | −2.76 |
| USP44 | 7965565 | 425 | NM_032147 | 715 | 3062, 3978, 3979, 6775, 5436, | −2.72 |
| HIST1H4F | 8117422 | 426 | NM_003540 | 716 | 3825, 3059, 7626, | −2.70 |
| KGFLP1 | 8067839 | 427 | NM_002009 | 717 | 3477, 2587, 4695, 4203, 5525, 7263, | −2.69 |
| CPT1A | 7949971 | 428 | NM_001876 | 718 | 2870, 4398, 4399, 7075, 5473, | −2.69 |
| DBC1 | 8163716 | 429 | NM_014618 | 719 | 2726, 4469, 4474, 3012, 3546, 3649, 4164, 6292, | −2.64 |
| | | | | | 6191, 5480, | |
| CHAC1 | 7982868 | 430 | NM_024111 | 720 | 3003, 4671, 4672, 7389, 6822, 8727, | −2.63 |
| CAV1 | 8135594 | 431 | NM_001753 | 721 | 4248, 4999, 5000, 5001, 5002, 6085, 6753, 8406, | −2.63 |
| MT1G | 8001531 | 432 | NM_005950 | 722 | 3006, 2840, 6392, 7114, 7170, 6815, | −2.63 |
| NFIX | 8026139 | 433 | NM_002501 | 723 | 4021, 4022, 3743, 3307, 2629, 2644, 2645, 4501, | −2.62 |
| | | | | | 4543, 4907, 3764, 5981, 6837, 5556, 6879, 5925, | |
| FERMT1 | 8064904 | 434 | NM_017671 | 724 | 3567, 4061, 7556, 7678, 8349, 5970, 5336, | −2.59 |
| GLIPR1 | 7957260 | 435 | NM_007043 | 725 | 2953, 3451, 4074, 4007, 6328, 5493, 5382, | −2.59 |
| TOX | 8150962 | 436 | NM_014729 | 726 | 2740, 3709, 6856, 6017, | −2.58 |
| SNRPN // | 7981960 | 437 | NR_003321 | 727 | 4118, | −2.57 |
| SNORD116-6 | | | | | | |
| HEY2 | 8121850 | 438 | NM_012259 | 728 | 4276, 3975, 5989, 6023, | −2.57 |
| TIMP4 | 8085360 | 439 | NM_003256 | 729 | 2945, 5251, 5824, | −2.56 |
| IDO1 | 8146092 | 440 | NM_002164 | 730 | 2584, 5259, 5421, 8523, 8757, 8169, 8149, 8114, | −2.53 |
| | | | | | 8319, 7915, 8778, | |
| MT2A | 7995783 | 441 | NM_005953 | 731 | 2919, 4617, 5366, | −2.52 |
| NR5A2 | 7908597 | 442 | NM_003822 | 732 | 2737, 3582, 3583, 6058, 5356, 8618, 7477, 6293, | −2.52 |
| | | | | | 5367, | |
| UPRT | 8168438 | 443 | NM_145052 | 733 | 3674, 4272, 2966, 4297, 4940, 4941, 7089, 8335, | −2.50 |
| | | | | | 6323, 6105, 6157, | |
| MYC | 8148317 | 444 | NM_002467 | 734 | 2869, 4851, 6776, 7274, | −2.48 |
| CCDC109B | 8096808 | 445 | NM_032992 | 735 | 3120, 3873, 3874, 4445, 8500, 7859, 7100, 6201, | −2.48 |
| GAL | 7942064 | 446 | NM_015973 | 736 | 3055, 3933, 5477, | −2.47 |
| ZNF483 | 8157193 | 447 | NM_133464 | 737 | 4219, 4428, 4429, 7118, 6162, 5698, | −2.45 |
| RND3 | 8055688 | 448 | NM_005168 | 738 | 3040, 3678, 3679, 3283, 3713, 4557, 4566, 2954, | −2.45 |
| | | | | | 4291, 4318, 4304, 3770, 7689, 7080, 7920, 6797, | |
| | | | | | 7108, 7603, 8181, 5569, 8123, | |
| BNC2 | 8160260 | 449 | NM_017637 | 739 | 3551, 4555, 3100, 4545, 4032, 4033, 4034, 4035, | −2.45 |
| | | | | | 4036, 4037, 2799, 3963, 6528, 6375, 7529, 7058, | |
| | | | | | 6914, 7266, 7235, 7564, 8608, 7382, 8765, | |
| COL3A1 | 8046922 | 450 | NM_000090 | 740 | 3042, 4000, 7681, 5702, 7724, 5577, | −2.42 |
| LUM | 7965403 | 451 | NM_002345 | 741 | 2920, 3798, 5519, | −2.42 |
| LDB2 | 8099524 | 452 | NM_001290 | 742 | 2733, 4590, 4591, 8679, 8166, 7837, 8661, 8298, | −2.41 |
| | | | | | 5669, 8605, 7719, 7814, 8032, 8473, 7455, 8734, | |
| MT1E | 7995797 | 453 | NM_175617 | 743 | 3381, 3905, 5861, 5789, | −2.40 |
| SNRPN // | 7981994 | 454 | NR_003337 | 744 | 4131, | −2.37 |
| SNORD116-23 | | | | | | |
| SNRPN // | 7982002 | 455 | NR_003341 | 745 | 4127, | −2.37 |
| SNORD116-27 | | | | | | |
| GALNT3 | 8056408 | 456 | NM_004482 | 746 | 3996, 3990, 3410, 3332, 4301, 4196, 6671, 7016, | −2.36 |
| | | | | | 6517, 7277, 7565, 6510, 6479, 6804, 6507, | |
| PIPOX | 8006005 | 457 | NM_016518 | 747 | 3342, 3789, 7690, 7748, 5638, 6426, 6464, | −2.35 |
| PDK1 | 8046408 | 458 | NM_002610 | 748 | 3198, 3485, 7350, 7468, 6847, 5563, 6903, | −2.34 |
| PREX2 | 8146794 | 459 | NM_024870 | 749 | 3640, 3643, 3644, 6885, 8788, 6153, 5651, | −2.33 |
| CYP2S1 | 8028991 | 460 | NM_030622 | 750 | 3461, 3715, 5647, 5708, | −2.33 |
| NRK | 8169115 | 461 | NM_198465 | 751 | 3311, 4081, 5354, | −2.33 |
| VAV3 | 7918157 | 462 | NM_006113 | 752 | 2741, 4095, 4094, 8118, 7879, 6112, 7502, 5897, | −2.32 |
| | | | | | 6080, 6942, | |
| TNFAIP6 | 8045688 | 463 | NM_007115 | 753 | 3052, 5234, 5352, 6810, | −2.29 |
| ENPP1 | 8122099 | 464 | NM_006208 | 754 | 3492, 4353, 5924, 6245, 8263, 8565, 7205, | −2.27 |
| ADD2 | 8052882 | 465 | NM_001617 | 755 | 3312, 2549, 4252, 4541, 3221, 3555, 5136, 5137, | −2.26 |
| | | | | | 5138, 5139, 5140, 7591, 8079, 5513, 5527, 8334, | |
| | | | | | 8155, 6282, 7652, 6883, 7881, 7694, 6520, 6309, | |
| | | | | | 7614, 7098, | |
| SNRPN // | 7981996 | 466 | NR_003338 | 756 | 4129, | −2.25 |
| SNORD116-24 | | | | | | |
| SNRPN // | 7981947 | 467 | NR_001289 | 757 | 3262, 3274, | −2.25 |
| SNORD109A | | | | | | |
| STC2 | 8115851 | 468 | NM_003714 | 758 | 3356, 3794, 8437, 5481, | −2.22 |
| SNORA22 | 8133106 | 469 | NR_002961 | 759 | 3945, | −2.22 |
| MPPED2 | 7947274 | 470 | NM_001584 | 760 | 2671, 4776, 4777, 6358, 6060, | −2.21 |
| ZNF562 | 8033801 | 471 | NM_001130031 | 761 | 4039, 4450, 4451, 4452, 6833, 5584, 6691, | −2.20 |
| GAP43 | 8081810 | 472 | NM_002045 | 762 | 2575, 4459, 4460, 5773, | −2.20 |
| FOXB1 | 7984011 | 473 | NM_012182 | 763 | 4249, 3974, 6779, | −2.19 |
| TSHZ3 | 8035896 | 474 | NM_020856 | 764 | 4257, 4125, 5381, | −2.18 |
| HPGD | 8103769 | 475 | NM_000860 | 765 | 2662, 2663, 2690, 4708, 4570, 4471, 4475, 3508, | −2.17 |
| | | | | | 3534, 4794, 4795, 4796, 7891, 7937, 8399, 8639, | |
| | | | | | 8591, 5581, 7846, 5659, 8577, 7975, 6419, 7812, | |
| ZDHHC22 | 7980344 | 476 | NM_174976 | 766 | 4047, 4139, 5735, | −2.17 |
| ACOXL | 8044353 | 477 | NM_001142807 | 767 | 4470, 4673, 6005, 7357, 6866, 6663, 6681, | −2.17 |
| GLI3 | 8139212 | 478 | NM_000168 | 768 | 3991, 3982, 2577, 4553, 3392, 4592, 6480, 7171, | −2.16 |
| | | | | | 6577, 6439, 8751, 6708, | |
| CDCA7L | 8138489 | 479 | NM_018719 | 769 | 3585, 4801, 4802, 4803, 7510, 6116, 7011, 6541, | −2.14 |
| | | | | | 6183, 8558, | |
| ZSCAN10 | 7998921 | 480 | NM_032805 | 770 | 3149, 2932, 5400, | −2.13 |
| GFPT2 | 8116418 | 481 | NM_005110 | 771 | 2751, 4135, 8471, 5407, 8222, 8775, 7999, | −2.13 |
| PLP2 | 8167449 | 482 | NM_002668 | 772 | 2555, 4965, 7651, 6875, 7509, | −2.13 |
| HIST1H1A | 8124380 | 483 | NM_005325 | 773 | 3881, 4053, 5377, | −2.12 |
| CAMKV | 8087530 | 484 | NM_024046 | 774 | 3407, 4516, 4542, 4547, 4568, 3355, 2883, 3337, | −2.12 |
| | | | | | 3368, 3000, 3165, 3910, 8007, 8299, 6547, 8504, | |
| | | | | | 8573, 8756, 8739, 7861, 8075, 7731, 6769, 7182, | |
| | | | | | 8603, 8099, 7254, 5602, | |
| HERC5 | 8096361 | 485 | NM_016323 | 775 | 3489, 4008, 8649, 5458, 8138, 8244, | −2.12 |
| MT1X | 7995838 | 486 | NM_005952 | 776 | 3371, 4455, 6391, | −2.12 |
| TERF1 | 8102789 | 487 | NM_003218 | 111 | 2691, 4416, 4417, 6010, 5544, 5494, | −2.12 |
| RAB31 | 8020110 | 488 | NM_006868 | 778 | 2829, 4352, 5595, 6339, | −2.12 |
| SNRPN // | 7981974 | 489 | NR_003328 | 779 | 4128, | −2.10 |
| SNORD116-13 | | | | | | |
| ETV1 | 8138289 | 490 | NM_004956 | 780 | 3858, 3887, 3888, 4724, 2640, 2658, 4696, 4698, | −2.10 |
| | | | | | 4701, 4715, 3245, 4328, 4314, 4877, 4878, 4879, | |
| | | | | | 4880, 4881, 4882, 4883, 6616, 7632, 7308, 7476, | |
| | | | | | 7190, 7710, 7373, 7697, 7749, 8199, 6672, 6566, | |
| | | | | | 5364, 6410, 7966, 7584, 8722, 7292, 7655, 6209, | |
| | | | | | 7888, 8053, 8570, 6394, | |
| MT1G | 8162531 | 491 | ENST00000396160 | 781 | 7570, | −2.10 |
| ACTA1 | 7924910 | 492 | NM_001100 | 782 | 3288, 3669, 3677, 4719, 2955, 3612, 5805, 6231, | −2.10 |
| | | | | | 5889, 6187, 6159, | |
| SNRPN // | 7981988 | 493 | AF241255 | 783 | 2839, 4130, | −2.10 |
| SNORD116-20 | | | | | | |
| NFIB | 8160138 | 494 | NM_005596 | 784 | 3285, 2688, 2685, 4244, 4562, 2874, 3417, 5146, | −2.09 |
| | | | | | 5145, 5147, 7613, 7638, 6784, 7684, 7327, 6514, | |
| | | | | | 7007, 8444, 7463, | |
| ZEB2 | 8055624 | 495 | NM_014795 | 785 | 3737, 3738, 4072, 4073, 4702, 2907, 3889, 3164, | −2.08 |
| | | | | | 3616, 3504, 4311, 4982, 4983, 4984, 7620, 7739, | |
| | | | | | 7312, 6428, 7804, 5578, 7411, 7695, 7432, 6411, | |
| | | | | | 6906, 7751, 8052, 7712, 6862, 6562, 7983, 7245, | |
| | | | | | 7643, 6372, 7130, 7002, 6978, 7523, | |
| CBR1 | 8068401 | 496 | NM_001757 | 786 | 3890, 3754, 7622, 5848, | −2.08 |
| ATXN7L1 | 8142087 | 497 | NM_138495 | 787 | 4574, 4661, 4286, 7346, 7677, 7827, | −2.07 |
| SNRPN // | 7981949 | 498 | NR_003316 | 788 | 4117, | −2.06 |
| SNORD116-1 | | | | | | |
| MT1F | 7995825 | 499 | NM_005949 | 789 | 3051, 4447, 5801, 6580, | −2.06 |
| SNRPN // | 7982006 | 500 | NR_003360 | 790 | 4121, | −2.06 |
| SNORD116-29 | | | | | | |
| AP1M2 | 8034084 | 501 | NM_005498 | 791 | 2896, 4739, 5398, | −2.05 |
| ACTG2 | 8042788 | 502 | NM_001615 | 792 | 2956, 3832, 6377, 7341, 6703, 6599, 7930, 5891, | −2.05 |
| CYP2B6 | 8028963 | 503 | NM_000767 | 793 | 2569, 3046, 5598, 5779, | −2.05 |
| SERPINE1 | 8135069 | 504 | NM_000602 | 794 | 2947, 4910, 4911, 5338, | −2.03 |
| GRHL2 | 8147697 | 505 | NM_024915 | 795 | 4098, 4097, 4270, 4529, 3637, 3606, 3638, 4299, | −2.03 |
| | | | | | 4354, 5422, 7907, 7656, 8209, 8281, 7516, | |
| SLIT2 | 8094301 | 506 | NM_004787 | 796 | 2748, 2765, 3985, 4678, 3436, 2744, 2767, 8366, | −2.03 |
| | | | | | 7786, 6676, 7740, 5522, 8033, 7772, 7956, 8641, | |
| | | | | | 8725, | |
| PIM2 | 8172471 | 507 | NM_006875 | 797 | 2994, 4637, 7671, 8024, 6884, | −2.02 |
| SMARCA2 | 8154059 | 508 | NM_139045 | 798 | 2631, 2619, 3109, 4525, 4559, 4564, 4569, 3205, | −2.02 |
| | | | | | 4322, 3654, 3655, 7236, 8645, 6437, 7334, 7214, | |
| | | | | | 5617, 7026, 6958, 5795, 5880, 7544, 7653, 6932, | |
| | | | | | 6870, 6536, 7608, 5988, 7032, | |
| RPPH1 | 7977507 | 509 | NR_002312 | 799 | 3839, | −2.01 |

Table 4. Provided are the description of the non-membranal genes along with the sequence identifiers of the Affymetrix probes, the target sequence identified by the Affymetrix probe, and the mRNA sequences represented by the target sequences. Also shown are the log 2 fold change in expression levels of the indicated genes between the SOX17 GFP cells and the genetically unmodified HESCs. The (+) or (−) sign means that the genes are upregulated or downregulated, respectively, in the SOX17-GFP cells as compared to the genetically unmodified HESCs.

### Example 2

### Generation of a Pdx1-Gfp Bac Construct and Isolation of PDX1-Expressing Escs

[0346] Experimental Results

[0347] BAC Transgenesis of PDX1-GFP Reporter BAC

[0348] An important gene in the commitment of definitive endoderm cells towards pancreas is PDX1. Thus, a fluorescent reporter construct was built to study precursor cells at this later stage of the differentiation process. The present inventors generated PDX1-reporter constructs in which the coding sequence of the PDX1 gene was replaced by the coding sequence of the EGFP gene together with a floxed Neo gene, as follows.

[0349] Preparation of PDX1 ATG-GFP-Knockin Construct:

[0350] EGFP and floxed neo was knocked into the PDX1 gene locus in BAC BAC RP11-322P28 by replacing the coding sequence of PDX1 (ATG to TGA) with the coding sequence of GFP and the floxed neomycin resistance gene. FIGS. 3A-B schematically illustrate the structure of the recombinant BAC RP11-322P28 PDX1-GFP construct (SEQ ID NO:15), which includes the PDX1 upstream regulatory sequence (SEQ ID NO:16, about 8.7 kb), the GFP coding sequence (SEQ ID NO:2) followed by the SV40 polyA sequence (SEQ ID NO:27), a loxP site (SEQ ID NO:4), the neomycin resistance gene sequence (SEQ ID NO:3) with the SV40 early promoter/enhancer (SEQ ID NO:28), and the TK polyadenylation site (SEQ ID NO:29), a second loxP site (SEQ ID NO:4), the PDX1 downstream regulatory sequence (SEQ ID NO:17, about 19.5 kb).

[0351] Preparation of PDX1 ATG-GFP-Knockin Plasmid Construct:

[0352] Part of the BAC PDX1-GFP construct (SEQ ID NO:15) was subcloned into the Bluescript plasmid (Stratagene) to generate the recombinant PDX1-GFP plasmid construct (SEQ ID NO:18) as follows. FIG. 3C schematically illustrates the structure of the recombinant plasmid PDX1-GFP construct (SEQ ID NO:18), which includes the 5′-arm (SEQ ID NO:19), the GFP coding sequence (SEQ ID NO:2) followed by the SV40 polyA sequence (SEQ ID NO:27), a loxP site (SEQ ID NO:4), the neomycin resistance gene sequence (SEQ ID NO:3) with the SV40 early promoter/enhancer (SEQ ID NO:28), and the TK polyadenylation site (SEQ ID NO:29), a second loxP site (SEQ ID NO:4), and a 3′-arm (SEQ ID NO:20).

[0353] A 3′-external probe was prepared (SEQ ID NO:21) in order to detect correct targeting of the vector into the genomic DNA of the host cell.

[0354] Preparation of PSC1x: PDX1 IRES-GFP-Knockin Plasmid Construct

[0355] IRES-eGFP and floxed neo was knocked into the 3′ UTR of the PDX1 gene. FIG. 3D schematically illustrates the structure of the recombinant plasmid construct (SEQ ID NO:22), which includes the 5′-arm (SEQ ID NO:23) which includes the PDX1 exons, the PDX1 5′-UTR (5′-untranslated region), the 3′-UTR, an IRES sequence (SEQ ID NO:25), the GFP coding sequence (SEQ ID NO:2) followed by the SV40 polyA sequence (SEQ ID NO:27), a loxP site (SEQ ID NO:4), the neomycin resistance gene sequence (SEQ ID NO:3) with the SV40 early promoter/enhancer (SEQ ID NO:28), and the TK polyadenylation site (SEQ ID NO:29), a second loxP site (SEQ ID NO:4), and a 3′-arm (SEQ ID NO:24).

[0356] A 3′-external probe was prepared (SEQ ID NO:26) in order to detect correct targeting of the vector into the genomic DNA of the host cell.

[0357] Preparation of PDX1 ATG-mCherry-Knockin BAC

[0358] mCherry and a floxed neo was knocked into the PDX1 gene locus in BAC RP11-322P28. FIG. 3D schematically illustrates the structure of the recombinant BAC construct (SEQ ID NO:30), which includes the 5′-arm (SEQ ID NO: 31) which includes PDX1 upstream regulatory sequence, the mCherry coding sequence (SEQ ID NO:33) followed by the SV40 polyA sequence (SEQ ID NO:27), a loxP site (SEQ ID NO:4), the neomycin resistance gene sequence (SEQ ID NO:3) with the SV40 early promoter/enhancer (SEQ ID NO:28), and the TK polyadenylation site (SEQ ID NO:29), a second loxP site (SEQ ID NO:4), and a 3′-arm (SEQ ID NO:32).

[0359] Transfection of the Recombinant Construct of Some Embodiments of the Invention into Human ESCs

[0360] Various hESC clones harbouring the PDX1 GFP reporter BAC (SEQ ID NO:15) were isolated and were allowed to differentiate by forming EBs. At day 14, the EBs were dissociated into single cells and were analysed by FACS. The number of GFP+ cells in the different clones varied from about 0.5% to about 3% (FIG. 4C). 14 day-old EBs from a reporter clone were seen to contain clusters of GFP⁺ cells. The EBs were dissociated into single cells and were put onto cover slips using the cytospin, fixed and immunostained for PDX1. The cells clearly co-expressed PDX1 and GFP demonstrating that the GFP⁺ population indeed represent PDX1 positive cells (FIG. 4D).

[0361] Next, the PDX1⁺ cells were sorted by FACS and RNA was extracted from the GFP⁺ and GFP⁻ populations. RT-qPCR was performed to compare expression of various markers in the two different cell populations. As can be seen in FIG. 4E, PDX1 and other pancreatic differentiation markers were enriched in the GFP⁺ population. Some of the enriched genes include NGN3, paired box 4 (PAX4), hepatocyte nuclear factor 6 (HNF6) and homeobox gene HB9 (HLXB9)). These results further validate the identity of the PDX+ population as pancreatic progenitor cells.

TABLE 5
Membranal genes which are upregulated in PDX1 cells as compared to genetically un-modified ESCs

| | Affy. target | | SEQ ID NO: | | | Log 2 fold |
|---|---|---|---|---|---|---|
| Probe | nucl. SEQ | Rep. | (Of Rep. | Polyn. SEQ ID NOs: | Gene | change |
| Set ID | ID NO: | Public ID | Public ID) | rep. by target | Symbol | [PDX1-HESC] |
| 8035304 | 510 | NM_004335 | 800 | 3090, 2805, 5403, 7124, | BST2 | 3.99 |
| 7989073 | 511 | NM_173814 | 801 | 3710, 4778, 6379, | PRTG | 3.28 |
| 8056611 | 512 | NM_004525 | 802 | 2684, 4119, 5456, 8262, | LRP2 | 2.83 |
| 8031076 | 513 | NM_031896 | 803 | 3827, 5226, 7212, 5339, | CACNG7 | 2.71 |
| 7976783 | 514 | NM_003836 | 804 | 4273, 4994, 6774, 5796, 6319, | DLK1 | 2.66 |
| 8087691 | 515 | NM_001174051 | 805 | 2721, 2711, 2712, 4220, 4298, 5019, 3735, | CACNA2D2 | 2.56 |
| | | | | 3736, 6362, 6812, 5540, 6239, 8681, 7132, | | |
| | | | | 7985, 7734, 6957, 7200, | | |
| 7909390 | 516 | NM_175710 | 806 | 3897, 4185, 8470, 6548, 5851, | CR1L | 2.56 |
| 7994058 | 517 | NM_001039 | 807 | 3481, 4177, 5784, | SCNN1G | 2.54 |
| 8169447 | 518 | NM_000868 | 808 | 2609, 4287, 5920, 5564, 5986, | HTR2C | 2.44 |
| 7917276 | 519 | NM_012152 | 809 | 2780, 4363, 7551, 8539, 6011, | LPAR3 | 2.27 |
| 7920664 | 520 | NM_007112 | 810 | 2652, 3541, 6070, 7928, 8701, 6699, 6720, | THBS3 | 2.18 |
| | | | | 8067, 8010, 7294, 6846, | | |
| 8051785 | 521 | NM_133329 | 811 | 3647, 5227, 5228, 5783, 7561, | KCNG3 | 2.15 |
| 8018114 | 522 | NM_001144952 | 812 | 2814, 4748, 7774, 5765, 6851, 6326, | SDK2 | 2.13 |
| 8178193 | 523 | NM_019111 | 813 | 3652, 4537, 2590, 2589, 4532, 4478, 4721, | HLA-DRA | 2.10 |
| | | | | 4482, 3074, 3666, 5174, 6840, 8271, 7495, | | |
| | | | | 7301, 6340, 7125, 7667, 6973, 6698, 6694, | | |
| | | | | 7895, 6462, 7070, 8427, 7321, 6682, 7906, | | |
| | | | | 7421, 7648, 7487, 6525, | | |
| 7930837 | 524 | NM_003054 | 814 | 3141, 5107, 7960, 5655, | SLC18A2 | 2.09 |
| 8011713 | 525 | NM_022059 | 815 | 2851, 4210, 4211, 5728, | CXCL16 | 1.96 |
| 7916584 | 526 | NM_002353 | 816 | 2675, 4337, 6094, | TACSTD2 | 1.91 |
| 7975932 | 527 | NM_020431 | 817 | 4392, 4432, 5791, | TMEM63C | 1.85 |
| 8038367 | 528 | NM_020309 | 818 | 3483, 4743, 5332, | SLC17A7 | 1.83 |
| 8114415 | 529 | NM_001496 | 819 | 3167, 3584, 7363, 5508, | GFRA3 | 1.83 |

Table 5: Provided are the description of the membranal genes along with the sequence identifiers of the Affymetrix probes, the target sequence identified by the Affymetrix probe, and the mRNA sequences represented by the target sequences. Also shown are the log 2 fold change in expression levels of the indicated genes between the PDX1-GFP cells and the genetically unmodified HESCs. The (+) or (−) sign means that the genes are upregulated or downregulated, respectively, in the PDX1-GFP cells as compared to the genetically unmodified HESCs.

TABLE 6
Membranal genes which are downregulated in PDX1 cells as compared to genetically un-modified ESCs

| | Affy. target | | SEQ ID NO: | | | Log 2 fold |
|---|---|---|---|---|---|---|
| Probe | nucl. SEQ | Rep. | (Of Rep. | Polyn. SEQ ID NOs: | Gene | change |
| Set ID | ID NO: | Public ID | Public ID) | rep. by target | Symbol | [PDX1-HESC] |
| 8095364 | 820 | NM_014058 | 1411 | 3472, 4222, 5579, 8653, | TMPRSS11E | −3.58 |
| 8095380 | 821 | NM_014058 | 1412 | 3472, 4222, 5579, 8653, | TMPRSS11E | −3.60 |
| 7957140 | 822 | NM_003667 | 1413 | 2732, 3193, 6795, 5509, | LGR5 | −3.03 |
| 8101992 | 823 | NM_001135146 | 1414 | 2875, 4623, 4624, 3783, 4625, 7838, 6311, 8464, | SLC39A8 | −2.82 |
| | | | | 6341, 7047, | | |
| 8091402 | 824 | NM_001184723 | 1415 | 2962, 5118, 5119, 5621, 7779, 6927, 6623, 8441, | TM4SF18 | −2.73 |
| 7936798 | 825 | NM_022034 | 1416 | 3275, 5260, 6276, 6229, 6120, 6165, 6557, 6134, | CUZD1 | −2.27 |
| 8175217 | 826 | NM_001448 | 1417 | 2738, 3072, 6154, | GPC4 | −2.20 |
| 8123246 | 827 | NM_021977 | 1418 | 3195, 5535, 7120, | SLC22A3 | −2.20 |
| 8055465 | 828 | NM_001008540 | 1419 | 2782, 3775, 3776, 5384, 6834, 7645, | CXCR4 | −2.19 |
| 8123739 | 829 | NM_016588 | 1420 | 3230, 3454, 7755, 5387, | NRN1 | −2.16 |
| 7964745 | 830 | NM_016056 | 1421 | 3443, 2942, 4069, 7063, 6210, 5607, 7161, | TMBIM4 | −2.11 |
| 8130867 | 831 | NM_003247 | 1422 | 4184, 3540, 8063, 7661, 5992, 6904, | THBS2 | −2.05 |
| 8003298 | 832 | NM_003486 | 1423 | 2755, 3870, 5397, | SLC7A5 | −1.92 |
| 8172022 | 833 | NM_031442 | 1424 | 3197, 4343, 5466, | TMEM47 | −1.90 |

Table 6: Provided are the description of the membranal genes along with the sequence identifiers of the Affymetrix probes, the target sequence identified by the Affymetrix probe, and the mRNA sequences represented by the target sequences. Also shown are the log 2 fold change in expression levels of the indicated genes between the PDX1-GFP cells and the genetically unmodified HESCs. The (+) or (−) sign means that the genes are upregulated or downregulated, respectively, in the PDX1-GFP cells as compared to the genetically unmodified HESCs.

TABLE 7
Non-membranal genes which are upregulated in PDX1 cells as compared to genetically un-modified ESCs

| | Affy. target | | SEQ ID NO: | | | Log 2 fold |
|---|---|---|---|---|---|---|
| Probe | nucl. SEQ | Rep. | (Of Rep. | Polyn. SEQ ID NOs: | Gene | change |
| Set ID | ID NO: | Public ID | Public ID) | rep. by target | Symbol | [PDX1-HESC] |
| 8127522 | 834 | NM_001025290 | 1425 | 4388, 5232, 5916, | DPPA5 | 5.21 |
| 8049128 | 835 | NM_031313 | 1426 | 2557, 4233, 5696, | ALPPL2 | 5.18 |
| 7917037 | 836 | NM_001889 | 1427 | 3420, 2605, 3199, 3619, 4456, 4457, 4458, | CRYZ | 4.64 |
| | | | | 4612, 6114, 6052, 6863, 6288, 6530, 6018, | | |
| | | | | 8189, | | |
| 7945680 | 837 | NR_030533 | 1428 | 3526, 4930, 3779, 6619, 7610, 6652, 6726, | H19 | 4.26 |
| | | | | 6561, 7131, 6743, 7010, 6680, 6895, 7340, | | |
| | | | | 7012, 6491, | | |
| 7901497 | 838 | NM_001004339 | 1429 | 3328, 4808, 6317, 5872, | ZYG11A | 3.74 |
| 7902345 | 839 | NM_001162916 | 1430 | 3648, 4873, 4874, 4872, 8405, 6496, 6385, | TYW3 | 3.33 |
| | | | | 8689, 7110, 8780, 6273, | | |
| 7986350 | 840 | NM_183376 | 1431 | 3385, 4436, 5479, | ARRDC4 | 3.28 |
| 7904726 | 841 | NM_006472 | 1432 | 2648, 4356, 6092, 8025, 8646, 8023, | TXNIP | 3.08 |
| 7975779 | 842 | NM_005252 | 1433 | 3348, 4888, 5787, | FOS | 3.07 |
| 7959016 | 843 | NR_027345 | 1434 | 4799, 4800, 7778, 8557, | NCRNA00173 | 2.72 |
| 8071809 | 844 | NM_000854 | 1435 | 2877, 3667, 4143, 4144, 5682, 5316, | GSTT2 | 2.63 |
| 8074962 | 845 | NM_000854 | 1436 | 2877, 3667, 4143, 4144, 5682, 5316, | GSTT2 | 2.63 |
| 8033257 | 846 | NM_000064 | 1437 | 4194, 4038, 7636, 8397, 8664, 8376, 5358, | C3 | 2.60 |
| | | | | 6890, 6959, 7466, 8745, | | |
| 8120679 | 847 | NM_018665 | 1438 | 2820, 2957, 4749, 6125, 7145, 8551, 6076, | DDX43 | 2.58 |
| 7983360 | 848 | NM_004048 | 1439 | 3076, 3490, 6485, 6270, | B2M | 2.53 |
| 7949124 | 849 | NM_001164716 | 1440 | 2730, 4906, 4290, 8065, 5323, | PYGM | 2.47 |
| 8026424 | 850 | NM_173483 | 1441 | 3826, 4241, 5547, | CYP4F22 | 2.46 |
| 8030944 | 851 | NM_001099694 | 1442 | 4546, 4201, | ZNF578 | 2.44 |
| 7953532 | 852 | NM_001975 | 1443 | 3363, 2973, 5374, | ENO2 | 2.44 |
| 7933092 | 853 | NM_021045 | 1444 | 4114, 3320, 8456, 7285, 8408, 7542, 7283, | ZNF248 | 2.43 |
| | | | | 7447, 6137, | | |
| 8031576 | 854 | NM_134444 | 1445 | 3031, 4444, 5611, 5951, | NLRP4 | 2.39 |
| 7964246 | 855 | NR_003046 | 1446 | 3964, | SNORD59B | 2.34 |
| 7976812 | 856 | NR_003232 | 1447 | 4042, | SNORD113-4 | 2.34 |
| 7912347 | 857 | NM_001079843 | 1448 | 3894, 4091, 8716, 7616, | CASZ1 | 2.28 |
| 8008885 | 858 | NR_029493 | 1449 | 3773, 4929, | MIR21 | 2.27 |
| 7906400 | 859 | NM_005531 | 1450 | 3138, 2735, 2792, 2582, 3114, 4519, 2986, | IFI16 | 2.24 |
| | | | | 4028, 5903, 7297, 7065, 5990, 6176, 8454, | | |
| | | | | 7984, 8195, 7186, 7588, 5913, 5739, | | |
| 8033767 | 860 | NM_152476 | 1451 | 2982, 4116, 5683, | ZNF560 | 2.22 |
| 7930631 | 861 | NM_198795 | 1452 | 3518, 3513, 6133, 6452, 5445, 6004, 5919, | TDRD1 | 2.22 |
| 8139820 | 862 | NM_178558 | 1453 | 3061, 4448, 4449, 8320, 6601, 8790, 5658, | ZNF680 | 2.20 |
| 8118314 | 863 | NM_005346 | 1454 | 2997, 3529, 4339, 4461, 7351, 7433, 6971, | HSPA1B | 2.15 |
| | | | | 6486, 6386, 6633, 6951, 7233, 6772, 7683, | | |
| | | | | 6519, 6662, | | |
| 8118310 | 864 | NM_005345 | 1455 | 4504, 3360, 4461, 6563, 7351, 6971, 6630, | HSPA1A | 2.14 |
| | | | | 7449, 7498, 6386, 6951, 6668, 6772, 7683, | | |
| | | | | 7557, 6519, | | |
| 8108370 | 865 | NM_001964 | 1456 | 2571, 3296, 5376, 7583, | EGR1 | 2.09 |
| 7949104 | 866 | NM_001098670 | 1457 | 2786, 2787, 2742, 3987, 2749, 3104, 3106, | RASGRP2 | 2.07 |
| | | | | 3428, 4186, 4187, 3200, 6996, 7253, 7251, | | |
| | | | | 6422, 6110, 6605, 7167, 6721, 6400, 7783, | | |
| | | | | 7408, 7101, 6992, 8419, 6612, 7675, 7336, | | |
| | | | | 6494, 7993, 7692, 6747, 7413, | | |
| 8177011 | 867 | NM_004192 | 1458 | 3533, 5004, 5005, 5006, 7168, 8058, 7484, | ASMTL | 2.06 |
| | | | | 7559, 6621, 7587, | | |
| 8030448 | 868 | NM_001136052 | 1459 | 3049, 5236, 5237, 7371, 6022, 7446, 5780, | CPT1C | 2.05 |
| | | | | 5691, | | |
| 8024712 | 869 | NM_033064 | 1460 | 3258, 3101, 4560, 3035, 4405, 5929, 7505, | ATCAY | 2.05 |
| | | | | 5849, 7325, | | |
| 8008321 | 870 | NM_025149 | 1461 | 4485, 4216, 8568, 8657, 7865, 8078, 8132, | ACSF2 | 2.05 |
| | | | | 8703, 8080, 8098, 8518, 8485, 5631, 8002, | | |
| | | | | 8231, 8654, 8238, 8203, 8085, | | |
| 7947512 | 871 | NM_015430 | 1462 | 3786, 3701, 3702, 6790, 5537, 6920, | PAMR1 | 2.04 |
| 7963970 | 872 | NM_006928 | 1463 | 3105, 5245, 6941, 6287, | SILV | 2.03 |
| 7941662 | 873 | NM_001104 | 1464 | 3432, 2761, 8043, 7856, 8550, | ACTN3 | 2.03 |
| 7919787 | 874 | NM_032132 | 1465 | 3665, 3069, 3254, 3722, 5240, 8304, 6029, | HORMAD1 | 2.03 |
| | | | | 6113, 5998, 7030, 5874, 5867, 8731, 6466, | | |
| | | | | 5973, | | |
| 7993756 | 875 | NM_005622 | 1466 | 4281, 2813, 3634, 3635, 4670, 6949, 5609, | ACSM3 | 2.02 |
| | | | | 7003, 6291, | | |
| 8018652 | 876 | NM_052916 | 1467 | 4746, 5562, 5570, 5845, | RNF157 | 2.02 |
| 8066117 | 877 | NM_015474 | 1468 | 3449, 5023, 3830, 5349, 5541, 7106, 6100, | SAMHD1 | 2.01 |
| 7968928 | 878 | NM_002901 | 1469 | 3429, 3373, 4745, 4663, 7615, 8433, 8540, | RCN1 | 2.01 |
| | | | | 8791, 5816, 7507, 7679, 7940, 5326, | | |

Table 7: Provided are the description of the non-membranal genes along with the sequence identifiers of the Affymetrix probes, the target sequence identified by the Affymetrix probe, and the mRNA sequences represented by the target sequences. Also shown are the log 2 fold change in expression levels of the indicated genes between the PDX1-GFP cells and the genetically unmodified HESCs. The (+) or (−) sign means that the genes are upregulated or downregulated, respectively, in the PDX1-GFP cells as compared to the genetically unmodified HESCs.

TABLE 8
Non-membranal genes which are down regulated in PDX1 cells as compared to genetically un-modified ESCs

| | Affymetrix | | | | | |
|---|---|---|---|---|---|---|
| | target nucl. | | SEQ ID NO: | | | Log 2 fold |
| Probe | sequence SEQ | | (Of Rep. | | Gene | change |
| Set ID | ID NO: | Rep. Public ID | Public ID) | Polyn. SEQ ID NOs: rep. by target | Symbol | [PDX1-HESC] |
| 7957458 | 879 | NM_006183 | 1470 | 2948, 5242, 5429, | NTS | −6.28 |
| 8160163 | 880 | NM_005454 | 1471 | 3880, 3883, 6763, | CER1 | −5.61 |
| 8065412 | 881 | NM_001898 | 1472 | 3369, 3033, 5734, 6511, | CST1 | −5.17 |
| 7934156 | 882 | NM_018055 | 1473 | 3088, 4747, 7082, 5642, | NODAL | −4.21 |
| 7907222 | 883 | NM_022716 | 1474 | 4004, 3771, 3772, 5361, 6117, 8431, 7764, | PRRX1 | −3.87 |
| | | | | 8243, 8582, | | |
| 8067839 | 884 | NM_002009 | 1475 | 3477, 2587, 4695, 4203, 5525, 7263, | KGFLP1 | −3.72 |
| 8160138 | 885 | NM_005596 | 1476 | 3285, 2688, 2685, 4244, 4562, 2874, 3417, | NFIB | −3.49 |
| | | | | 5146, 5145, 5147, 7613, 7638, 6784, 7684, | | |
| | | | | 7327, 6514, 7007, 8444, 7463, | | |
| 8112668 | 886 | NM_016591 | 1477 | 2806, 4600, 5633, | GCNT4 | −3.42 |
| 7910134 | 887 | NM_031944 | 1478 | 2853, 2923, 6314, | MIXL1 | −3.41 |
| 8135594 | 888 | NM_001753 | 1479 | 4248, 4999, 5000, 5001, 5002, 6085, 6753, | CAV1 | −3.37 |
| | | | | 8406, | | |
| 7965403 | 889 | NM_002345 | 1480 | 2920, 3798, 5519, | LUM | −3.36 |
| 8106660 | 890 | NM_006909 | 1481 | 4058, 5302, 8643, 5518, 8502, 8537, 8352, | RASGRF2 | −3.34 |
| 8111892 | 891 | NM_000436 | 1482 | 2674, 4026, 8292, 5313, 8538, 8361, 8084, | OXCT1 | −3.25 |
| | | | | 7753, | | |
| 7957260 | 892 | NM_007043 | 1483 | 2953, 3451, 4074, 4007, 6328, 5493, 5382, | GLIPR1 | −3.25 |
| 8040430 | 893 | NM_003385 | 1484 | 3384, 3838, 6777, 6629, 8659, 5837, 6389, | VSNL1 | −3.24 |
| | | | | 6436, | | |
| 8105302 | 894 | NM_013409 | 1485 | 3343, 5282, 5281, 7924, 7913, 6382, 5408, | FST | −3.15 |
| 7971077 | 895 | NM_006475 | 1486 | 2617, 4640, 4641, 4642, 4649, 7522, 8474, | POSTN | −2.97 |
| | | | | 8449, 7103, 8183, 7375, 6642, | | |
| 8161892 | 896 | NM_004297 | 1487 | 2753, 4750, 6030, 7575, | GNA14 | −2.96 |
| 8068401 | 897 | NM_001757 | 1488 | 3890, 3754, 7622, 5848, | CBR1 | −2.95 |
| 8092095 | 898 | NM_015028 | 1489 | 4193, 4852, 4853, 4854, 4855, 4856, 4857, | TNIK | −2.95 |
| | | | | 4858, 4859, 4860, 8054, 5939, 6549, 7883, | | |
| | | | | 5603, 6786, 7448, 7215, 8447, 8382, 7882, | | |
| | | | | 6219, | | |
| 7921916 | 899 | NM_001195303 | 1490 | 3306, 5190, 5110, 7452, 5828, 6057, | RGS5 | −2.93 |
| 8155487 | 900 | NM_002009 | 1491 | 3476, 2587, 2975, 4695, 4203, 5525, 7263, | KGFLP1 | −2.89 |
| | | | | 7112, 6748, | | |
| 7952601 | 901 | NM_001162422 | 1492 | 3402, 4871, 4686, 4687, 7425, 5612, 5931, | ETS1 | −2.88 |
| 7947274 | 902 | NM_001584 | 1493 | 2671, 4776, 4777, 6358, 6060, | MPPED2 | −2.79 |
| 7934906 | 903 | NM_001141945 | 1494 | 3670, 3812, 3774, 2556, 3442, 4717, 4473, | ACTA2 | −2.79 |
| | | | | 2836, 3380, 4664, 4665, 5340, 8239, 7483, | | |
| | | | | 8264, 7450, 7803, 6754, | | |
| 8140668 | 904 | NM_006080 | 1495 | 4019, 3973, 5554, 7046, 6980, | SEMA3A | −2.72 |
| 7974689 | 905 | NM_016651 | 1496 | 2815, 4080, 4079, | DACT1 | −2.67 |
| 8155849 | 906 | NM_000700 | 1497 | 3181, 2757, 6327, 5394, 7974, 6460, 7578, | ANXA1 | −2.66 |
| | | | | 7227, 8129, 8580, | | |
| 8127563 | 907 | NM_080645 | 1498 | 4761, 3954, 3953, 5758, 6009, 7798, 8346, | COL12A1 | −2.59 |
| | | | | 8170, 5484, 6823, | | |
| 7965322 | 908 | NM_000899 | 1499 | 4054, 5149, 5148, 6216, 5328, 6318, 7574, | KITLG | −2.58 |
| 7995681 | 909 | NM_004530 | 1500 | 3362, 4409, 4410, 5329, 6518, | MMP2 | −2.57 |
| 7971653 | 910 | NR_002612 | 1501 | 2849, 3911, 7223, 6445, 7650, 7147, 7126, | DLEU2 | −2.57 |
| | | | | 7028, 6609, | | |
| 8171449 | 911 | NM_021804 | 1502 | 3847, 4462, 6787, 7949, 7759, 7328, 5427, | ACE2 | −2.56 |
| 8042788 | 912 | NM_001615 | 1503 | 2956, 3832, 6377, 7341, 6703, 6599, 7930, | ACTG2 | −2.56 |
| | | | | 5891, | | |
| 7962427 | 913 | NM_031292 | 1504 | 3592, 4173, 4172, 4174, 6664, 6050, 6684, | PUS7L | −2.52 |
| 7984259 | 914 | NR_002757 | 1505 | 4615, | RNU5B-1 | −2.40 |
| 8046922 | 915 | NM_000090 | 1506 | 3042, 4000, 7681, 5702, 7724, 5577, | COL3A1 | −2.37 |
| 7924682 | 916 | NM_003240 | 1507 | 3558, 4989, 4988, 8493, 7506, 6104, | LEFTY2 | −2.35 |
| 7912520 | 917 | NM_002521 | 1508 | 3029, 3909, 7941, 6388, | NPPB | −2.35 |
| 7944867 | 918 | NM_170601 | 1509 | 3593, 5256, 5538, | SIAE | −2.30 |
| 8095646 | 919 | NM_001134 | 1510 | 3041, 2756, 7886, 7273, 8047, 8272, | AFP | −2.29 |
| 8098690 | 920 | NM_174900 | 1511 | 3498, 3937, 5793, 8300, | ZFP42 | −2.29 |
| 8152617 | 921 | NM_005328 | 1512 | 2676, 4348, 5843, 6409, | HAS2 | −2.28 |
| 8136807 | 922 | — | | | TRY6 | −2.28 |
| 7908597 | 923 | NM_003822 | 1513 | 2737, 3582, 3583, 6058, 5356, 8618, 7477, | NR5A2 | −2.27 |
| | | | | 6293, 5367, | | |
| 8115543 | 924 | NM_024007 | 1514 | 3190, 4342, 8173, 8061, 8377, 5613, 8417, | EBF1 | −2.27 |
| | | | | 6926, 7796, 8496, 7892, | | |
| 7977507 | 925 | NR_002312 | 1515 | 3839, | RPPH1 | −2.26 |
| 8026139 | 926 | NM_002501 | 1516 | 4021, 4022, 3743, 3307, 2629, 2644, 2645, | NFIX | −2.21 |
| | | | | 4501, 4543, 4907, 3764, 5981, 6837, 5556, | | |
| | | | | 6879, 5925, | | |
| 8040163 | 927 | NM_001039613 | 1517 | 3912, 3107, 4261, 4549, 3207, 3482, 3588, | IAH1 | −2.20 |
| | | | | 3934, 6534, 8330, 8409, 8205, 6128, 8770, | | |
| | | | | 8556, 7901, 8340, 8747, 8755, 7721, 8381, | | |
| | | | | 8091, 7817, 5835, | | |
| 8151768 | 928 | NM_004349 | 1518 | 2705, 3651, 2626, 2602, 2625, 2624, 2654, | RUNX1T1 | −2.20 |
| | | | | 4142, 3323, 2686, 4712, 2904, 3581, 5209, | | |
| | | | | 5210, 5211, 5212, 5213, 5214, 5215, 5216, | | |
| | | | | 5217, 5218, 5219, 5220, 5221, 5222, 5223, | | |
| | | | | 8013, 6461, 5898, 7238, 8282, 8648, 8373, | | |
| | | | | 8771, 8423, 8210, 8363, 8306, 8545, 8741, | | |
| | | | | 8410, 8779, 8219, 7874, 8339, 8400, 8131, | | |
| | | | | 8197, 8357, 7910, 8124, 8636, 7994, 7908, | | |
| | | | | 7863, 8687, 8792, 8763, 7842, 8594, 8665, | | |
| | | | | 8145, 8274, 8404, 8092, 8089, 8443, 7757, | | |
| | | | | 8719, 5496, 6644, | | |
| 8057620 | 929 | NM_000393 | 1519 | 3762, 3939, 7320, 7380, 7573, | COL5A2 | −2.18 |
| 8106743 | 930 | NM_004385 | 1520 | 2643, 4889, 4890, 4891, 4892, 6221, 7925, | VCAN | −2.17 |
| | | | | 8699, 7773, 8196, 5495, 8365, 6091, | | |
| 7897801 | 931 | M77839 | 1521 | 2554, 4136, | RNU5E | −2.14 |
| 8069689 | 932 | NM_007038 | 1522 | 2778, 4585, 5725, | ADAMTS5 | −2.14 |
| 8140955 | 933 | NM_001145306 | 1523 | 3279, 4773, 4772, 5552, 8113, 8064, 7668, | CDK6 | −2.11 |
| | | | | 6346, | | |
| 8135218 | 934 | NM_005824 | 1524 | 2666, 4848, 4849, 5940, 5451, 7410, 8602, | LRRC17 | −2.11 |
| 8163716 | 935 | NM_014618 | 1525 | 2726, 4469, 4474, 3012, 3546, 3649, 4164, | DBC1 | −2.11 |
| | | | | 6292, 6191, 5480, | | |
| 8007921 | 936 | NM_001002841 | 1526 | 3053, 3703, 2998, 6007, 6931, | MYL4 | −2.10 |
| 7934979 | 937 | NM_014391 | 1527 | 2995, 3511, 5932, | ANKRD1 | −2.09 |
| 8085946 | 938 | NM_005442 | 1528 | 3171, 3140, 5868, 7137, 7635, | EOMES | −2.07 |
| 7971461 | 939 | NM_002298 | 1529 | 2593, 2594, 3108, 3126, 3127, 4472, 2928, | LCP1 | −2.05 |
| | | | | 2972, 4589, 6343, 5723, 6824, 7508, 6347, | | |
| | | | | 6695, 8668, 6816, | | |
| 7944082 | 940 | NM_003186 | 1530 | 2895, 3656, 3657, 3038, 7198, 5531, 6894, | TAGLN | −2.04 |
| | | | | 5715, | | |
| 8045688 | 941 | NM_007115 | 1531 | 3052, 5234, 5352, 6810, | TNFAIP6 | −2.04 |
| 8105607 | 942 | NM_001164442 | 1532 | 4893, 7805, 7948, 7918, 8707, 6538, | FAM159B | −2.03 |
| 8161520 | 943 | NM_021965 | 1533 | 3077, 4232, 3852, 6909, 6516, | PGM5P2 | −2.01 |

Table 8:
Provided are the description of the non-membranal genes along with the sequence identifiers of the Affymetrix probes, the target sequence identified by the Affymetrix probe, and the mRNA sequences represented by the target sequences. Also shown are the log 2 fold change in expression levels of the indicated genes between the PDX1-GFP cells and the genetically unmodified HESCs.
The (+) or (−) sign means that the genes are upregulated or downregulated, respectively, in the PDX1-GFP cells as compared to the genetically unmodified HESCs.

### Example 3

### Genes which are Upregulated or Downregulated in Pancreatic Progenitor (Pdx1+) Versus Definite Endoderm (Sox17+) Cells

TABLE 9
Membranal genes which are upregulated in PDX1 cells as compared to SOX17 cells

| | Affy. target | | SEQ ID | | | Log 2 fold |
|---|---|---|---|---|---|---|
| Probe | nucl. SEQ ID | | NO: (Of Rep. | | Gene | change |
| Set ID | NO: | Rep. Public ID | Public ID) | Polyn. SEQ ID NOs: rep. by target | Symbol | [PDX-SOX] |
| 8100393 | 944 | NM_002253 | 1534 | 2708, 4588, 7921, 5498, 8228, | KDR | 4.62 |
| 8051785 | 945 | NM_133329 | 1535 | 3647, 5227, 5228, 5783, 7561, | KCNG3 | 4.19 |
| 8031076 | 946 | NM_031896 | 1536 | 3827, 5226, 7212, 5339, | CACNG7 | 3.80 |
| 8096440 | 947 | NM_001510 | 1537 | 2719, 4235, 8429, 5557, 7933, 8154, | GRID2 | 3.63 |
| 7996837 | 948 | NM_004360 | 1538 | 4149, 4182, 2614, 4278, 4556, 2794, 2795, | CDH1 | 3.45 |
| | | | | 4415, 4294, 4315, 4347, 5506, 7453, 5404, | | |
| | | | | 7133, | | |
| 7917276 | 949 | NM_012152 | 1539 | 2780, 4363, 7551, 8539, 6011, | LPAR3 | 3.33 |
| 8113666 | 950 | NM_020796 | 1540 | 2844, 4722, 3122, 3148, 4310, 4145, 8137, | SEMA6A | 3.29 |
| | | | | 8152, 7900, 5499, 8724, 8667, 8467, 8111, | | |
| | | | | 5437, 8321, 7896, 5978, 8764, | | |
| 8135774 | 951 | NM_002851 | 1541 | 2599, 3943, 7457, 8030, 7815, 8011, 8237, | PTPRZ1 | 3.15 |
| | | | | 7646, | | |
| 8037079 | 952 | NM_152296 | 1542 | 3345, 3672, 8109, 6417, 5616, 7816, | ATP1A3 | 3.09 |
| 8087530 | 953 | NM_024046 | 1543 | 3407, 4516, 4542, 4547, 4568, 3355, 2883, | CAMKV | 3.04 |
| | | | | 3337, 3368, 3000, 3165, 3910, 8007, 8299, | | |
| | | | | 6547, 8504, 8573, 8756, 8739, 7861, 8075, | | |
| | | | | 7731, 6769, 7182, 8603, 8099, 7254, 5602, | | |
| 7994058 | 954 | NM_001039 | 1544 | 3481, 4177, 5784, | SCNN1G | 3.00 |
| 7918716 | 955 | NM_205848 | 1545 | 2981, 3239, 4010, 6234, 6167, 7976, 6283, | SYT6 | 2.92 |
| | | | | 6937, 6744, 6657, | | |
| 7930837 | 956 | NM_003054 | 1546 | 3141, 5107, 7960, 5655, | SLC18A2 | 2.87 |
| 8108697 | 957 | NM_015669 | 1547 | 2872, 2931, 5379, | PCDHB5 | 2.84 |
| 8101675 | 958 | NM_004827 | 1548 | 3811, 3819, 7943, 5391, | ABCG2 | 2.61 |
| 8178193 | 959 | NM_019111 | 1549 | 3652, 4537, 2590, 2589, 4532, 4478, 4721, | HLA-DRA | 2.60 |
| | | | | 4482, 3074, 3666, 5174, 6840, 8271, 7495, | | |
| | | | | 7301, 6340, 7125, 7667, 6973, 6698, 6694, | | |
| | | | | 7895, 6462, 7070, 8427, 7321, 6682, 7906, | | |
| | | | | 7421, 7648, 7487, 6525, | | |
| 7916584 | 960 | NM_002353 | 1550 | 2675, 4337, 6094, | TACSTD2 | 2.57 |
| 7909390 | 961 | NM_175710 | 1551 | 3897, 4185, 8470, 6548, 5851, | CR1L | 2.54 |
| 8169447 | 962 | NM_000868 | 1552 | 2609, 4287, 5920, 5564, 5986, | HTR2C | 2.48 |
| 7972157 | 963 | NM_003991 | 1553 | 2606, 5247, 5246, 5248, 5597, 7819, 7369, | EDNRB | 2.47 |
| 8168657 | 964 | NM_001168362 | 1554 | 3001, 2888, 4950, 4951, 2807, 4945, 4946, | PCDH11X | 2.45 |
| | | | | 4947, 4948, 4949, 2939, 2940, 2938, 5762, | | |
| | | | | 6189, 5311, 6640, 6106, 6184, 6241, 5877, | | |
| | | | | 7081, 5601, 6247, 8389, | | |
| 8038367 | 965 | NM_020309 | 1555 | 3483, 4743, 5332, | SLC17A7 | 2.44 |
| 7960529 | 966 | NM_001159575 | 1556 | 3514, 4813, 4814, 4812, 5353, 6068, 6294, | SCNN1A | 2.35 |
| | | | | 6143, 6414, | | |
| 7953291 | 967 | NM_001769 | 1557 | 3817, 5250, 7598, 7601, 7771, 7211, 6952, | CD9 | 2.35 |
| | | | | 5319, | | |
| 8011713 | 968 | NM_022059 | 1558 | 2851, 4210, 4211, 5728, | CXCL16 | 2.29 |
| 8027778 | 969 | NM_144779 | 1559 | 3228, 3470, 2828, 3419, 3286, 4528, 3008, | FXYD5 | 2.25 |
| | | | | 3388, 4895, 4896, 4898, 4897, 6381, 7395, | | |
| | | | | 6565, 5906, 7311, 8512, | | |
| 8170538 | 970 | NM_018558 | 1560 | 2811, 4939, 6037, 5850, | GABRQ | 2.25 |
| 8114415 | 971 | NM_001496 | 1561 | 3167, 3584, 7363, 5508, | GFRA3 | 2.23 |
| 8087691 | 972 | NM_001174051 | 1562 | 2721, 2711, 2712, 4220, 4298, 5019, 3735, | CACNA2D2 | 2.23 |
| | | | | 3736, 6362, 6812, 5540, 6239, 8681, 7132, | | |
| | | | | 7985, 7734, 6957, 7200, | | |
| 8133360 | 973 | NM_001305 | 1563 | 3437, 3401, 7342, 6124, 7250, | CLDN4 | 2.21 |
| 8059186 | 974 | NM_002846 | 1564 | 2647, 5233, 5755, 7545, 6502, 6839, 8004, | PTPRN | 2.20 |
| | | | | 8090, 8318, 8312, 7916, | | |
| 8169061 | 975 | NM_001128834 | 1565 | 3671, 3836, 3741, 3742, 2596, 2595, 2588, | PLP1 | 2.20 |
| | | | | 4267, 4502, 4503, 2878, 4324, 4329, 4438, | | |
| | | | | 3554, 3553, 8469, 6590, 7115, 7231, 7458, | | |
| | | | | 6933, 7196, 7209, 8108, 8781, 8623, 8141, | | |
| | | | | 8486, 7855, 5832, 8385, 5923, 8694, 6335, | | |
| | | | | 7709, 6348, 8343, 7178, 7629, | | |
| 7898057 | 976 | NM_001006624 | 1566 | 3236, 2746, 2747, 3084, 3519, 2965, 3133, | PDPN | 2.13 |
| | | | | 4305, 4306, 3747, 3748, 3745, 3746, 8458, | | |
| | | | | 8786, 8213, 5840, 7528, 8392, 8050, 7659, | | |
| | | | | 7822, 8446, | | |
| 8062123 | 977 | NM_006690 | 1567 | 2775, 3872, 5355, | MMP24 | 2.13 |
| 8018114 | 978 | NM_001144952 | 1568 | 2814, 4748, 7774, 5765, 6851, 6326, | SDK2 | 2.12 |
| 7987439 | 979 | NM_007223 | 1569 | 3580, 2783, 5852, | GPR176 | 2.10 |
| 8171624 | 980 | NM_005756 | 1570 | 3176, 3177, 3178, 3179, 3216, 3862, 3994, | GPR64 | 2.09 |
| | | | | 3992, 4253, 3172, 3173, 3174, 3093, 5123, | | |
| | | | | 5124, 5125, 5126, 5127, 5128, 5129, 5130, | | |
| | | | | 5131, 6034, 6617, 6614, 8617, 6938, 6296, | | |
| | | | | 6048, 6115, 6013, 6956, 6659, 6099, | | |
| 8083839 | 981 | NM_014373 | 1571 | 2885, 4317, 4609, 8290, 8552, 8316, 8057, | GPR160 | 2.07 |
| | | | | 7844, 7988, 6244, 7922, | | |
| 8176400 | 982 | NM_001168362 | 1572 | 3001, 2889, 4950, 2807, 4945, 4947, 2939, | PCDH11Y | 2.07 |
| | | | | 2940, 2938, 5762, 6189, 5311, 6640, 6184, | | |
| | | | | 6241, 5877, 7081, | | |
| 8067602 | 983 | NM_152864 | 1573 | 3226, 4323, 4809, 6602, 6260, 6027, 8666, | NKAIN4 | 2.06 |
| | | | | 7541, 6149, 6332, 8610, 6274, | | |
| 8004545 | 984 | NM_001678 | 1574 | 2604, 3681, 5449, | ATP1B2 | 2.05 |
| 7955502 | 985 | NM_001177984 | 1575 | 2769, 5108, 4009, 6054, 6237, 6251, | SCN8A | 2.03 |
| 8106573 | 986 | NM_003248 | 1576 | 3271, 5018, 8753, 6398, 8163, 6313, | THBS4 | 2.01 |
| 7909350 | 987 | NM_001006658 | 1577 | 4488, 4916, 4917, 6275, 5909, 8223, 8585, | CR2 | 2.01 |
| | | | | 6171, 6814, | | |
| 8118556 | 988 | NM_002122 | 1578 | 3810, 3721, 7313, 8208, 7034, 6552, 7074, | HLA-DQA1 | 1.98 |
| | | | | 5946, 8475, | | |
| 8118548 | 989 | NM_019111 | 1579 | 3652, 4537, 2590, 2589, 4532, 4478, 4721, | HLA-DRA | 1.97 |
| | | | | 4482, 3074, 3666, 5174, 6840, 8271, 7495, | | |
| | | | | 7301, 6340, 7125, 7667, 6973, 6698, 6694, | | |
| | | | | 7895, 6462, 7070, 8427, 7321, 6682, 7906, | | |
| | | | | 7421, 7648, 7487, 6525, | | |
| 7934970 | 990 | NM_000872 | 1580 | 3256, 4604, 4605, 4606, 5950, 6214, 5736, | HTR7 | 1.92 |
| | | | | 5523, | | |
| 7915472 | 991 | NM_006516 | 1581 | 4268, 4338, 5901, 6869, 6399, 8613, 6344, | SLC2A1 | 1.92 |
| | | | | 6364, 5884, 7600, | | |
| 8179481 | 992 | NM_019111 | 1582 | 3652, 4537, 2590, 2589, 4532, 4478, 4721, | HLA-DRA | 1.92 |
| | | | | 4482, 3074, 3666, 5174, 6840, 8271, 7495, | | |
| | | | | 7301, 6340, 7125, 7667, 6973, 6698, 6694, | | |
| | | | | 7895, 6462, 7070, 8427, 7321, 6682, 7906, | | |
| | | | | 7421, 7648, 7487, 6525, | | |
| 8040458 | 993 | NM_002252 | 1583 | 3347, 3213, 6867, 6984, 8229, 5665, 7423, | KCNS3 | 1.91 |
| 8173414 | 994 | NM_032803 | 1584 | 3087, 5135, 5134, 5854, 7474, | SLC7A3 | 1.86 |
| 8118607 | 995 | NR_001435 | 1585 | 4480, 2993, 3281, 6755, 8176, 8031, 7000, | HLA-DPB2 | 1.86 |
| | | | | 5720, 7237, 8785, 7391, 8295, 6363, 7378, | | |
| | | | | 8526, 7569, 6929, 7023, | | |
| 8159734 | 996 | NM_000718 | 1586 | 2559, 2560, 5298, 6089, 5532, 5955, 6280, | CACNA1B | 1.85 |
| | | | | 6151, 5911, 5558, 6198, | | |
| 8171284 | 997 | NM_000273 | 1587 | 3596, 4944, 6448, 6849, 7049, 7224, | GPR143 | 1.83 |

Table 9:
Provided are the description of the membranal genes along with the sequence identifiers of the Affymetrix probes, the target sequence identified by the Affymetrix probe, and the mRNA sequences represented by the target sequences. Also shown are the log 2 fold change in expression levels of the indicated genes between the PDX1-GFP cells and the SOX17-GFP cells (PDX1-SOX17).
The (+) or (−) sign means that the genes are upregulated or downregulated, respectively, in the PDX1-GFP cells as compared to the SOX17-GFP cells.

TABLE 10
Membranal genes which are downregulated in PDX1 cells as compared to SOX17 cells

| | | | | | | Log 2 fold |
|---|---|---|---|---|---|---|
| | Affy. target | | SEQ ID NO: | | | change |
| Probe Set | nucl. SEQ ID | Rep. Public | (Of Rep. Public | | Gene | [PDX- |
| ID | NO: | ID | ID) | Polyn. SEQ ID NOs: rep. by target | Symbol | SOX17] |
| 7957140 | 998 | NM_003667 | 1588 | 2732, 3193, 6795, 5509, | LGR5 | −6.13 |
| 7938090 | 999 | NM_176875 | 1589 | 2809, 5307, 5676, | CCKBR | −4.88 |
| 8055465 | 1000 | NM_001008540 | 1590 | 2782, 3775, 3776, 5384, 6834, 7645, | CXCR4 | −4.88 |
| 8065071 | 1001 | NM_198391 | 1591 | 2812, 5172, 5173, 5918, 7056, 6380, | FLRT3 | −4.44 |
| 8151341 | 1002 | NM_007332 | 1592 | 4060, 8269, 5433, | TRPA1 | −4.19 |
| 8057677 | 1003 | NM_014585 | 1593 | 3154, 4368, 6969, 5406, 7045, 8144, 8627, 7674, 6595, | SLC40A1 | −4.12 |
| | | | | 6989, | | |
| 7964602 | 1004 | NM_153377 | 1594 | 3457, 3537, 4639, 5656, 6683, 7048, | LRIG3 | −3.98 |
| 8021946 | 1005 | NM_130386 | 1595 | 2891, 4601, 6579, | COLEC12 | −3.86 |
| 7971296 | 1006 | NM_033255 | 1596 | 3367, 3694, 3693, 5738, 5732, 7664, 7742, | EPSTI1 | −3.83 |
| 8081298 | 1007 | NM_032787 | 1597 | 3995, 4847, 5470, 7733, 8308, 8445, | GPR128 | −3.63 |
| 8022674 | 1008 | NM_001792 | 1598 | 3134, 4668, 5546, | CDH2 | −3.38 |
| 7901316 | 1009 | NM_001011547 | 1599 | 4682, 4626, 4627, 6649, 6403, 7403, 7829, 6781, 6361, | SLC5A9 | −3.36 |
| 8052072 | 1010 | NM_000145 | 1600 | 4265, 5021, 5022, 6252, 5713, 7612, 7221, 6397, | FSHR | −3.33 |
| 7924342 | 1011 | NM_018713 | 1601 | 3493, 3718, 6268, 6130, 8273, 8216, | SLC30A10 | −3.27 |
| 8169580 | 1012 | NM_001560 | 1602 | 2683, 3219, 6256, 6220, 8730, 6320, | IL13RA1 | −3.20 |
| 7977786 | 1013 | NM_001126105 | 1603 | 2789, 5292, 5291, 7158, 7255, 5870, 8255, 6471, 7642, | SLC7A7 | −3.14 |
| 8097449 | 1014 | NM_032961 | 1604 | 2914, 2936, 2935, 7099, 5512, 8691, | PCDH10 | −3.11 |
| 8154135 | 1015 | NM_004170 | 1605 | 3070, 5025, 5401, 7218, 8331, | SLC1A1 | −3.07 |
| 8132347 | 1016 | NM_181791 | 1606 | 3313, 3318, 6342, 5701, 6692, | GPR141 | −3.05 |
| 8111677 | 1017 | NM_001127671 | 1607 | 2551, 4403, 4404, 5491, 7187, 7919, 8314, 7758, | LIFR | −2.98 |
| 8171472 | 1018 | NM_020665 | 1608 | 2960, 4942, 6430, | TMEM27 | −2.95 |
| 8175217 | 1019 | NM_001448 | 1609 | 2738, 3072, 6154, | GPC4 | −2.93 |
| 8045664 | 1020 | NM_177964 | 1610 | 3039, 3538, 8714, 5464, 7286, 6455, 7123, 7806, 7494, | LYPD6B | −2.91 |
| | | | | 8341, 7067, 6613, | | |
| 7948058 | 1021 | NM_153696 | 1611 | 3060, 3615, 2779, 2843, 3871, 2598, 4703, 4705, 4140, | FOLH1 | −2.90 |
| | | | | 4138, 2773, 3026, 3280, 5177, 5176, 2766, 5178, 3821, | | |
| | | | | 6173, 5921, 6307, 5425, 6469, 6968, | | |
| 7971104 | 1022 | NM_016179 | 1612 | 3415, 4643, 4644, 4645, 4646, 4647, 4648, 7469, 7085, | TRPC4 | −2.88 |
| | | | | 8143, 6069, 7054, 6227, 6264, 7998, 7627, 6564, 7066, | | |
| 8094520 | 1023 | NM_032457 | 1613 | 2723, 5014, 5015, 2937, 5262, 5768, 5971, | PCDH7 | −2.88 |
| 8143534 | 1024 | NM_000420 | 1614 | 2886, 2987, 6934, 8187, 8288, 6818, 6144, 8559, | KEL | −2.78 |
| 8045795 | 1025 | NM_002239 | 1615 | 2667, 3201, 5594, 8178, | KCNJ3 | −2.72 |
| 7911273 | 1026 | NM_001004696 | 1616 | 3717, 6107, | OR2T4 | −2.71 |
| 8165658 | 1027 | X59268 | 1617 | 2553, 3426, 3422, 6269, | VIPR2 | −2.68 |
| 7976073 | 1028 | NM_013231 | 1618 | 4059, 3816, 5667, | FLRT2 | −2.66 |
| 7923978 | 1029 | NM_001773 | 1619 | 2563, 3891, 3854, 5956, 6086, 5785, 6059, 8087, | CD34 | −2.64 |
| 8101992 | 1030 | NM_001135146 | 1620 | 2875, 4623, 4624, 3783, 4625, 7838, 6311, 8464, 6341, | SLC39A8 | −2.63 |
| | | | | 7047, | | |
| 8083887 | 1031 | NM_001185056 | 1621 | 2958, 5141, 4593, 7870, 5315, 6845, 7064, 7947, 8104, | CLDN11 | −2.57 |
| 8049471 | 1032 | NM_020311 | 1622 | 3396, 4030, 5457, | CXCR7 | −2.52 |
| 7963786 | 1033 | NM_002205 | 1623 | 3341, 3761, 5661, 6880, | ITGA5 | −2.48 |
| 8046861 | 1034 | NM_002210 | 1624 | 2615, 4762, 4763, 4764, 8678, 6893, 8003, 7665, 5446, | ITGAV | −2.44 |
| | | | | 6625, | | |
| 8140995 | 1035 | NM_001742 | 1625 | 2561, 4912, 4913, 4914, 6611, 6073, 7384, 7536, 6539, | CALCR | −2.43 |
| 8082928 | 1036 | NM_016369 | 1626 | 4183, 3788, 3787, 8686, 5317, 6211, | CLDN18 | −2.41 |
| 8003298 | 1037 | NM_003486 | 1627 | 2755, 3870, 5397, | SLC7A5 | −2.32 |
| 7964745 | 1038 | NM_016056 | 1628 | 3443, 2942, 4069, 7063, 6210, 5607, 7161, | TMBIM4 | −2.32 |
| 8090823 | 1039 | NM_005630 | 1629 | 2724, 4396, 7489, 6355, 8401, 8414, 8074, 5640, | SLCO2A1 | −2.29 |
| 8111255 | 1040 | NM_006727 | 1630 | 2788, 5142, 8497, 5507, 8253, 8371, | CDH10 | −2.29 |
| 7955797 | 1041 | NM_020547 | 1631 | 4056, 4904, 4903, 4905, 7400, 5395, | AMHR2 | −2.28 |
| 7952341 | 1042 | NM_024769 | 1632 | 3321, 3556, 7605, 6402, | ASAM | −2.26 |
| 8092726 | 1043 | NM_021101 | 1633 | 2752, 5133, 5652, 7810, | CLDN1 | −2.26 |
| 8070421 | 1044 | NM_001389 | 1634 | 2796, 3591, 6842, | DSCAM | −2.15 |
| 8004691 | 1045 | NM_203411 | 1635 | 3456, 3564, 5821, | TMEM88 | −2.15 |
| 7923991 | 1046 | NM_025179 | 1636 | 4111, 4029, 6303, 8403, 6499, | PLXNA2 | −2.14 |
| 8037298 | 1047 | NM_020406 | 1637 | 3744, 4005, 6408, 7480, 7666, | CD177 | −2.14 |
| 8098041 | 1048 | NM_018342 | 1638 | 2802, 3163, 3170, 3261, 3319, 3506, 3267, 4584, 8697, | TMEM144 | −2.13 |
| | | | | 8424, 5686, 8259, 8744, 8370, 7977, 8192, 7923, 7849, | | |
| | | | | 8039, 7954, 8413, 7830, | | |
| 8142687 | 1049 | NM_005302 | 1639 | 3208, 3301, 5833, | GPR37 | −2.09 |
| 7919340 | 1050 | NM_005266 | 1640 | 3364, 4104, 4105, 7691, 6103, 6550, 5474, | GJA5 | −2.09 |
| 7983527 | 1051 | NM_024966 | 1641 | 3078, 3079, 3080, 3081, 3082, 4192, 4279, 3184, 3186, | SEMA6D | −2.08 |
| | | | | 3187, 3185, 3188, 3183, 6040, 7595, 5709, 6809, 6877, | | |
| | | | | 7470, 6289, 5994, | | |
| 8151952 | 1052 | NM_024759 | 1642 | 4112, 2892, 8672, 8517, 8125, 6122, 8051, 8637, | NIPAL2 | −2.08 |
| 8114896 | 1053 | NM_194251 | 1643 | 3379, 3780, 5572, | GPR151 | −2.07 |
| 8113551 | 1054 | NM_002387 | 1644 | 3412, 4147, 4148, 8175, 8246, 5792, 7893, | MCC | −2.00 |
| 7944554 | 1055 | NM_174926 | 1645 | 4534, 5202, 5203, 5204, 5205, 5206, 5207, 5208, 6407, | TMEM136 | −1.98 |
| | | | | 5814, | | |
| 8067029 | 1056 | NM_002237 | 1646 | 2710, 3445, 4245, 2913, 3399, 4162, 8728, 6738, 7204, | KCNG1 | −1.94 |
| | | | | 6263, 7217, 6415, | | |
| 8112803 | 1057 | NM_005779 | 1647 | 3315, 4380, 4381, 3977, 8589, 8081, 8592, 8563, 6988, | LHFPL2 | −1.89 |
| | | | | 8101, | | |
| 8175288 | 1058 | NM_019556 | 1648 | 2903, 2824, 6997, 8283, 6003, 6290, 7788, 7752, 5881, | MOSPD1 | −1.87 |
| 8068810 | 1059 | NM_018964 | 1649 | 2845, 3683, 6723, 7548, 6976, 5984, 7385, 8095, | SLC37A1 | −1.86 |
| 8096839 | 1060 | NM_198506 | 1650 | 3439, 4440, 5693, 7042, 6600, | LRIT3 | −1.86 |
| 8059279 | 1061 | NM_004438 | 1651 | 3926, 3577, 6427, 7497, 5543, | EPHA4 | −1.84 |
| 7916862 | 1062 | NM_024911 | 1652 | 3473, 5169, 5171, 5170, 6985, 7944, 8040, 5423, 6217, | GPR177 | −1.83 |
| | | | | 5957, 7720, 6063, 8128, 6006, | | |
| 8043995 | 1063 | NM_000877 | 1653 | 2585, 2550, 2838, 3587, 3589, 3590, 3704, 3705, 4327, | IL1R1 | −1.80 |
| | | | | 3237, 7104, 5389, 7004, 6741, 7479, 7102, 7053, 7439, | | |
| | | | | 6674, 6715, 7705, 7500, 6803, 6643, | | |

Table 10:
Provided are the description of the membranal genes along with the sequence identifiers of the Affymetrix probes, the target sequence identified by the Affymetrix probe, and the mRNA sequences represented by the target sequences. Also shown are the log 2 fold change in expression levels of the indicated genes between the PDX1-GFP cells and the SOX17-GFP cells (PDX1-SOX17).
The (+) or (−) sign means that the genes are upregulated or downregulated, respectively, in the PDX1-GFP cells as compared to the SOX17-GFP cells.

TABLE 11
Non-membranal genes which are upregulated in PDX1 cells as compared to SOX17 cells

| | Affy. target | | SEQ ID NO: | | | Log 2 fold |
|---|---|---|---|---|---|---|
| Probe | nucl. SEQ | Rep. Public | (Of Rep. | | Gene | change [PDX- |
| Set ID | ID NO: | ID | Public ID) | Polyn. SEQ ID NOs: rep. by target | Symbol | SOX17] |
| 8049128 | 1064 | NM_031313 | 1654 | 2557, 4233, 5696, | ALPPL2 | 5.61 |
| 8127522 | 1065 | NM_001025290 | 1655 | 4388, 5232, 5916, | DPPA5 | 5.51 |
| 7945680 | 1066 | NR_030533 | 1656 | 3526, 4930, 3779, 6619, 7610, 6652, 6726, 6561, 7131, | H19 | 5.26 |
| | | | | 6743, 7010, 6680, 6895, 7340, 7012, 6491, | | |
| 7917037 | 1067 | NM_001889 | 1657 | 3420, 2605, 3199, 3619, 4456, 4457, 4458, 4612, 6114, | CRYZ | 4.85 |
| | | | | 6052, 6863, 6288, 6530, 6018, 8189, | | |
| 7933194 | 1068 | NM_199168 | 1658 | 2665, 5012, 5013, 5117, 5003, 6588, 8491, 7914, 6051, | CXCL12 | 4.67 |
| | | | | 6656, 6859, | | |
| 7902345 | 1069 | NM_001162916 | 1659 | 3648, 4873, 4874, 4872, 8405, 6496, 6385, 8689, 7110, | TYW3 | 4.48 |
| | | | | 8780, 6273, | | |
| 7901497 | 1070 | NM_001004339 | 1660 | 3328, 4808, 6317, 5872, | ZYG11A | 4.16 |
| 7985159 | 1071 | NM_004378 | 1661 | 3015, 4439, 5645, | CRABP1 | 3.92 |
| 8146092 | 1072 | NM_002164 | 1662 | 2584, 5259, 5421, 8523, 8757, 8169, 8149, 8114, 8319, | IDO1 | 3.92 |
| | | | | 7915, 8778, | | |
| 8178470 | 1073 | NM_203289 | 1663 | 2865, 2866, 2867, 2868, 3988, 3986, 4587, 5026, 5027, | POU5F1 | 3.76 |
| | | | | 5028, 5029, 5030, 5031, 5032, 5033, 5034, 5035, 5036, | | |
| | | | | 5037, 5038, 5039, 5040, 5041, 5042, 5043, 5044, 5045, | | |
| | | | | 5046, 5047, 5048, 5049, 5050, 5051, 5052, 5053, 5054, | | |
| | | | | 5055, 5056, 5057, 5058, 5059, 5060, 5061, 5062, 5063, | | |
| | | | | 5064, 5065, 5066, 5067, 5068, 5069, 5070, 5071, 5072, | | |
| | | | | 5073, 5074, 5075, 5076, 5077, 5078, 5079, 5080, 5081, | | |
| | | | | 5082, 5083, 5084, 5085, 5086, 5087, 5088, 5089, 5090, | | |
| | | | | 5091, 5092, 5093, 5094, 5095, 5096, 5097, 5098, 5099, | | |
| | | | | 5100, 5101, 5102, 5103, 5104, 4227, 4228, 4229, 4230, | | |
| | | | | 4231, 3958, 3959, 4369, 5016, 5017, 4052, 5175, 5179, | | |
| | | | | 8740, 7043, 6463, 8204, 6434, 6854, 6431, 8068, 6882, | | |
| | | | | 7219, 7760, 8266, 8247, 6495, 7073, 7834, 7275, 7155, | | |
| | | | | 8483, 6801, 7986, 6354, 8509, 6963, 7415, 7877, 6325, | | |
| | | | | 7358, 5405, 7117, 6852, 8575, 6970, 7641, 7552, | | |
| 8121850 | 1074 | NM_012259 | 1664 | 4276, 3975, 5989, 6023, | HEY2 | 3.74 |
| 8124380 | 1075 | NM_005325 | 1665 | 3881, 4053, 5377, | HIST1H1A | 3.70 |
| 8063536 | 1076 | NM_003222 | 1666 | 3168, 3531, 5324, | TFAP2C | 3.69 |
| 8089438 | 1077 | NM_138815 | 1667 | 3289, 4865, 8060, | DPPA2 | 3.63 |
| 8098690 | 1078 | NM_174900 | 1668 | 3498, 3937, 5793, 8300, | ZFP42 | 3.59 |
| 7971838 | 1079 | NM_007015 | 1669 | 3028, 3784, 3785, 7153, 6673, | LECT1 | 3.54 |
| 8147244 | 1080 | NM_022351 | 1670 | 3290, 4737, 6800, 7785, 7823, 8669, 7989, 8696, | NECAB1 | 3.48 |
| 7983239 | 1081 | NM_020990 | 1671 | 4017, 4725, 3845, 3844, 5618, 8459, 7658, 6700, 6805, | CKMT1A | 3.47 |
| | | | | 7001, 6390, 7746, 7418, 6964, 8012, 7084, 7264, 7777, | | |
| | | | | 8717, 7315, 6930, 7503, 6473, 7092, 7417, 7902, 7582, | | |
| 8066117 | 1082 | NM_015474 | 1672 | 3449, 5023, 3830, 5349, 5541, 7106, 6100, | SAMHD1 | 3.46 |
| 8097256 | 1083 | NM_198041 | 1673 | 2576, 5304, 4197, 5305, 5478, 5980, 5822, | FGF2 | 3.44 |
| 7913216 | 1084 | NM_000300 | 1674 | 2906, 4866, 4867, 4868, 4869, 6945, 6892, 8598, 8048, | PLA2G2A | 3.42 |
| | | | | 8615, 6396, 7663, | | |
| 8151240 | 1085 | NM_024504 | 1675 | 2858, 3552, 5534, | PRDM14 | 3.39 |
| 8124889 | 1086 | NM_203289 | 1676 | 2865, 2866, 2867, 2868, 3988, 3986, 4587, 5026, 5027, | POU5F1 | 3.39 |
| | | | | 5028, 5029, 5030, 5031, 5032, 5033, 5034, 5035, 5036, | | |
| | | | | 5037, 5038, 5039, 5040, 5041, 5042, 5043, 5044, 5045, | | |
| | | | | 5046, 5047, 5048, 5049, 5050, 5051, 5052, 5053, 5054, | | |
| | | | | 5055, 5056, 5057, 5058, 5059, 5060, 5061, 5062, 5063, | | |
| | | | | 5064, 5065, 5066, 5067, 5068, 5069, 5070, 5071, 5072, | | |
| | | | | 5073, 5074, 5075, 5076, 5077, 5078, 5079, 5080, 5081, | | |
| | | | | 5082, 5083, 5084, 5085, 5086, 5087, 5088, 5089, 5090, | | |
| | | | | 5091, 5092, 5093, 5094, 5095, 5096, 5097, 5098, 5099, | | |
| | | | | 5100, 5101, 5102, 5103, 5104, 4227, 4228, 4229, 4230, | | |
| | | | | 4231, 3958, 3959, 4369, 5016, 5017, 4052, 5175, 5179, | | |
| | | | | 8740, 7043, 6463, 8204, 6434, 6854, 6431, 8068, 6882, | | |
| | | | | 7219, 7760, 8266, 8247, 6495, 7073, 7834, 7275, 7155, | | |
| | | | | 8483, 6801, 7986, 6354, 8509, 6963, 7415, 7877, 6325, | | |
| | | | | 7358, 5405, 7117, 6852, 8575, 6970, 7641, 7552, | | |
| 8139212 | 1087 | NM_000168 | 1677 | 3991, 3982, 2577, 4553, 3392, 4592, 6480, 7171, 6577, | GLI3 | 3.38 |
| | | | | 6439, 8751, 6708, | | |
| 8071809 | 1088 | NM_000854 | 1678 | 2877, 3667, 4143, 4144, 5682, 5316, | GSTT2 | 3.36 |
| 7904158 | 1089 | NM_020190 | 1679 | 3467, 3697, 6147, 5677, 8035, 6986, | OLFML3 | 3.31 |
| 8085676 | 1090 | NM_001351 | 1680 | 3383, 5153, 5154, 6778, | DAZL | 3.30 |
| 8056408 | 1091 | NM_004482 | 1681 | 3996, 3990, 3410, 3332, 4301, 4196, 6671, 7016, 6517, | GALNT3 | 3.29 |
| | | | | 7277, 7565, 6510, 6479, 6804, 6507, | | |
| 8084165 | 1092 | NM_003106 | 1682 | 3338, 5264, 5632, | SOX2 | 3.28 |
| 8148315 | 1093 | NM_001159542 | 1683 | 5084, 4815, 6578, 6639, | POU5F1B | 3.27 |
| 7941662 | 1094 | NM_001104 | 1684 | 3432, 2761, 8043, 7856, 8550, | ACTN3 | 3.27 |
| 7949971 | 1095 | NM_001876 | 1685 | 2870, 4398, 4399, 7075, 5473, | CPT1A | 3.26 |
| 7970954 | 1096 | NM_004734 | 1686 | 4221, 5192, 5193, 5194, 5195, 5448, 7317, 6024, 6492, | DCLK1 | 3.26 |
| | | | | 7076, | | |
| 8112980 | 1097 | NM_005711 | 1687 | 2720, 3295, 8700, 8201, 7504, 5630, | EDIL3 | 3.23 |
| 7953675 | 1098 | NM_024865 | 1688 | 3571, 3299, 4206, 5371, | NANOG | 3.23 |
| 8077513 | 1099 | NM_015453 | 1689 | 2882, 2944, 4333, 4334, 6458, 6573, 7246, 8510, 6238, | THUMPD3 | 3.22 |
| | | | | 6855, 6555, 8394, 7095, 6527, | | |
| 7909642 | 1100 | NM_001136475 | 1690 | 3791, 4510, 4251, 3161, 3278, 3303, 4655, 4653, 4654, | VASH2 | 3.19 |
| | | | | 6082, 5905, 6123, 6062, 6304, 5489, 8315, 6152, 8644, | | |
| | | | | 8692, | | |
| 8024712 | 1101 | NM_033064 | 1691 | 3258, 3101, 4560, 3035, 4405, 5929, 7505, 5849, 7325, | ATCAY | 3.18 |
| 7965565 | 1102 | NM_032147 | 1692 | 3062, 3978, 3979, 6775, 5436, | USP44 | 3.18 |
| 8117422 | 1103 | NM_003540 | 1693 | 3825, 3059, 7626, | HIST1H4F | 3.12 |
| 7987365 | 1104 | NM_024865 | 1694 | 3571, 3299, 4206, 5371, | NANOG | 3.09 |
| 8172471 | 1105 | NM_006875 | 1695 | 2994, 4637, 7671, 8024, 6884, | PIM2 | 3.08 |
| 8061746 | 1106 | NM_006892 | 1696 | 3002, 3249, 3250, 3251, 5288, 6284, 6608, 5831, 5310, | DNMT3B | 3.05 |
| | | | | 6240, 7520, 7394, 6299, | | |
| 8157193 | 1107 | NM_133464 | 1697 | 4219, 4428, 4429, 7118, 6162, 5698, | ZNF483 | 3.04 |
| 8142580 | 1108 | NM_001024613 | 1698 | 4758, 4836, 4837, 7698, 6675, 7454, 5751, | FEZF1 | 3.04 |
| 8171758 | 1109 | NR_023358 | 1699 | 4408, | SCARNA9L | 3.04 |
| 8108995 | 1110 | NM_054023 | 1700 | 3022, 4995, 8754, 8215, 5614, | SCGB3A2 | 3.00 |
| 7963970 | 1111 | NM_006928 | 1701 | 3105, 5245, 6941, 6287, | SILV | 2.98 |
| 8122099 | 1112 | NM_006208 | 1702 | 3492, 4353, 5924, 6245, 8263, 8565, 7205, | ENPP1 | 2.94 |
| 8148317 | 1113 | NM_002467 | 1703 | 2869, 4851, 6776, 7274, | MYC | 2.90 |
| 8039280 | 1114 | NM_139176 | 1704 | 4509, 4372, 4373, 4374, 7316, 5964, 5724, 7405, 7354, | NLRP7 | 2.88 |
| | | | | 7602, | | |
| 7930631 | 1115 | NM_198795 | 1705 | 3518, 3513, 6133, 6452, 5445, 6004, 5919, | TDRD1 | 2.86 |
| 8152938 | 1116 | NM_001145095 | 1706 | 2750, 4755, 7527, 8041, | HHLA1 | 2.86 |
| 8001531 | 1117 | NM_005950 | 1707 | 3006, 2840, 6392, 7114, 7170, 6815, | MT1G | 2.85 |
| 8095043 | 1118 | NM_023940 | 1708 | 3792, 3377, 8732, 5428, 8096, | RASL11B | 2.79 |
| 7949124 | 1119 | NM_001164716 | 1709 | 2730, 4906, 4290, 8065, 5323, | PYGM | 2.78 |
| 8073062 | 1120 | NM_004900 | 1710 | 2835, 3155, 5168, 5750, 5753, | APOBEC3B | 2.78 |
| 8148070 | 1121 | NM_021110 | 1711 | 4389, 2612, 2613, 2692, 2964, 3160, 4321, 3750, 8105, | COL14A1 | 2.71 |
| | | | | 5673, 5636, 7386, 8362, 7397, 5443, | | |
| 8015635 | 1122 | NM_012232 | 1712 | 3561, 4938, 6271, 5910, | PTRF | 2.69 |
| 8138708 | 1123 | NM_005522 | 1713 | 3389, 3921, 3920, 5895, 5930, | HOXA1 | 2.67 |
| 8028991 | 1124 | NM_030622 | 1714 | 3461, 3715, 5647, 5708, | CYP2S1 | 2.66 |
| 8169115 | 1125 | NM_198465 | 1715 | 3311, 4081, 5354, | NRK | 2.65 |
| 7949104 | 1126 | NM_001098670 | 1716 | 2786, 2787, 2742, 3987, 2749, 3104, 3106, 3428, 4186, | RASGRP2 | 2.64 |
| | | | | 4187, 3200, 6996, 7253, 7251, 6422, 6110, 6605, 7167, | | |
| | | | | 6721, 6400, 7783, 7408, 7101, 6992, 8419, 6612, 7675, | | |
| | | | | 7336, 6494, 7993, 7692, 6747, 7413, | | |
| 7912473 | 1127 | NM_183412 | 1717 | 3680, 3848, 3023, 4316, 3818, 5249, 8328, 6632, 6172, | FBXO2 | 2.62 |
| | | | | 7087, 6489, 6785, 5411, | | |
| 7956488 | 1128 | NM_004984 | 1718 | 4336, 3578, 5671, 7555, | KIF5A | 2.62 |
| 8145977 | 1129 | NM_021623 | 1719 | 4259, 4207, 8302, 7202, 6843, 7732, 8390, | PLEKHA2 | 2.61 |
| 8096361 | 1130 | NM_016323 | 1720 | 3489, 4008, 8649, 5458, 8138, 8244, | HERC5 | 2.61 |
| 8104107 | 1131 | NM_173553 | 1721 | 3502, 3928, 3929, 4676, 4718, 3234, 7761, 8133, 7793, | TRIML2 | 2.60 |
| | | | | 5580, 8122, | | |
| 7986350 | 1132 | NM_183376 | 1722 | 3385, 4436, 5479, | ARRDC4 | 2.60 |
| 7975076 | 1133 | NM_021979 | 1723 | 3158, 4151, 7440, 5369, | HSPA2 | 2.59 |
| 7933092 | 1134 | NM_021045 | 1724 | 4114, 3320, 8456, 7285, 8408, 7542, 7283, 7447, 6137, | ZNF248 | 2.59 |
| 8134463 | 1135 | NM_002523 | 1725 | 3340, 4771, 5502, 6922, | NPTX2 | 2.57 |
| 7995838 | 1136 | NM_005952 | 1726 | 3371, 4455, 6391, | MT1X | 2.55 |
| 8096301 | 1137 | NM_001040058 | 1727 | 4706, 3942, 3501, 3944, 8278, 7992, 5370, 6716, 8452, | SPP1 | 2.55 |
| | | | | 8651, 6109, 6075, 7831, 7801, | | |
| 7963869 | 1138 | NM_002355 | 1728 | 3673, 5287, 3831, 7078, 5809, 6441, 5420, 7521, 5321, | PHC1 | 2.53 |
| 8097920 | 1139 | NM_004744 | 1729 | 3566, 3595, 8748, 8069, 7763, 8070, 5620, | LRAT | 2.51 |
| 8031576 | 1140 | NM_134444 | 1730 | 3031, 4444, 5611, 5951, | NLRP4 | 2.49 |
| 8116418 | 1141 | NM_005110 | 1731 | 2751, 4135, 8471, 5407, 8222, 8775, 7999, | GFPT2 | 2.47 |
| 8139820 | 1142 | NM_178558 | 1732 | 3061, 4448, 4449, 8320, 6601, 8790, 5658, | ZNF680 | 2.47 |
| 7989277 | 1143 | NM_004998 | 1733 | 3855, 3757, 5660, | MYO1E | 2.45 |
| 7983360 | 1144 | NM_004048 | 1734 | 3076, 3490, 6485, 6270, | B2M | 2.44 |
| 8120679 | 1145 | NM_018665 | 1735 | 2820, 2957, 4749, 6125, 7145, 8551, 6076, | DDX43 | 2.44 |
| 7914342 | 1146 | NM_004102 | 1736 | 2918, 3829, 8327, 8609, 8516, 5937, | FABP3 | 2.44 |
| 8147697 | 1147 | NM_024915 | 1737 | 4098, 4097, 4270, 4529, 3637, 3606, 3638, 4299, 4354, | GRHL2 | 2.43 |
| | | | | 5422, 7907, 7656, 8209, 8281, 7516, | | |
| 8044353 | 1148 | NM_001142807 | 1738 | 4470, 4673, 6005, 7357, 6866, 6663, 6681, | ACOXL | 2.41 |
| 8138489 | 1149 | NM_018719 | 1739 | 3585, 4801, 4802, 4803, 7510, 6116, 7011, 6541, 6183, | CDCA7L | 2.40 |
| | | | | 8558, | | |
| 8099524 | 1150 | NM_001290 | 1740 | 2733, 4590, 4591, 8679, 8166, 7837, 8661, 8298, 5669, | LDB2 | 2.39 |
| | | | | 8605, 7719, 7814, 8032, 8473, 7455, 8734, | | |
| 8020384 | 1151 | NM_001142966 | 1741 | 4467, 2876, 4295, 4675, 7359, 7061, 5529, 7232, | KIAA1772 | 2.39 |
| 8103254 | 1152 | NM_003013 | 1742 | 2933, 3724, 5471, | SFRP2 | 2.38 |
| 8078435 | 1153 | NM_001039111 | 1743 | 3892, 3922, 6993, | TRIM71 | 2.38 |
| 7928429 | 1154 | NM_002658 | 1744 | 3397, 4752, 4753, 6308, 6729, 8322, 7727, 8611, 6028, | PLAU | 2.37 |
| | | | | 6300, 8374, | | |
| 8121277 | 1155 | NM_001624 | 1745 | 4575, 4051, 6064, 6887, 8412, 5596, | AIM1 | 2.36 |
| 7995797 | 1156 | NM_175617 | 1746 | 3381, 3905, 5861, 5789, | MT1E | 2.36 |
| 8015607 | 1157 | NM_139276 | 1747 | 4260, 3613, 3614, 3636, 7860, 7019, 6610, 8049, 5511, | STAT3 | 2.34 |
| | | | | 7592, 8190, 6553, | | |
| 7998921 | 1158 | NM_032805 | 1748 | 3149, 2932, 5400, | ZSCAN10 | 2.34 |
| 7983718 | 1159 | NM_001165257 | 1749 | 3014, 4909, 4908, 5333, | SCG3 | 2.33 |
| 7997336 | 1160 | NM_020927 | 1750 | 3166, 3189, 5813, | VAT1L | 2.32 |
| 7901087 | 1161 | NM_032756 | 1751 | 2922, 3690, 5860, | HPDL | 2.31 |
| 8124684 | 1162 | NM_001109809 | 1752 | 4390, 4684, 4850, 7287, 7191, 7216, 6705, 6979, 6515, | ZFP57 | 2.31 |
| | | | | 7376, 8185, 6500, 6658, | | |
| 8160260 | 1163 | NM_017637 | 1753 | 3551, 4555, 3100, 4545, 4032, 4033, 4034, 4035, 4036, | BNC2 | 2.30 |
| | | | | 4037, 2799, 3963, 6528, 6375, 7529, 7058, 6914, 7266, | | |
| | | | | 7235, 7564, 8608, 7382, 8765, | | |
| 8026424 | 1164 | NM_173483 | 1754 | 3826, 4241, 5547, | CYP4F22 | 2.30 |
| 8165217 | 1165 | NM_017617 | 1755 | 2850, 4176, 5567, | NOTCH1 | 2.30 |
| 8113278 | 1166 | NM_153234 | 1756 | 3387, 4341, 5548, | LIX1 | 2.30 |
| 7994609 | 1167 | NM_014298 | 1757 | 3509, 3569, 6447, 6560, 5343, | QPRT | 2.29 |
| 8137091 | 1168 | NM_170686 | 1758 | 3019, 4464, 4465, 8588, 6484, 7701, 5871, 8626, 7762, | ZNF398 | 2.29 |
| | | | | 7857, | | |
| 7936673 | 1169 | NM_002925 | 1759 | 3525, 3730, 3731, 8042, 7377, 6524, 6267, 6015, | RGS10 | 2.27 |
| 8162531 | 1170 | ENST00000396160 | 1760 | 7570, | MT1G | 2.26 |
| 8010354 | 1171 | NM_000152 | 1761 | 3217, 4085, 4086, 4087, 5704, 6841, | GAA | 2.25 |
| 8059301 | 1172 | NM_181460 | 1762 | 4255, 5159, 5161, 5162, 5163, 5164, 5165, 5158, 5160, | PAX3 | 2.23 |
| | | | | 7119, 5969, 5904, 7673, 5842, 7706, 6334, 5413, | | |
| 8006367 | 1173 | NM_138328 | 1763 | 3863, 3884, 5472, 7404, | RHBDL3 | 2.23 |
| 8106820 | 1174 | NM_006467 | 1764 | 4507, 4049, 6583, 8418, | POLR3G | 2.23 |
| 7914015 | 1175 | NM_052943 | 1765 | 3427, 4638, 5752, | FAM46B | 2.23 |
| 7995825 | 1176 | NM_005949 | 1766 | 3051, 4447, 5801, 6580, | MT1F | 2.22 |
| 7945296 | 1177 | NM_001080407 | 1767 | 3430, 4288, 6702, 8356, 8044, 7094, 7185, 6706, | GLB1L3 | 2.21 |
| 8097928 | 1178 | NM_144979 | 1768 | 3391, 4586, 5462, | RBM46 | 2.21 |
| 8074335 | 1179 | NM_001195226 | 1769 | 2764, 3807, 3998, 4025, 2793, 2709, 3097, 3594, 5186, | PRODH | 2.21 |
| | | | | 5187, 5737, 7271, 5953, 7991, 7069, 6983, 7547, 8254, | | |
| | | | | 6370, 7730, 6607, 5836, | | |
| 8115196 | 1180 | NM_052860 | 1770 | 2952, 4996, 4997, 4998, 5526, 6512, 6897, | ZNF300 | 2.21 |
| 8163896 | 1181 | NM_004099 | 1771 | 2946, 3496, 3495, 6038, 5639, | STOM | 2.20 |
| 7948987 | 1182 | NM_007069 | 1772 | 3359, 4422, 4423, 5706, 6689, 7225, | PLA2G16 | 2.20 |
| 7942064 | 1183 | NM_015973 | 1773 | 3055, 3933, 5477, | GAL | 2.18 |
| 8150962 | 1184 | NM_014729 | 1774 | 2740, 3709, 6856, 6017, | TOX | 2.17 |
| 8046078 | 1185 | NM_020981 | 1775 | 2763, 5191, 6587, 5756, | B3GALT1 | 2.17 |
| 7978801 | 1186 | NM_182830 | 1776 | 3421, 4330, 5167, 6351, 6182, 7688, 8193, 6799, 7207, | MDGA2 | 2.17 |
| 7912481 | 1187 | NM_006341 | 1777 | 2774, 2791, 2768, 2798, 3111, 2967, 4393, 4394, 6406, | MAD2L2 | 2.16 |
| | | | | 7367, 7044, 5373, 7566, 7290, 7330, 6832, 7175, | | |
| 8143221 | 1188 | NM_130840 | 1778 | 4271, 3924, 3925, 3923, 8501, 8715, 6101, 5610, 7586, | ATP6V0A4 | 2.16 |
| 8121949 | 1189 | NM_000426 | 1779 | 3433, 4089, 4090, 6848, 5928, 7289, 6035, | LAMA2 | 2.16 |
| 7919787 | 1190 | NM_032132 | 1780 | 3665, 3069, 3254, 3722, 5240, 8304, 6029, 6113, 5998, | HORMAD1 | 2.15 |
| | | | | 7030, 5874, 5867, 8731, 6466, 5973, | | |
| 7938035 | 1191 | AL360187 | 1781 | 2821, 2822, 2823, 4283, 4533, 4544, 4481, 3016, 3162, | TRIM22 | 2.15 |
| | | | | 4213, 4312, 4320, 4326, 5229, 7088, 6634, 6762, 8083, | | |
| | | | | 6459, 8567, 6533, 6911, 6474, 7269, 7353, | | |
| 8018652 | 1192 | NM_052916 | 1782 | 4746, 5562, 5570, 5845, | RNF157 | 2.15 |
| 8052882 | 1193 | NM_001617 | 1783 | 3312, 2549, 4252, 4541, 3221, 3555, 5136, 5137, 5138, | ADD2 | 2.15 |
| | | | | 5139, 5140, 7591, 8079, 5513, 5527, 8334, 8155, 6282, | | |
| | | | | 7652, 6883, 7881, 7694, 6520, 6309, 7614, 7098, | | |
| 8168438 | 1194 | NM_145052 | 1784 | 3674, 4272, 2966, 4297, 4940, 4941, 7089, 8335, 6323, | UPRT | 2.15 |
| | | | | 6105, 6157, | | |
| 8125500 | 1195 | NM_004159 | 1785 | 3676, 2641, 2642, 4720, 3358, 3875, 3876, 6366, 7256, | PSMB8 | 2.15 |
| | | | | 7662, 7787, 7258, 6923, 7465, 7711, 6603, 7071, 8698, | | |
| | | | | 6850, 6638, 7406, 7295, 8663, 7850, 7345, 6440, 6333, | | |
| | | | | 7938, 7517, 6750, 8634, 6788, 7146, 8416, 7360, 7022, | | |
| | | | | 6858, 8225, 6666, 7687, 7230, 6844, 6589, 8360, 7319, | | |
| | | | | 8354, 7670, | | |
| 8033801 | 1196 | NM_001130031 | 1786 | 4039, 4450, 4451, 4452, 6833, 5584, 6691, | ZNF562 | 2.14 |
| 8171338 | 1197 | NM_174901 | 1787 | 3150, 5120, 5679, 6572, 7485, 7604, | FAM9C | 2.13 |
| 8097017 | 1198 | NM_003360 | 1788 | 2689, 4419, 4420, 5810, 8336, 6908, | UGT8 | 2.13 |
| 7956522 | 1199 | AF063608 | 1789 | 2859, 7555, | KIF5A | 2.11 |
| 7981945 | 1200 | BC043194 | 1790 | 3229, | SNRPN | 2.09 |
| 8035318 | 1201 | NM_001080421 | 1791 | 4963, 8704, 7597, 8506, 5412, | UNC13A | 2.09 |
| 8000757 | 1202 | NM_003586 | 1792 | 3325, 3610, 3233, 5788, 5896, | DOC2A | 2.09 |
| 8033767 | 1203 | NM_152476 | 1793 | 2982, 4116, 5683, | ZNF560 | 2.09 |
| 7931556 | 1204 | NM_014468 | 1794 | 2743, 3330, 5776, | VENTX | 2.07 |
| 8143772 | 1205 | NM_002889 | 1795 | 3103, 4674, 8675, 7835, 7515, 5341, | RARRES2 | 2.07 |
| 8096808 | 1206 | NM_032992 | 1796 | 3120, 3873, 3874, 4445, 8500, 7859, 7100, 6201, | CCDC109B | 2.06 |
| 7995783 | 1207 | NM_005953 | 1797 | 2919, 4617, 5366, | MT2A | 2.05 |
| 8013660 | 1208 | NM_005165 | 1798 | 3335, 3853, 6651, 5330, 6714, 7379, | ALDOC | 2.03 |
| 7983143 | 1209 | NM_020759 | 1799 | 4943, 5714, | STARD9 | 2.03 |
| 8008664 | 1210 | NM_003488 | 1800 | 3357, 3981, 5585, 8407, 7660, 5628, | AKAP1 | 2.03 |

Table 11:
Provided are the description of the non-membranal genes along with the sequence identifiers of the Affymetrix probes, the target sequence identified by the Affymetrix probe, and the mRNA sequences represented by the target sequences. Also shown are the log 2 fold change in expression levels of the indicated genes between the PDX1-GFP cells and the SOX17-GFP cells (PDX1-SOX17).
The (+) or (−) sign means that the genes are upregulated or downregulated, respectively, in the PDX1-GFP cells as compared to the SOX17-GFP cells.

TABLE 12
Non-membranal genes which are downregulated in PDX1 cells as compared to SOX17 cells

| | | | SEQ | | | Log 2 fold |
|---|---|---|---|---|---|---|
| | Affy. | | ID NO: | | | change |
| Probe | target nucl. | | (Of Rep. | | Gene | [PDX- |
| Set ID | SEQ ID NO: | Rep. Public ID | Public ID) | Polyn. SEQ ID NOs: rep. by target | Symbol | SOX17] |
| 8065412 | 1211 | NM_001898 | 1801 | 3369, 3033, 5734, 6511, | CST1 | −7.67 |
| 8160163 | 1212 | NM_005454 | 1802 | 3880, 3883, 6763, | CER1 | −7.42 |
| 7934979 | 1213 | NM_014391 | 1803 | 2995, 3511, 5932, | ANKRD1 | −5.27 |
| 8136807 | 1214 | — | | | TRY6 | −5.22 |
| 8152617 | 1215 | NM_005328 | 1804 | 2676, 4348, 5843, 6409, | HAS2 | −5.08 |
| 7927631 | 1216 | NM_012242 | 1805 | 3471, 3796, 7543, 8463, 8242, 5959, | DKK1 | −5.03 |
| 8136790 | 1217 | — | | | PRSS2 | −4.58 |
| 7997188 | 1218 | NM_005143 | 1806 | 3893, 4016, 4018, 2580, 2622, 2977, 2992, 3453, | HP | −4.53 |
| | | | | 3617, 4365, 4366, 6921, 6310, 6000, 6001, | | |
| 7921834 | 1219 | NM_001643 | 1807 | 2901, 2758, 6253, 8161, 7460, 7113, 8544, 6696, | APOA2 | −4.50 |
| | | | | 7530, 7963, 6627, 6449, | | |
| 8106986 | 1220 | NM_014899 | 1808 | 3394, 4041, 7121, 8530, 7782, 8683, 8248, 7828, 8218, 8489, | RHOBTB3 | −4.44 |
| 8060850 | 1221 | NM_001200 | 1809 | 3900, 6567, | BMP2 | −4.43 |
| 8171449 | 1222 | NM_021804 | 1810 | 3847, 4462, 6787, 7949, 7759, 7328, 5427, | ACE2 | −4.39 |
| 8149825 | 1223 | NM_003155 | 1811 | 2725, 3793, 5771, | STC1 | −4.32 |
| 7904843 | 1224 | NM_002614 | 1812 | 3336, 5243, 4204, 7461, 7260, 6532, 6226, 7090, | PDZK1 | −4.29 |
| | | | | 6900, 7707, 7472, 6465, | | |
| 7929282 | 1225 | NM_002729 | 1813 | 2961, 4124, 7867, 5797, 8612, | HHEX | −4.18 |
| 8048319 | 1226 | NM_007127 | 1814 | 4477, 4578, 5439, | VIL1 | −4.16 |
| 8121257 | 1227 | NM_182907 | 1815 | 3253, 5303, 4361, 6228, 6168, 8184, 8624, 7700, | PRDM1 | −4.07 |
| 8085946 | 1228 | NM_005442 | 1816 | 3171, 3140, 5868, 7137, 7635, | EOMES | −4.01 |
| 7968872 | 1229 | NM_013238 | 1817 | 3842, 3846, 7013, 8073, | DNAJC15 | −3.99 |
| 8092095 | 1230 | NM_015028 | 1818 | 4193, 4852, 4853, 4854, 4855, 4856, 4857, 4858, | TNIK | −3.97 |
| | | | | 4859, 4860, 8054, 5939, 6549, 7883, 5603, 6786, | | |
| | | | | 7448, 7215, 8447, 8382, 7882, 6219, | | |
| 8058857 | 1231 | NM_000599 | 1819 | 2583, 4357, 8723, 5360, | IGFBP5 | −3.95 |
| 8121803 | 1232 | NM_001010852 | 1820 | 3116, 3869, 5483, 6248, | RLBP1L2 | −3.92 |
| 8088560 | 1233 | NM_182920 | 1821 | 4100, 3333, 8622, 8439, 8457, 6636, 7795, 8233, | ADAMTS9 | −3.90 |
| | | | | 8784, | | |
| 7971296 | 1234 | NM_033255 | 1822 | 3367, 3694, 3693, 5738, 5732, 7664, 7742, | EPSTI1 | −3.83 |
| 8163839 | 1235 | NM_001735 | 1823 | 3997, 3497, 8045, 5344, 6954, 6376, | C5 | −3.80 |
| 8096160 | 1236 | NM_001025616 | 1824 | 3856, 4013, 4014, 4012, 8287, 7220, 7970, 6456, | ARHGAP24 | −3.76 |
| | | | | 8329, 8596, 5517, 8693, 8490, | | |
| 8136801 | 1237 | NM_002770 | 1825 | 3326, 3327, 4043, 4044, 3896, 4082, 2633, 3056, | TRY6 | −3.73 |
| | | | | 4031, 3057, 4349, 5199, 5294, 5200, 4875, 7372, | | |
| | | | | 5743, 6222, 8379, | | |
| 8149071 | 1238 | NM_001147 | 1826 | 2696, 4344, 4345, 4346, 5744, 7577, | ANGPT2 | −3.73 |
| 8020795 | 1239 | NM_000371 | 1827 | 2722, 4730, 6739, 5362, | TTR | −3.71 |
| 8139307 | 1240 | NM_021223 | 1828 | 3043, 3698, 7148, 5334, 7843, 7318, 7526, | MYL7 | −3.71 |
| 8105302 | 1241 | NM_013409 | 1829 | 3343, 5282, 5281, 7924, 7913, 6382, 5408, | FST | −3.66 |
| 7965322 | 1242 | NM_000899 | 1830 | 4054, 5149, 5148, 6216, 5328, 6318, 7574, | KITLG | −3.65 |
| 7926105 | 1243 | NM_002051 | 1831 | 2915, 3695, 3696, 6780, 6049, 7381, | GATA3 | −3.65 |
| 8113358 | 1244 | NM_005668 | 1832 | 3302, 4599, 3244, 7055, 7738, 5386, | ST8SIA4 | −3.60 |
| 8057377 | 1245 | NM_173648 | 1833 | 3425, 5152, 5914, 5666, 7929, | CCDC141 | −3.57 |
| 8151931 | 1246 | NM_033512 | 1834 | 3241, 3675, 5757, | TSPYL5 | −3.56 |
| 8105013 | 1247 | NM_152403 | 1835 | 3530, 5277, 5276, 5275, 6119, 5859, 8466, 5742, | EGFLAM | −3.55 |
| | | | | 6783, 8384, 6717, 7825, 8629, 8422, 7942, 6265, | | |
| 8057056 | 1248 | NM_133378 | 1836 | 3308, 2656, 3424, 4106, 4107, 3344, 3048, 5008, | TTN | −3.52 |
| | | | | 5009, 5011, 5007, 5010, 7368, 5887, 5945, 7339, | | |
| | | | | 6830, 8194, 6950, 6315, 6321, 6481, 7366, 6697, | | |
| | | | | 6793, 7546, 6131, 5681, | | |
| 7924682 | 1249 | NM_003240 | 1837 | 3558, 4989, 4988, 8493, 7506, 6104, | LEFTY2 | −3.52 |
| 8065344 | 1250 | NM_021784 | 1838 | 2770, 4577, 4466, 5823, 7393, 7364, 6571, | FOXA2 | −3.38 |
| 8129231 | 1251 | NM_024581 | 1839 | 3503, 4208, 4209, 8021, 7766, 5900, 8495, 6262, | FAM184A | −3.38 |
| 8147030 | 1252 | NM_007029 | 1840 | 4711, 5225, 5342, | STMN2 | −3.35 |
| 7976858 | 1253 | NM_001362 | 1841 | 2990, 4161, 8265, 6088, | DIO3 | −3.33 |
| 8058765 | 1254 | NM_054034 | 1842 | 3732, 3409, 3983, 4677, 4679, 3284, 3310, 3403, | FN1 | −3.33 |
| | | | | 3404, 3405, 3406, 4727, 3110, 4551, 4571, 4572, | | |
| | | | | 4576, 3822, 3494, 2852, 3620, 3621, 3622, 3623, | | |
| | | | | 3624, 3625, 5996, 7280, 7649, 6915, 8364, 8529, | | |
| | | | | 6768, 7398, 5846, 6424, 8736, 8430, 7036, 5993, | | |
| | | | | 8153, 8487, 6324, 6771, 6223, 6205, 5539, 6620, | | |
| | | | | 6121, 6206, 8147, 5687, | | |
| 8136795 | 1255 | NM_002769 | 1843 | 4044, 4083, 5224, 7372, 8647, 5627, 7412, 7969, | PRSS1 | −3.32 |
| 7912520 | 1256 | NM_002521 | 1844 | 3029, 3909, 7941, 6388, | NPPB | −3.32 |
| 7921916 | 1257 | NM_001195303 | 1845 | 3306, 5190, 5110, 7452, 5828, 6057, | RGS5 | −3.30 |
| 8121144 | 1258 | NM_024641 | 1846 | 4179, 5290, 6156, 5952, 8006, | MANEA | −3.29 |
| 7979357 | 1259 | NM_021728 | 1847 | 3073, 3223, 3224, 6604, 6242, | OTX2 | −3.28 |
| 8047381 | 1260 | NM_003879 | 1848 | 2698, 2700, 2701, 2702, 2703, 2697, 2727, 2728, | CFLAR | −3.28 |
| | | | | 2729, 2714, 2715, 2716, 2717, 2718, 3809, 3282, | | |
| | | | | 4540, 4723, 2706, 2695, 2707, 4275, 4518, 2881, | | |
| | | | | 4319, 5254, 5255, 7718, 7181, 7213, 6901, 7210, | | |
| | | | | 7050, 6868, 7797, 7093, 6246, 6301, 6416, 6026, | | |
| | | | | 8088, 7173, 6972, 6669, 7157, 7540, 7179, 6019, | | |
| | | | | 5721, | | |
| 8058498 | 1261 | NM_003468 | 1849 | 2934, 4015, 5838, | FZD5 | −3.27 |
| 8054517 | 1262 | AK095678 | 1850 | 3119, 2978, 6378, 5623, 6529, | LOC151009 | −3.24 |
| 7961875 | 1263 | NM_152590 | 1851 | 4498, 4781, 4782, 4784, 4785, 4783, 5790, 7143, | IFLTD1 | −3.23 |
| | | | | 6544, 6853, | | |
| 7938231 | 1264 | NM_003621 | 1852 | 3011, 4355, 5626, | PPFIBP2 | −3.18 |
| 8166747 | 1265 | NM_001163335 | 1853 | 3411, 4887, 4885, 4886, 5912, 6888, 5629, | SYTL5 | −3.13 |
| 8019964 | 1266 | NM_001010000 | 1854 | 2803, 5198, 5415, 6442, 5664, 6551, 7534, 7585, | ARHGAP28 | −3.12 |
| 7957458 | 1267 | NM_006183 | 1855 | 2948, 5242, 5429, | NTS | −3.09 |
| 8050619 | 1268 | NM_000384 | 1856 | 2558, 3976, 5351, | APOB | −3.08 |
| 8065416 | 1269 | NM_001322 | 1857 | 3515, 3034, 5782, | CST2 | −3.05 |
| 7942998 | 1270 | NM_153696 | 1858 | 3060, 2843, 3280, 5177, 2766, 5178, 6173, 5921, | FOLH1B | −3.04 |
| | | | | 6307, 5425, 6469, | | |
| 8070579 | 1271 | NM_003225 | 1859 | 2552, 3668, 5847, | TFF1 | −3.04 |
| 8165663 | 1272 | AK172782 | 1860 | 3609, | GPAM | −3.04 |
| 8023598 | 1273 | NM_173557 | 1861 | 3123, 3946, 5605, | RNF152 | −3.04 |
| 8140650 | 1274 | NM_012431 | 1862 | 4218, 5112, 5113, 5625, 7193, | SEMA3E | −3.04 |
| 8111892 | 1275 | NM_000436 | 1863 | 2674, 4026, 8292, 5313, 8538, 8361, 8084, 7753, | OXCT1 | −3.03 |
| 8150076 | 1276 | NM_001394 | 1864 | 2649, 5265, 5266, 5393, | DUSP4 | −3.02 |
| 8121916 | 1277 | NM_032784 | 1865 | 3018, 3878, 6102, 6281, 8688, | RSPO3 | −3.01 |
| 8092523 | 1278 | NM_001966 | 1866 | 3206, 4927, 4926, 5368, 8762, | EHHADH | −3.00 |
| 8172670 | 1279 | NM_001013742 | 1867 | 3778, 5274, 6444, | DGKK | −2.99 |
| 8119898 | 1280 | NM_001025366 | 1868 | 3808, 4966, 4967, 4968, 4969, 4970, 4971, 4972, | VEGFA | −2.98 |
| | | | | 4973, 4974, 4975, 4976, 4977, 4978, 4979, 4980, | | |
| | | | | 4981, 8712, 5968, 6175, 7640, 5961, 5690, 7243, | | |
| | | | | 8549, 6759, 6136, 7716, 8136, 8355, 8159, 8018, | | |
| | | | | 7079, 8270, 8120, 7866, 8507, 8066, 7946, | | |
| 8077185 | 1281 | NM_000039 | 1869 | 3902, 2762, 6306, 5375, 6654, 6990, | APOA1 | −2.94 |
| 8059955 | 1282 | NM_022449 | 1870 | 3268, 4986, 4985, 7579, 8393, 6896, 6505, 7240, | RAB17 | −2.92 |
| | | | | 5533, | | |
| 8045664 | 1283 | NM_177964 | 1871 | 3039, 3538, 8714, 5464, 7286, 6455, 7123, 7806, | LYPD6B | −2.91 |
| | | | | 7494, 8341, 7067, 6613, | | |
| 8087925 | 1284 | NM_003280 | 1872 | 3054, 4613, 5365, 7708, | TNNC1 | −2.90 |
| 8074853 | 1285 | NM_080740 | 1873 | 3304, 3570, 5866, | ZNF280A | −2.90 |
| 8057506 | 1286 | NM_001463 | 1874 | 2679, 5106, 5695, | FRZB | −2.89 |
| 7951865 | 1287 | NM_000039 | 1875 | 3902, 2762, 6306, 5375, 6654, 6990, | APOA1 | −2.89 |
| 8146462 | 1288 | NM_022454 | 1876 | 3009, 4141, 5778, | SOX17 | −2.86 |
| 8129482 | 1289 | NM_001017373 | 1877 | 3098, 4120, 4122, 7473, 7107, 6192, 5825, 7041, | SAMD3 | −2.85 |
| | | | | 6688, | | |
| 8127193 | 1290 | NM_021073 | 1878 | 2611, 3202, 5997, 7150, | BMP5 | −2.85 |
| 8144643 | 1291 | NM_002052 | 1879 | 2632, 4360, 5839, 5435, | GATA4 | −2.81 |
| 8050537 | 1292 | NM_002381 | 1880 | 4246, 4011, 7511, 6871, 8601, | MATN3 | −2.80 |
| 8169995 | 1293 | NM_001170779 | 1881 | 4513, 4955, 4956, 4957, 4958, 4959, 4960, 4954, | FAM122C | −2.80 |
| | | | | 6451, 7031, 8034, 6865, 6135, 8059, 8191, 6912, | | |
| | | | | 8587, 6236, | | |
| 8103544 | 1294 | NM_016950 | 1882 | 3468, 4487, 4491, 4493, 4496, 4500, 4505, 4506, | SPOCK3 | −2.78 |
| | | | | 4522, 2959, 3354, 2879, 3351, 3951, 3952, 7390, | | |
| | | | | 8151, 7745, 8674, 7862, 8555, 8291, 8542, 7775, | | |
| | | | | 8670, 8212, 7911, 5944, 8680, 8411, 8508, 6200, | | |
| | | | | 8249, 7909, 8528, 8673, 7951, 8415, 8750, 7722, | | |
| 8091283 | 1295 | NM_182943 | 1883 | 3144, 3823, 3824, 7950, 7025, 6032, 8398, 5670, | PLOD2 | −2.76 |
| | | | | 7845, | | |
| 7908003 | 1296 | NM_030769 | 1884 | 3446, 5244, 8301, 8566, 7329, 6079, 6297, 6185, | NPL | −2.74 |
| | | | | 6208, 6540, 5453, 5873, 5974, 6575, | | |
| 8147145 | 1297 | NM_152565 | 1885 | 3548, 3146, 7959, 8150, 5593, | ATP6V0D2 | −2.73 |
| 8073585 | 1298 | NM_014509 | 1886 | 4046, 3113, 3203, 4870, 6789, 7257, 7696, 6190 | SERHL | −2.73 |
| | | | | 7885, 6148, 8055, 5575, | | |
| 8059376 | 1299 | NM_006216 | 1887 | 3235, 4656, 4657, 4658, 6475, 5410, 8093, 7735, | SERPINE2 | −2.70 |
| | | | | 6860, | | |
| 7909789 | 1300 | NM_003238 | 1888 | 2610, 5188, 5189, 7936, 5882, 8554, 5876, | TGFB2 | −2.68 |
| 8139057 | 1301 | NM_014800 | 1889 | 2968, 3692, 4045, 2861, 3438, 4258, 4520, 4479, | ELMO1 | −2.68 |
| | | | | 2801, 2880, 3542, 5280, 5279, 8359, 7086, 5936, | | |
| | | | | 6939, 6791, 6584, 7972, 7197, 7051, 6279, 5770, | | |
| | | | | 6974, 6770, 7488, 7401, 7549, 6438, 7349, | | |
| 8144656 | 1302 | BC132945 | 1890 | 4115, 2976, | C8orf49 | −2.66 |
| 8112615 | 1303 | NM_003633 | 1891 | 2731, 4418, 7756, 5853, 8481, | ENC1 | −2.65 |
| 8057620 | 1304 | NM_000393 | 1892 | 3762, 3939, 7320, 7380, 7573, | COL5A2 | −2.64 |
| 7919314 | 1305 | NM_001461 | 1893 | 3169, 4740, 4742, 4741, 5452, 5926, 6568, 7792 | FMO5 | −2.63 |
| | | | | 6924, | | |
| 7972750 | 1306 | NM_001845 | 1894 | 4195, 4166, 6498, 6735, | COL4A1 | −2.61 |
| 8097513 | 1307 | NM_002413 | 1895 | 3025, 5261, 8016, 7820, 8094, 5528, 8127, | MGST2 | −2.60 |
| 8169711 | 1308 | NM_012084 | 1896 | 2899, 3400, 5864, | GLUD2 | −2.59 |
| 8041179 | 1309 | NM_024692 | 1897 | 4055, 4666, 6910, 6677, 7982, 7631, 5684, 7192, | CLIP4 | −2.58 |
| | | | | 6576, 6387, 7420, 8380, | | |
| 8123388 | 1310 | NM_018974 | 1898 | 3851, 4738, 4736, 5385, 8261, 6041, 8180, 6272, | UNC93A | −2.57 |
| 8155192 | 1311 | NM_022343 | 1899 | 3083, 3132, 7426, 7611, 7741, 8325, 6925, | GLIPR2 | −2.54 |
| 8127065 | 1312 | NM_000846 | 1900 | 4266, 4667, 8541, | GSTA2 | −2.53 |
| 7928107 | 1313 | NM_018649 | 1901 | 2818, 3965, 5976, 7242, | H2AFY2 | −2.53 |
| 8018761 | 1314 | NM_006456 | 1902 | 2638, 4437, 5345, | ST6GALNAC2 | −2.52 |
| 7965335 | 1315 | NM_001946 | 1903 | 2898, 3562, 3563, 5485, 5764, | DUSP6 | −2.52 |
| 7965573 | 1316 | NM_021229 | 1904 | 2846, 3957, 6056, 5886, | NTN4 | −2.50 |
| 8006681 | 1317 | NM_005568 | 1905 | 2635, 5231, 5430, | LHX1 | −2.50 |
| 7962427 | 1318 | NM_031292 | 1906 | 3592, 4173, 4172, 4174, 6664, 6050, 6684, | PUS7L | −2.50 |
| 8163637 | 1319 | NM_002160 | 1907 | 2581, 5293, 6635, 7873, 8072, 6170, 6096, 6061, | TNC | −2.47 |
| | | | | 5879, 7429, 6261, 6994, | | |
| 8078286 | 1320 | NM_016152 | 1908 | 2681, 3505, 4596, 4598, 8684, 7033, 8333, 6707 | RARB | −2.47 |
| | | | | 5820, 6360, 7180, | | |
| 8014591 | 1321 | NM_000458 | 1909 | 2989, 4226, 4915, 5347, 6709, 6537, | HNF1B | −2.46 |
| 7970676 | 1322 | NM_001007538 | 1910 | 4110, 3758, 5588, | SHISA2 | −2.45 |
| 7902495 | 1323 | NM_144573 | 1911 | 3950, 4178, 4987, 5775, 6960, 6998, 8177, 6811, | NEXN | −2.45 |
| | | | | 5834, 5619, 7685, 5942, | | |
| 8059852 | 1324 | AK301707 | 1912 | 4489, 4652, 6889, | MSL3L2 | −2.43 |
| 7954969 | 1325 | NM_001114182 | 1913 | 3491, 4765, 4766, 4767, 4768, 4769, 7247, 7490, | IRAK4 | −2.42 |
| | | | | 6878, 6277, | | |
| 7920291 | 1326 | NM_080388 | 1914 | 3782, 2999, 5985, 6066, 6285, 6298, 8082, | S100A16 | −2.40 |
| 8140955 | 1327 | NM_001145306 | 1915 | 3279, 4773, 4772, 5552, 8113, 8064, 7668, 6346, | CDK6 | −2.40 |
| 8105607 | 1328 | NM_001164442 | 1916 | 4893, 7805, 7948, 7918, 8707, 6538, | FAM159B | −2.40 |
| 7921344 | 1329 | NM_012081 | 1917 | 4573, 4214, 5359, 7416, | ELL2 | −2.39 |
| 8091780 | 1330 | NM_003781 | 1918 | 3474, 2819, 3653, 4514, 2847, 2848, 3036, 3135, | B3GALNT1 | −2.39 |
| | | | | 3255, 3915, 3916, 3917, 3918, 3919, 8586, 8499, | | |
| | | | | 8324, 5811, 6661, 6367, 8420, 8708, 8676, 8027, | | |
| | | | | 7430, 8305, 8658, 7607, 8455, 6477, 8126, 8442, | | |
| | | | | 7637, | | |
| 8007493 | 1331 | NM_001661 | 1919 | 3037, 3901, 5663, | ARL4D | −2.38 |
| 8068593 | 1332 | NM_005239 | 1920 | 3390, 3760, 7144, 5963, 7355, 6033, | ETS2 | −2.36 |
| 8169145 | 1333 | NM_152423 | 1921 | 3142, 4991, 4993, 6316, 5894, 5576, | MUM1L1 | −2.36 |
| 8013606 | 1334 | NM_000638 | 1922 | 2897, 3932, 5348, | VTN | −2.35 |
| 8140668 | 1335 | NM_006080 | 1923 | 4019, 3973, 5554, 7046, 6980, | SEMA3A | −2.35 |
| 8038981 | 1336 | NM_030972 | 1924 | 3136, 4861, 4862, 4863, 4864, 5722, | ZNF611 | −2.34 |
| 7944803 | 1337 | NM_014622 | 1925 | 3486, 3642, 3641, 4463, 5983, 7513, 6905, 7593, | VWA5A | −2.33 |
| | | | | 6204, 7228, | | |
| 8099364 | 1338 | NM_053042 | 1926 | 3218, 3781, 5718, 8226, 8286, 7880, 7968, | ZNF518B | −2.32 |
| 7919193 | 1339 | NM_199040 | 1927 | 2810, 4694, 3968, 3967, 6935, 5781, | NUDT4P1 | −2.32 |
| 8101304 | 1340 | NM_152545 | 1928 | 4526, 3145, 8395, 5654, 5568, 7781, 8214, 6622, | RASGEF1B | −2.31 |
| 8143643 | 1341 | NM_022445 | 1929 | 3220, 4001, 4002, 8245, 6258, 8436, 7518, 7791, | TPK1 | −2.30 |
| | | | | 6711, | | |
| 8095986 | 1342 | NM_005139 | 1930 | 2871, 3966, 8438, 8323, 7932, 5460, 8713, 8202, | ANXA3 | −2.29 |
| | | | | 7789, | | |
| 8007921 | 1343 | NM_001002841 | 1931 | 3053, 3703, 2998, 6007, 6931, | MYL4 | −2.29 |
| 7926609 | 1344 | NM_005180 | 1932 | 3522, 5257, 6836, 7177, 8311, 6490, 6981, 7037, | BMI1 | −2.29 |
| | | | | 8773, 6757, 6570, | | |
| 8050240 | 1345 | NM_002539 | 1933 | 3273, 2760, 5350, 7567, 7441, 6418, | ODC1 | −2.28 |
| 8171161 | 1346 | NM_000047 | 1934 | 4099, 4234, 6631, 6722, | ARSE | −2.28 |
| 8096176 | 1347 | NM_006264 | 1935 | 2621, 4579, 4580, 4581, 4582, 6886, 7770, 7790, | PTPN13 | −2.27 |
| | | | | 7383, 8720, 7840, 6014, 5863, 7589, | | |
| 8039013 | 1348 | NM_203307 | 1936 | 3243, 5855, | ZNF321 | −2.26 |
| 7934156 | 1349 | NM_018055 | 1937 | 3088, 4747, 7082, 5642, | NODAL | −2.26 |
| 8138370 | 1350 | NM_020319 | 1938 | 3159, 5132, 7035, 7445, 7172, 5729, | ANKMY2 | −2.24 |
| 7924107 | 1351 | NM_014873 | 1939 | 3152, 4614, 7821, 6002, 6174, | LPGAT1 | −2.24 |
| 8089011 | 1352 | NM_000313 | 1940 | 2597, 4770, 6690, | PROS1 | −2.23 |
| 8167912 | 1353 | NM_007250 | 1941 | 3520, 4810, 4811, 7702, 8280, 6724, 6350, 6020, | KLF8 | −2.23 |
| 7947338 | 1354 | NM_000280 | 1942 | 3805, 4400, 4401, 4402, 6733, 7304, 6876, 7135, | PAX6 | −2.23 |
| | | | | 7188, 7299, 6953, 7333, 7281, 8690, 7478, 7234, | | |
| | | | | 8432, 7017, 6745, 7558, 5383, | | |
| 8155930 | 1355 | NM_001490 | 1943 | 2578, 4156, 4157, 4158, 4159, 4160, 8460, 6349, | GCNT1 | −2.23 |
| | | | | 8001, 7226, 6641, | | |
| 8106411 | 1356 | NM_130772 | 1944 | 3017, 4191, 8752, 5748, | S100Z | −2.23 |
| 8039025 | 1357 | NR_003578 | 1945 | 3075, 4190, 5550, | ZNF702P | −2.21 |
| 8132167 | 1358 | NM_194300 | 1946 | 4108, 4535, 3117, 4495, 4212, 7015, 6902, 6655, | CCDC129 | −2.21 |
| | | | | 7399, 7356, 7062, 8117, 5731, 6766, | | |
| 8049542 | 1359 | NM_001137550 | 1947 | 4662, 7654, | LRRFIP1 | −2.20 |
| 8102912 | 1360 | NM_015130 | 1948 | 4180, 4132, 6423, | TBC1D9 | −2.20 |
| 8008819 | 1361 | NM_001005404 | 1949 | 3716, 3768, 5719, | YPEL2 | −2.19 |
| 8112668 | 1362 | NM_016591 | 1950 | 2806, 4600, 5633, | GCNT4 | −2.18 |
| 7970241 | 1363 | NM_000504 | 1951 | 2567, 2573, 3210, 3246, 4308, 4309, 3935, 7894, | F10 | −2.18 |
| | | | | 6670, 7728, 6624, 7953, 7352, 6493, | | |
| 8036389 | 1364 | NM_152279 | 1952 | 3196, 4990, 5862, 6596, | ZNF585B | −2.17 |
| 8097529 | 1365 | NM_153702 | 1953 | 3416, 5196, 8425, 7800, 5802, 8102, 8387, 8257, | ELMOD2 | −2.16 |
| | | | | 8391, | | |
| 7962349 | 1366 | NM_173601 | 1954 | 3139, 4199, 4198, 7252, 5482, | GLT8D3 | −2.16 |
| 7952601 | 1367 | NM_001162422 | 1955 | 3402, 4871, 4686, 4687, 7425, 5612, 5931, | ETS1 | −2.16 |
| 8001387 | 1368 | NM_001127892 | 1956 | 4497, 4411, 4078, 6646, 5432, 7163, | SALL1 | −2.16 |
| 8040163 | 1369 | NM_001039613 | 1957 | 3912, 3107, 4261, 4549, 3207, 3482, 3588, 3934, | IAH1 | −2.16 |
| | | | | 6534, 8330, 8409, 8205, 6128, 8770, 8556, 7901, | | |
| | | | | 8340, 8747, 8755, 7721, 8381, 8091, 7817, 5835, | | |
| 8165672 | 1370 | L23320 | 1958 | 2618, | RFC1 | −2.15 |
| 7946288 | 1371 | NM_013249 | 1959 | 2781, 4224, 5492, | ZNF214 | −2.15 |
| 7953665 | 1372 | NM_199286 | 1960 | 3455, 3720, 6044, | DPPA3 | −2.15 |
| 8103311 | 1373 | NM_000508 | 1961 | 2574, 3860, 3861, 6647, 5699, 6582, | FGA | −2.15 |
| 8084206 | 1374 | NM_032047 | 1962 | 2926, 3099, 3434, 3020, 2912, 3182, 3956, 6802, | B3GNT5 | −2.13 |
| | | | | 6453, 8375, 8383, 8256, 7811, 7501, 5794, 8221, | | |
| | | | | 7151, | | |
| 8174389 | 1375 | NM_001847 | 1963 | 2623, 4165, 4167, 6197, 5733, 6413, 8100, 7288, | COL4A6 | −2.13 |
| | | | | 7442, 7535, | | |
| 7918768 | 1376 | NM_198459 | 1964 | 3586, 4103, 6796, 6943, 8236, 8046, 6164, 7594, | DENND2C | −2.13 |
| 7950885 | 1377 | NM_012193 | 1965 | 2784, 5289, | FZD4 | −2.12 |
| 8005048 | 1378 | NM_001146313 | 1966 | 3740, 4806, 4804, 4805, 7259, 6792, 7438, 6345 | MYOCD | −2.12 |
| | | | | 6178, 6713, | | |
| 8101952 | 1379 | NM_145244 | 1967 | 3382, 5197, 8631, 5514, 8733, | DDIT4L | −2.12 |
| 8111887 | 1380 | NM_001005473 | 1968 | 4020, 5772, 7331, | PLCXD3 | −2.11 |
| 8113220 | 1381 | NM_012081 | 1969 | 3398, 4214, 5359, 7416, 8279, 8525, | ELL2 | −2.10 |
| 8114287 | 1382 | NM_004598 | 1970 | 2804, 3903, 8553, 8505, 6817, 7957, 5469, 8014, | SPOCK1 | −2.10 |
| | | | | 7754 | | |
| 7955694 | 1383 | NM_002178 | 1971 | 3353, 3682, 5662, | IGFBP6 | −2.09 |
| 8073596 | 1384 | NM_014509 | 1972 | 3645, 4046, 4023, 4076, 4075, 4492, 4499, 3203 | SERHL2 | −2.09 |
| | | | | 7885, 6148, 6161, 6501, 7434, 5747, 5575, | | |
| 8083779 | 1385 | NM_005025 | 1973 | 4280, 4350, 4351, 7428, 8534, 7747, 5615, 7839, | SERPINI1 | −2.09 |
| | | | | 7903, | | |
| 8121601 | 1386 | NM_153711 | 1974 | 3931, 6155, | FAM26E | −2.08 |
| 8169174 | 1387 | NM_024539 | 1975 | 3527, 3478, 3479, 5441, 5712, 6719, | RNF128 | −2.08 |
| 8117045 | 1388 | NM_153020 | 1976 | 3092, 4733, 4735, 4734, 6592, 6373, 5606, 8008, | RBM24 | −2.08 |
| | | | | 8572, 8110, | | |
| 7965357 | 1389 | NM_003774 | 1977 | 4550, 3393, 5235, 6995, | GALNT4 | −2.08 |
| 8162652 | 1390 | NM_001333 | 1978 | 3462, 5253, 8071, 5450, | CTSL2 | −2.08 |
| 8023528 | 1391 | NM_052947 | 1979 | 3413, 4170, 6142, | ALPK2 | −2.07 |
| 8069508 | 1392 | ENST00000457997 | 1980 | 6891, 6940, | ANKRD20B | −2.06 |
| 7929388 | 1393 | NM_016341 | 1981 | 4217, 4071, 4918, 6138, 5440, 6045, 6266, | PLCE1 | −2.06 |
| 7944082 | 1394 | NM_003186 | 1982 | 2895, 3656, 3657, 3038, 7198, 5531, 6894, 5715, | TAGLN | −2.06 |
| 8057771 | 1395 | NM_003151 | 1983 | 3066, 5299, 7451, 8037, 7396, 6374, 6129, 7059 | STAT4 | −2.06 |
| | | | | 8595, 6687, 8616, | | |
| 7907702 | 1396 | NM_003101 | 1984 | 3047, 5308, 5878, 7270, | SOAT1 | −2.05 |
| 7910134 | 1397 | NM_031944 | 1985 | 2853, 2923, 6314, | MIXL1 | −2.04 |
| 8062823 | 1398 | NM_000457 | 1986 | 3706, 3707, 3708, 4669, 4387, 4383, 2677, 2664, | HNF4A | −2.04 |
| | | | | 3125, 4751, 3292, 3293, 3294, 3867, 3868, 3866, | | |
| | | | | 6660, 5774, 5653, 6081, 7077, 5571, 7633, | | |
| 8059878 | 1399 | NM_024726 | 1987 | 4003, 4483, 2974, 3095, 3137, 3231, 3536, 8451, | IQCA1 | −2.04 |
| | | | | 6443, 7562, 7057, 8660, 5402, 7302, 7122, 6806, | | |
| | | | | 5760, 7624, 7362, | | |
| 8022817 | 1400 | NM_020805 | 1988 | 4494, 3749, 6140, 6012, | KLHL14 | −2.04 |
| 8102862 | 1401 | NM_018717 | 1989 | 4377, 4379, 2704, 4531, 2925, 4284, 7322, 8019, | MAML3 | −2.03 |
| | | | | 7858, 5635, | | |
| 8096845 | 1402 | NM_001963 | 1990 | 3828, 5114, 5115, 5116, 5500, 7841, 7967, 7927, | EGF | −2.03 |
| 7924663 | 1403 | NM_020997 | 1991 | 2777, 5273, 5561, 8017, | LEFTY1 | −2.03 |
| 7970381 | 1404 | AK057820 | 1992 | 2984, 4169, 6891, 6432, 6336, 7704, 6356, 7272, | ANKRD20B | −2.03 |
| | | | | 7347, | | |
| 7922727 | 1405 | NM_001102450 | 1993 | 3879, 4223, 3904, 8112, 8121, 6042, 8709, 7965, | RGS8 | −2.03 |
| | | | | 5447, 5943, | | |
| 8157090 | 1406 | NM_005421 | 1994 | 4057, 4779, 5674, | TAL2 | −2.02 |
| 8050071 | 1407 | NM_018269 | 1995 | 3559, 5111, 5637, | ADI1 | −2.02 |
| 7944869 | 1408 | NM_017425 | 1996 | 2833, 2894, 4744, 5335, | SPA17 | −2.01 |
| 8127370 | 1409 | NM_152688 | 42 | 4263, 4412, 8227, 5521, | KHDRBS2 | −2.01 |
| 8113551 | 1410 | NM_002387 | 43 | 3412, 4147, 4148, 8175, 8246, 5792, 7893, | MCC | −2.00 |

Table 12:
Provided are the description of the non-membranal genes along with the sequence identifiers of the Affymetrix probes, the target sequence identified by the Affymetrix probe, and the mRNA sequences represented by the target sequences. Also shown are the log 2 fold change in expression levels of the indicated genes between the PDX1-GFP cells and the SOX17-GFP cells (PDX1-SOX17).
The (+) or (−) sign means that the genes are upregulated or downregulated, respectively, in the PDX1-GFP cells as compared to the SOX17-GFP cells.

[0363] Identification of Clusters of Genes which are Overexpressed During Differentiation into Pancreatic Cells

[0364] The transcriptional profiles of the SOX17⁺ and PDX1⁺ progenitor cells were compared to profiles of undifferentiated ES cells and of differentiated pancreatic cells. Partek analysis enabled to define different clusters of genes according to their expression patterns (FIGS. 5B-E).

[0365] The present inventors have further studied several surface markers that were found to be enriched in the PDX1⁺ cells in the microarray analysis and were validated by qPCR analysis. These are the G protein-coupled receptor 50 (GPR50) and tumor-associated calcium signal transducer 2 (TROP-2), whose expression showed a good correlation with PDX1 expression (FIG. 6A). Cells from 25 day old EBs were dissociated and were stained with antibodies specific to TROP-2 and GPR50 and were FACS sorted. Four different populations were obtained: GPR50⁺ TROP-2⁺ (1.9%), GPR50⁺ TROP-2⁻ (20%), GPR50⁻TROP-2⁺ (0.6%) and a negative population which did not express either of these markers (GPR50⁻/TROP-2⁻). Quantitative-PCR analysis revealed an increase in mature pancreatic markers, especially in the GPR50⁺TROP-2⁺ population, including an induction in INSULIN, NGN3, PAX4, HLXB9, NK6 homeobox 1(NKX6.1), and SRY box 9 (SOX9).

[0366] TROP-2 and GPR50 are two exemplary markers of the large number of cell surface markers that were revealed by the Affymetrix study including markers enriched in the populations of interest as well as markers depleted in the populations of interest. As shown, these markers can be used in positive selection to enrich for the desired cells. They can also be used in negative selection to remove cells other than the cells that are desired.

[0367] The cell surface markers that were identified based on comparative analysis between pluripotent undifferentiated hESC, the GFP+ population from the cells bearing the SOX17-GFP construct and the GFP+ population from the cells bearing the PDX1-GFP construct fall into a number of categories, all of which can potentially be used for immuno-purification/immuno-isolation. Following is a short description of these marker groups:

[0368] I. Markers that could be Useful to Enrich for Endodermal Progenitor Cells:

[0369] Cell surface markers enriched in the SOX17 population relative to undifferentiated hESC;

[0370] Cell surface markers depleted in the SOX17 population relative to undifferentiated hESC;

[0371] II. Markers that could be Useful to Enrich for Pancreatic Progenitor Cells:

[0372] Cell surface markers enriched in the PDX1 population relative to undifferentiated hESC;

[0373] Cell surface markers depleted in the PDX1 population relative to undifferentiated hESC;

[0374] III. Cell Surface Markers Enriched in the PDX1 Population Relative to the SOX17 Population.

[0375] Without being bound by any theory, these markers would be useful in the event that two sorting procedures are incorporated into the process of manufacturing the therapeutic cell population-one sorting procedure at the stage of SOX17 expression and a second sorting procedure at the stage of PDX1expression.

[0376] IV. Cell Surface Markers Depleted in the PDX1 Population Relative to the SOX17 Population.

[0377] In addition, all the cell surface markers above and additional non-cell surface markers that exhibit similar expression patterns can be used for quality control of replacement islet beta cells for transplant-based diabetes treatment during their manufacture.

### Example 4

### Identification of Stage Specific Markers Using the PARTEK Cluster Analysis

[0378] The bioinformatic analysis of cell specific markers was a central part of the entire experiment. Key steps in this part were: A. To assign those genes to a stage specific category; B. To analyze genes related to the relevant cell component. The present inventors have used the Gene Ontology data to include only genes with cell surface and membranal information. Stage specific genes were assigned to one of four categories: (i). SOX17⁺ specific; (ii). PDX1⁺ specific; (iii). SOX17⁺/PDX1⁺ specific; (iv). PDX1+/Pancreas specific. The generation of those specific lists was done by using the PARTEK partition clustering analysis (FIG. 7).

[0379] Stage and Compartment Specific Gene Identification

[0380] Following the PARTEK cluster analysis a further prioritization of relevant genes was needed. For this purpose a standard excel analysis was used. A threshold of Fold Change=2.0 was set (at it is an acceptable threshold in microarray studies). In addition, the present inventors have used the Student's test for the gene selection. FIGS. 8-11 present selected genes for each stage. The entire list appears in Tables 13-20 below.

TABLE 13
SOX17 specific cell surface genes

| | | | SEQ ID NO: | | | SOX17/HESC | SOX17/PDX1 | SOX17/PANC | fold | SOX17 | SOX17 | SOX17 |
|---|---|---|---|---|---|---|---|---|---|---|---|---|
| Probe | Affy. target nucl. | | (of Rep. | Polyn. SEQ ID NOs: rep. by | Gene | fold | fold | fold | change | vs. | vs. | vs. |
| set ID | SEQ ID NO: | Rep. Public ID | Public ID) | target | Symbol | change | change | change | average | HESC | PDX1 | PANC |
| 8029280 | 1997 | NM_020406 | 2273 | 3465, 2825, 3947, 3744, | CD177 | 9.45 | 11.14 | 6.93 | 9.17 | 3.9E−04 | 2.4E−04 | 1.0E−03 |
| | | | | 4962, 4250, 3064, 3545, | | | | | | | | |
| | | | | 3050, 4005, 6408, 6835, | | | | | | | | |
| | | | | 7480, | | | | | | | | |
| 7938090 | 1998 | NM_176875 | 2274 | 2809, 5307, 5676, | CCKBR | 5.81 | 8.69 | 9.10 | 7.87 | 1.6E−03 | 4.5E−04 | 3.9E−04 |
| 8077185 | 1999 | NM_000039 | 2275 | 3902, 2762, 6306, 5375, | APOA1 | 7.79 | 4.01 | 8.83 | 6.88 | 1.2E−02 | 1.0E−01 | 1.0E−02 |
| | | | | 6654, 6990, | | | | | | | | |
| 7951865 | 2000 | NM_000039 | 2276 | 3902, 2762, 6306, 5375, | APOA1 | 7.44 | 3.85 | 8.49 | 6.59 | 1.2E−02 | 1.0E−01 | 9.6E−03 |
| | | | | 6654, 6990, | | | | | | | | |
| 8052072 | 2001 | NM_000145 | 2277 | 4265, 5021, 5022, 6252, | FSHR | 5.19 | 5.53 | 6.22 | 5.65 | 1.1E−03 | 8.9E−04 | 5.8E−04 |
| | | | | 5713, 7612, 7221, 6397, | | | | | | | | |
| 8058498 | 2002 | NM_003468 | 2278 | 2934, 4015, 5838, | FZD5 | 2.38 | 4.11 | 9.65 | 5.38 | 1.7E−01 | 6.3E−02 | 2.5E−02 |
| 8058765 | 2003 | NM_212482 | 2279 | 3732, 3409, 3983, 4677, | FN1 | 4.30 | 2.39 | 8.73 | 5.14 | 2.9E−04 | 3.0E−01 | 1.2E−03 |
| | | | | 4679, 3284, 3310, 3403, | | | | | | | | |
| | | | | 3404, 3405, 3406, 4727, | | | | | | | | |
| | | | | 3110, 4551, 4571, 4572, | | | | | | | | |
| | | | | 4576, 3822, 3494, 2852, | | | | | | | | |
| | | | | 3620, 3621, 3622, 3623, | | | | | | | | |
| | | | | 3624, 3625, 5996, 7280, | | | | | | | | |
| | | | | 7649, 6915, 8364, 8529, | | | | | | | | |
| | | | | 6768, 7398, 5846, 6424, | | | | | | | | |
| | | | | 8736, 8430, 7036, 5993, | | | | | | | | |
| | | | | 8153, 8487, 6324, 6771, | | | | | | | | |
| | | | | 6223, 6205, 5539, 6620, | | | | | | | | |
| | | | | 6121, 6206, 8147, 5687, | | | | | | | | |
| 8060850 | 2004 | NM_001200 | 2280 | 3900, 6567, | BMP2 | 3.36 | 5.86 | 5.66 | 4.96 | 1.4E−02 | 1.8E−03 | 2.1E−03 |
| 8088560 | 2005 | NM_182920 | 2281 | 4100, 3333, 8622, 8439, | ADAMTS9 | 7.20 | 3.76 | 3.07 | 4.67 | 2.0E−05 | 1.8E−03 | 2.8E−04 |
| | | | | 8457, 6636, 7795, 8233, | | | | | | | | |
| | | | | 8784, | | | | | | | | |
| 8056222 | 2006 | NM_001935 | 2282 | 3604, 3605, 4611, 2562, | DPP4 | 4.32 | 2.07 | 6.97 | 4.45 | 9.4E−02 | 3.7E−01 | 3.6E−02 |
| | | | | 2570, 3550, 4303, 3611, | | | | | | | | |
| | | | | 6918, 6975, 6558, 7617, | | | | | | | | |
| | | | | 8396, 7176, 6249, 7784, | | | | | | | | |
| | | | | 8632, 8468, | | | | | | | | |
| 8103311 | 2007 | NM_000508 | 2283 | 2574, 3860, 3861, 6647, | FGA | 7.36 | 3.04 | 2.03 | 4.15 | 7.9E−02 | 4.1E−02 | 6.3E−01 |
| | | | | 5699, 6582, | | | | | | | | |
| 8021946 | 2008 | NM_130386 | 2284 | 2891, 4601, 6579, | COLEC12 | 5.08 | 3.50 | 3.74 | 4.10 | 1.1E−02 | 3.4E−02 | 2.7E−02 |
| 8162283 | 2009 | NM_004560 | 2285 | 3804, 4102, 2608, 3151, | ROR2 | 3.51 | 2.68 | 5.90 | 4.03 | 4.5E−03 | 1.1E−02 | 2.0E−03 |
| | | | | 3287, 5241, 6393, 7306, | | | | | | | | |
| | | | | 6756, 8135, | | | | | | | | |
| 8081298 | 2010 | NM_032787 | 2286 | 3995, 4847, 5470, 7733, | GPR128 | 4.64 | 4.55 | 2.52 | 3.90 | 4.5E−02 | 4.7E−02 | 1.9E−01 |
| | | | | 8308, 8445, | | | | | | | | |
| 8058857 | 2011 | NM_000599 | 2287 | 2583, 4357, 8723, 5360, | IGFBP5 | 5.34 | 2.55 | 3.36 | 3.75 | 2.3E−02 | 1.6E−01 | 7.7E−02 |
| 8111677 | 2012 | NM_002310 | 2288 | 2551, 4403, 4404, 5491, | LIFR | 4.97 | 4.00 | 1.50 | 3.49 | 4.8E−02 | 7.3E−02 | 5.8E−01 |
| | | | | 7187, 7919, 8314, 7758, | | | | | | | | |
| 7950885 | 2013 | NM_012193 | 2289 | 2784, 5289, | FZD4 | 4.47 | 3.91 | 1.76 | 3.38 | 3.0E−02 | 4.2E−02 | 5.0E−01 |
| 7963786 | 2014 | NM_002205 | 2290 | 3341, 3761, 5661, 6880, | ITGA5 | 4.42 | 3.10 | 2.50 | 3.34 | 4.3E−04 | 2.4E−03 | 7.7E−03 |
| 8149825 | 2015 | NM_003115 | 2291 | 2725, 3793, 5771, | STC1 | 3.21 | 2.62 | 3.23 | 3.02 | 8.2E−02 | 1.4E−01 | 8.1E−02 |
| 7922343 | 2016 | NM_003326 | 2292 | 3222, 4594, 5549, 8171, | TNFSF4 | 2.79 | 2.70 | 2.89 | 2.79 | 7.8E−03 | 9.2E−03 | 6.5E−03 |
| | | | | 6071, | | | | | | | | |
| 8029280 | 2017 | NM_020406 | 2293 | 3465, 2825, 3947, 3744, | CD177 | 2.43 | 2.40 | 2.51 | 2.44 | 4.5E−03 | 4.2E−03 | 3.4E−03 |
| | | | | 4962, 4250, 3064, 3545, | | | | | | | | |
| | | | | 3050, 4005, 6408, 6835, | | | | | | | | |
| | | | | 7480, | | | | | | | | |
| 8059067 | 2018 | NM_002181 | 2294 | 4757, 4992, 5587, | IHH | 2.06 | 2.09 | 2.13 | 2.09 | 9.2E−02 | 8.7E−02 | 8.1E−02 |

Table 13.
Provided are the description of the cell surface genes along with the sequence identifiers of the Affymetrix probes, the target sequence identified by the Affymetrix probe, the polynucleotide represented by the target sequence and the Public ID (and SEQ ID NO:) of the mRNA sequence representative of the target sequence.
“Polyn.” = polynucleotide;
“Rep.” = representative;
Also shown are the fold change and T-test p-values for change in expression levels of the indicated genes between the SOX17-GFP cells and undifferentiated hESCs (SOX17/HESC); the SOX17-GFP cells and PDX1-GFP cells (SOX17/PDX1); and the SOX17-GFP cells and the Pancreas cells (SOX17/PANC).

TABLE 14
PDX1 specific cell surface genes

| | | Rep. | SEQ ID NO: | | | PDX1/HESC | PDX1/SOX17 | PDX1/PANC | | PDX1 | PDX1 | PDX1 |
|---|---|---|---|---|---|---|---|---|---|---|---|---|
| Probe set | Affy. target nucl. | Public | (of Rep. | Polyn. SEQ ID NOs: rep. by | Gene | fold | fold | fold | FC | vs. | vs. | vs. |
| ID | SEQ ID NO: | ID | Public ID) | target | Symbol | change | change | change | average | HESC | SOX17 | PANC |
| 7929373 | 2019 | NM_005097 | 2295 | 2745, 4359, 8710, 8593, | LGI1 | 9.41 | 4.10 | 10.86 | 8.12 | 2.7E−02 | 1.0E−01 | 2.2E−02 |
| | | | | 6230, 6132, | | | | | | | | |
| 8165658 | 2020 | U18810 | 2296 | 2553, 3426, 3422, 6269, | VIPR2 | 4.01 | 4.29 | 13.53 | 7.27 | 2.1E−01 | 2.9E−01 | 5.1E−02 |
| 7915472 | 2021 | NM_006516 | 2297 | 4268, 4338, 5901, 6869, | SLC2A1 | 1.77 | 2.04 | 16.02 | 6.61 | 5.1E−02 | 2.6E−01 | 5.2E−04 |
| | | | | 6399, 8613, 6344, 6364, | | | | | | | | |
| | | | | 5884, 7600, | | | | | | | | |
| 7947156 | 2022 | NM_001135091 | 2298 | 3463, 4618, 4620, 4619, | MUC15 | 8.35 | 7.47 | 2.59 | 6.14 | 4.0E−02 | 4.6E−02 | 4.1E−01 |
| | | | | 5504, 6821, 7005, | | | | | | | | |
| 8135033 | 2023 | ENST00000379442 | 2299 | 4894, 7027, | MUC12 | 7.36 | 4.01 | 2.56 | 4.64 | 3.5E−02 | 9.5E−02 | 2.2E−01 |
| 8095303 | 2024 | NM_015236 | 2300 | 2842, 4699, 4713, 4296, | LPHN3 | 3.77 | 2.02 | 8.14 | 4.64 | 4.0E−02 | 2.5E−01 | 1.6E−02 |
| | | | | 4285, 8560, 7869, 8477, | | | | | | | | |
| | | | | 8293, 8434, 5644, 8571, | | | | | | | | |
| | | | | 8574, 8160, 8174, 5553, | | | | | | | | |
| | | | | 7807, 8297, 8402, 8511, | | | | | | | | |
| | | | | 8619, 8139, 8480, | | | | | | | | |
| 8033674 | 2025 | NM_024690 | 2301 | 3192, 3906, 7402, 7014, | MUC16 | 4.82 | 3.99 | 4.97 | 4.60 | 9.6E−02 | 1.4E−01 | 9.1E−02 |
| | | | | 7634, 7481, | | | | | | | | |
| 7918936 | 2026 | NM_024626 | 2302 | 2837, 3971, 6218, 6213, | VTCN1 | 6.12 | 5.23 | 2.07 | 4.47 | 2.0E−02 | 4.0E−02 | 3.9E−01 |
| | | | | 7307, 8522, 5804, 6025, | | | | | | | | |
| 8151684 | 2027 | AL136588 | 2303 | 5826, | MMP16 | 2.44 | 2.18 | 8.56 | 4.40 | 2.5E−02 | 1.2E−01 | 6.4E−04 |
| 8145611 | 2028 | NM_017412 | 2304 | 2808, 5230, 8548, 5392, | FZD3 | 2.33 | 2.96 | 7.13 | 4.14 | 3.9E−03 | 2.4E−02 | 1.5E−02 |
| 8056184 | 2029 | NM_000888 | 2305 | 3091, 2830, 8224, 8635, | ITGB6 | 5.53 | 4.77 | 1.82 | 4.04 | 1.4E−01 | 1.8E−01 | 6.1E−01 |
| | | | | 5643, 7596, 6710, | | | | | | | | |
| 8114415 | 2030 | NM_001496 | 2306 | 3167, 3584, 7363, 5508, | GFRA3 | 3.92 | 4.05 | 3.49 | 3.82 | 1.5E−02 | 1.8E−02 | 2.2E−02 |
| 8170476 | 2031 | NM_004224 | 2307 | 2669, 4964, 5346, | GPR50 | 2.51 | 1.70 | 7.24 | 3.81 | 2.2E−03 | 1.1E−01 | 9.7E−04 |
| 8088919 | 2032 | NM_133631 | 2308 | 2713, 3930, 3948, 4146, | ROBO1 | 1.93 | 3.79 | 4.74 | 3.49 | 3.6E−02 | 9.4E−03 | 1.3E−02 |
| | | | | 3949, 4391, 4683, 3115, | | | | | | | | |
| | | | | 4548, 4716, 4797, 4798, | | | | | | | | |
| | | | | 5105, 6728, 8746, 5966, | | | | | | | | |
| | | | | 7836, 8600, 7464, 8561, | | | | | | | | |
| | | | | 6404, 8251, 6433, 7621, | | | | | | | | |
| 8083968 | 2033 | NM_014932 | 2309 | 4961, 2776, 3071, 4307, | NLGN1 | 2.49 | 3.63 | 4.30 | 3.48 | 1.5E−02 | 7.4E−03 | 3.8E−03 |
| | | | | 3297, 6467, 7268, 7261, | | | | | | | | |
| | | | | 7427, 6874, 7249, 6559, | | | | | | | | |
| | | | | 6760, 8521, 5935, | | | | | | | | |
| 8035304 | 2034 | NM_004335 | 2310 | 3090, 2805, 5403, 7124, | BST2 | 4.49 | 2.36 | 3.52 | 3.46 | 5.8E−02 | 3.7E−01 | 1.1E−01 |
| 8135033 | 2035 | ENST00000379442 | 2311 | 4894, 7027, | MUC12 | 4.59 | 2.70 | 2.87 | 3.39 | 4.1E−02 | 1.5E−01 | 1.1E−01 |
| 8160823 | 2036 | NM_147164 | 2312 | 2568, 5285, 5284, 6097, | CNTFR | 4.25 | 2.81 | 2.87 | 3.31 | 2.3E−02 | 1.4E−01 | 1.8E−01 |
| | | | | 6693, 6678, | | | | | | | | |
| 8034783 | 2037 | NM_001008701 | 2313 | 2841, 4650, 4651, 5915, | LPHN1 | 1.72 | 1.83 | 6.32 | 3.29 | 1.0E−03 | 1.2E−01 | 3.9E−05 |
| | | | | 5875, | | | | | | | | |
| 8146863 | 2038 | NM_001128205 | 2314 | 3240, 4424, 4425, 4426, | SULF1 | 3.46 | 4.15 | 1.86 | 3.16 | 1.1E−01 | 1.2E−01 | 3.9E−01 |
| | | | | 4427, 6483, 8782, 7482, | | | | | | | | |
| | | | | 6383, 5417, | | | | | | | | |
| 8047788 | 2039 | NM_003812 | 2315 | 4109, 4113, 4530, 2862, | ADAM23 | 1.50 | 1.55 | 6.27 | 3.11 | 2.7E−02 | 1.1E−01 | 1.4E−03 |
| | | | | 2734, 3877, 7431, 7068, | | | | | | | | |
| | | | | 6740, 7531, 5501, | | | | | | | | |
| 8118890 | 2040 | NM_152753 | 2316 | 3214, 3300, 5524, 6429, | SCUBE3 | 3.05 | 2.37 | 3.23 | 2.88 | 1.0E−01 | 2.0E−01 | 9.0E−02 |
| 7928429 | 2041 | NM_002658 | 2317 | 3397, 4752, 4753, 6308, | PLAU | 2.31 | 3.69 | 2.63 | 2.88 | 3.7E−04 | 4.8E−03 | 2.0E−02 |
| | | | | 6729, 8322, 7727, 8611, | | | | | | | | |
| | | | | 6028, 6300, 8374, | | | | | | | | |
| 7952526 | 2042 | NM_016952 | 2318 | 3857, 4137, 6357, 5459, | CDON | 2.51 | 2.00 | 4.00 | 2.84 | 5.4E−02 | 1.1E−01 | 7.5E−02 |
| 8094301 | 2043 | NM_004787 | 2319 | 2748, 2765, 3985, 4678, | SLIT2 | 2.35 | 3.57 | 2.55 | 2.82 | 4.4E−01 | 3.2E−01 | 4.1E−01 |
| | | | | 3436, 2744, 2767, 8366, | | | | | | | | |
| | | | | 7786, 6676, 7740, 5522, | | | | | | | | |
| | | | | 8033, 7772, 7956, 8641, | | | | | | | | |
| | | | | 8725, | | | | | | | | |
| 8135915 | 2044 | NM_013332 | 2320 | 2771, 4188, 4189, 8677, | C7orf68 | 2.08 | 2.50 | 2.60 | 2.40 | 2.1E−02 | 3.1E−02 | 8.3E−02 |
| | | | | 7435, 5442, 6618, 7939, | | | | | | | | |
| 7926545 | 2045 | NM_032812 | 2321 | 3459, 3535, 6338, 7091, | PLXDC2 | 2.13 | 2.18 | 2.09 | 2.13 | 1.7E−01 | 2.1E−01 | 2.2E−01 |
| | | | | 7374, | | | | | | | | |

Table 14.
Provided are the description of the cell surface genes along with the sequence identifiers of the Affymetrix probes, the target sequence identified by the Affymetrix probe, the polynucleotide represented by the target sequence and the Public ID (and SEQ ID NO:) of the mRNA sequence representative of the target sequence.
“Polyn.” = polynucleotide;
“Rep.” = representative;
Also shown are the fold change and T-test p-values for change in expression levels of the indicated genes between the PDX1-GFP cells and undifferentiated hESCs (PDX1/HESC); the PDX1-GFP cells and SOX17-GFP cells (PDX1/SOX17); and the PDX1-GFP cells and the Pancreas cells (PDX1/PANC).

TABLE 15
SOX17 and PDX1 specific cell surface

| | | | | Polyn. | | | | SOX17/ | | | | | | |
|---|---|---|---|---|---|---|---|---|---|---|---|---|---|---|
| | | Rep. | SEQ ID NO: | SEQ ID | | PDX1/PANC | SOX17/PANC | HESC | PDX1/HESC | | PDX11 | PDX1 | SOX17 | SOX17 |
| Probe | Affy. target nucl. | Public | (of Rep. | NOs: rep. | Gene | fold | fold | fold | fold | FC | vs. | vs. | vs. | vs. |
| set ID | SEQ ID NO: | ID | Public ID) | by target | Symbol | change | change | change | change | average | HESC | PANC | HESC | PANC |
| 8056611 | 2046 | NM_004525 | 2322 | 2684, | LRP2 | 11.62 | 8.04 | 5.82 | 8.40 | 8.47 | 4.0E−05 | 1.1E−04 | 1.2E−01 | 7.9E−02 |
| | | | | 4119, | | | | | | | | | | |
| | | | | 5456, | | | | | | | | | | |
| | | | | 8262, | | | | | | | | | | |
| 8022176 | 2047 | NM_005559 | 2323 | 4685, | LAMA1 | 9.23 | 16.26 | 3.68 | 2.09 | 7.82 | 3.1E−02 | 2.6E−03 | 2.8E−02 | 3.6E−03 |
| | | | | 5278, | | | | | | | | | | |
| | | | | 8564, | | | | | | | | | | |
| | | | | 7980, | | | | | | | | | | |
| | | | | 8761, | | | | | | | | | | |
| | | | | 6083, | | | | | | | | | | |
| | | | | 7657, | | | | | | | | | | |
| 8175234 | 2048 | NM_004484 | 2324 | 3157, | GPC3 | 6.29 | 12.26 | 6.24 | 3.20 | 7.00 | 7.0E−02 | 3.7E−02 | 5.5E−02 | 3.2E−02 |
| | | | | 4899, | | | | | | | | | | |
| | | | | 4900, | | | | | | | | | | |
| | | | | 4901, | | | | | | | | | | |
| | | | | 4902, | | | | | | | | | | |
| | | | | 7303, | | | | | | | | | | |
| | | | | 7576, | | | | | | | | | | |
| | | | | 6111, | | | | | | | | | | |
| 7929373 | 2049 | NM_005097 | 2325 | 2745, | LGI1 | 10.86 | 2.65 | 2.29 | 9.41 | 6.30 | 2.7E−02 | 2.2E−02 | 9.0E−03 | 3.6E−03 |
| | | | | 4359, | | | | | | | | | | |
| | | | | 8710, | | | | | | | | | | |
| | | | | 8593, | | | | | | | | | | |
| | | | | 6230, | | | | | | | | | | |
| | | | | 6132, | | | | | | | | | | |
| 8058765 | 2050 | NM_212482 | 2326 | 3732, | FN1 | 3.65 | 8.73 | 4.30 | 1.80 | 4.62 | 4.7E−01 | 1.7E−01 | 2.9E−04 | 1.2E−03 |
| | | | | 3409, | | | | | | | | | | |
| | | | | 3983, | | | | | | | | | | |
| | | | | 4677, | | | | | | | | | | |
| | | | | 4679, | | | | | | | | | | |
| | | | | 3284, | | | | | | | | | | |
| | | | | 3310, | | | | | | | | | | |
| | | | | 3403, | | | | | | | | | | |
| | | | | 3404, | | | | | | | | | | |
| | | | | 3405, | | | | | | | | | | |
| | | | | 3406, | | | | | | | | | | |
| | | | | 4727, | | | | | | | | | | |
| | | | | 3110, | | | | | | | | | | |
| | | | | 4551, | | | | | | | | | | |
| | | | | 4571, | | | | | | | | | | |
| | | | | 4572, | | | | | | | | | | |
| | | | | 4576, | | | | | | | | | | |
| | | | | 3822, | | | | | | | | | | |
| | | | | 3494, | | | | | | | | | | |
| | | | | 2852, | | | | | | | | | | |
| | | | | 3620, | | | | | | | | | | |
| | | | | 3621, | | | | | | | | | | |
| | | | | 3622, | | | | | | | | | | |
| | | | | 3623, | | | | | | | | | | |
| | | | | 3624, | | | | | | | | | | |
| | | | | 3625, | | | | | | | | | | |
| | | | | 5996, | | | | | | | | | | |
| | | | | 7280, | | | | | | | | | | |
| | | | | 7649, | | | | | | | | | | |
| | | | | 6915, | | | | | | | | | | |
| | | | | 8364, | | | | | | | | | | |
| | | | | 8529, | | | | | | | | | | |
| | | | | 6768, | | | | | | | | | | |
| | | | | 7398, | | | | | | | | | | |
| | | | | 5846, | | | | | | | | | | |
| | | | | 6424, | | | | | | | | | | |
| | | | | 8736, | | | | | | | | | | |
| | | | | 8430, | | | | | | | | | | |
| | | | | 7036, | | | | | | | | | | |
| | | | | 5993, | | | | | | | | | | |
| | | | | 8153, | | | | | | | | | | |
| | | | | 8487, | | | | | | | | | | |
| | | | | 6324, | | | | | | | | | | |
| | | | | 6771, | | | | | | | | | | |
| | | | | 6223, | | | | | | | | | | |
| | | | | 6205, | | | | | | | | | | |
| | | | | 5539, | | | | | | | | | | |
| | | | | 6620, | | | | | | | | | | |
| | | | | 6121, | | | | | | | | | | |
| | | | | 6206, | | | | | | | | | | |
| | | | | 8147, | | | | | | | | | | |
| | | | | 5687, | | | | | | | | | | |
| 8095303 | 2051 | NM_015236 | 2327 | 2842, | LPHN3 | 8.14 | 4.02 | 1.86 | 3.77 | 4.45 | 4.0E−02 | 1.6E−02 | 1.5E−01 | 3.7E−02 |
| | | | | 4699, | | | | | | | | | | |
| | | | | 4713, | | | | | | | | | | |
| | | | | 4296, | | | | | | | | | | |
| | | | | 4285, | | | | | | | | | | |
| | | | | 8560, | | | | | | | | | | |
| | | | | 7869, | | | | | | | | | | |
| | | | | 8477, | | | | | | | | | | |
| | | | | 8293, | | | | | | | | | | |
| | | | | 8434, | | | | | | | | | | |
| | | | | 5644, | | | | | | | | | | |
| | | | | 8571, | | | | | | | | | | |
| | | | | 8574, | | | | | | | | | | |
| | | | | 8160, | | | | | | | | | | |
| | | | | 8174, | | | | | | | | | | |
| | | | | 5553, | | | | | | | | | | |
| | | | | 7807, | | | | | | | | | | |
| | | | | 8297, | | | | | | | | | | |
| | | | | 8402, | | | | | | | | | | |
| | | | | 8511, | | | | | | | | | | |
| | | | | 8619, | | | | | | | | | | |
| | | | | 8139, | | | | | | | | | | |
| | | | | 8480, | | | | | | | | | | |
| 8097910 | 2052 | NM_005141 | 2328 | 3895, | FGB | 3.34 | 4.95 | 5.54 | 3.74 | 4.39 | 2.4E−01 | 3.3E−01 | 2.3E−01 | 2.9E−01 |
| | | | | 5121, | | | | | | | | | | |
| | | | | 5122, | | | | | | | | | | |
| | | | | 8372, | | | | | | | | | | |
| | | | | 7847, | | | | | | | | | | |
| | | | | 5858, | | | | | | | | | | |
| | | | | 8448, | | | | | | | | | | |
| | | | | 6585, | | | | | | | | | | |
| | | | | 8337, | | | | | | | | | | |
| 8095110 | 2053 | NM_000222 | 2329 | 3646, | KIT | 4.19 | 8.30 | 3.08 | 1.56 | 4.28 | 4.9E−03 | 2.4E−04 | 5.9E−02 | 8.4E−03 |
| | | | | 4153, | | | | | | | | | | |
| | | | | 4152, | | | | | | | | | | |
| | | | | 5648, | | | | | | | | | | |
| | | | | 8162, | | | | | | | | | | |
| 8056222 | 2054 | NM_001935 | 2330 | 3604, | DPP4 | 3.37 | 6.97 | 4.32 | 2.09 | 4.19 | 2.2E−01 | 1.6E−01 | 1.5E−01 | 1.1E−01 |
| | | | | 3605, | | | | | | | | | | |
| | | | | 4611, | | | | | | | | | | |
| | | | | 2562, | | | | | | | | | | |
| | | | | 2570, | | | | | | | | | | |
| | | | | 3550, | | | | | | | | | | |
| | | | | 4303, | | | | | | | | | | |
| | | | | 3611, | | | | | | | | | | |
| | | | | 6918, | | | | | | | | | | |
| | | | | 6975, | | | | | | | | | | |
| | | | | 6558, | | | | | | | | | | |
| | | | | 7617, | | | | | | | | | | |
| | | | | 8396, | | | | | | | | | | |
| | | | | 7176, | | | | | | | | | | |
| | | | | 6249, | | | | | | | | | | |
| | | | | 7784, | | | | | | | | | | |
| | | | | 8632, | | | | | | | | | | |
| | | | | 8468, | | | | | | | | | | |
| 8167835 | 2055 | NM_001039705 | 2331 | 2908, | TRO | 3.40 | 4.69 | 2.20 | 1.60 | 2.97 | 5.1E−04 | 6.3E−05 | 7.6E−02 | 1.0E−02 |
| | | | | 2909, | | | | | | | | | | |
| | | | | 2910, | | | | | | | | | | |
| | | | | 2911, | | | | | | | | | | |
| | | | | 3329, | | | | | | | | | | |
| | | | | 4523, | | | | | | | | | | |
| | | | | 4561, | | | | | | | | | | |
| | | | | 2927, | | | | | | | | | | |
| | | | | 3265, | | | | | | | | | | |
| | | | | 3266, | | | | | | | | | | |
| | | | | 3938, | | | | | | | | | | |
| | | | | 6828, | | | | | | | | | | |
| | | | | 7971, | | | | | | | | | | |
| | | | | 8198, | | | | | | | | | | |
| | | | | 6749, | | | | | | | | | | |
| | | | | 7539, | | | | | | | | | | |
| | | | | 6497, | | | | | | | | | | |
| | | | | 5600, | | | | | | | | | | |
| | | | | 6368, | | | | | | | | | | |
| | | | | 6521, | | | | | | | | | | |
| | | | | 6543, | | | | | | | | | | |
| | | | | 7262, | | | | | | | | | | |
| | | | | 6752, | | | | | | | | | | |
| | | | | 7979, | | | | | | | | | | |
| | | | | 7021, | | | | | | | | | | |
| | | | | 6782, | | | | | | | | | | |
| | | | | 7644, | | | | | | | | | | |
| | | | | 6999, | | | | | | | | | | |
| | | | | 7279, | | | | | | | | | | |
| | | | | 6597, | | | | | | | | | | |
| | | | | 5857, | | | | | | | | | | |
| | | | | 7072, | | | | | | | | | | |
| | | | | 7725, | | | | | | | | | | |
| | | | | 5327, | | | | | | | | | | |
| | | | | 8749, | | | | | | | | | | |
| | | | | 7136, | | | | | | | | | | |
| 7944869 | 2056 | NM_017425 | 2332 | 2833, | SPA17 | 2.63 | 3.76 | 3.08 | 2.15 | 2.90 | 2.3E−01 | 1.4E−01 | 3.2E−02 | 1.6E−02 |
| | | | | 2894, | | | | | | | | | | |
| | | | | 4744, | | | | | | | | | | |
| | | | | 5335, | | | | | | | | | | |
| 8081001 | 2057 | NM_002942 | 2333 | 4181, | ROBO2 | 3.08 | 2.63 | 2.60 | 3.05 | 2.84 | 2.5E−02 | 2.4E−02 | 5.4E−02 | 5.3E−02 |
| | | | | 5144, | | | | | | | | | | |
| | | | | 5143, | | | | | | | | | | |
| | | | | 7229, | | | | | | | | | | |
| | | | | 7140, | | | | | | | | | | |
| | | | | 7162, | | | | | | | | | | |
| | | | | 7040, | | | | | | | | | | |
| | | | | 8742, | | | | | | | | | | |
| | | | | 7889, | | | | | | | | | | |
| 7976783 | 2058 | NM_003836 | 2334 | 4273, | DLK1 | 3.61 | 2.14 | 1.89 | 3.19 | 2.71 | 6.3E−04 | 2.0E−02 | 1.2E−03 | 8.4E−02 |
| | | | | 4994, | | | | | | | | | | |
| | | | | 6774, | | | | | | | | | | |
| | | | | 5796, | | | | | | | | | | |
| | | | | 6319, | | | | | | | | | | |

Table 15.
Provided are the description of the cell surface genes along with the sequence identifiers of the Affymetrix probes, the target sequence identified by the Affymetrix probe, the polynucleotide represented by the target sequence and the Public ID (and SEQ ID NO:) of the mRNA sequence representative of the target sequence.
“Polyn.” = polynucleotide;
“Rep.” = representative;
Also shown are the fold change and T-test p-values for change in expression levels of the indicated genes between the PDX1-GFP cells and the Pancreas cells (PDX1/PANC); SOX17-GFP cells and the Pancreas cells (SOX17/PANC); SOX17-GFP cells and undifferentiated hESCs (PDX1/HESC); the PDX1-GFP cells and undifferentiated hESCs (PDX1/HESC).

TABLE 16
PDX1 and Pancreas specific cell surface

| | | | | | | PDX1/ | | | PANC/ | | | | | |
|---|---|---|---|---|---|---|---|---|---|---|---|---|---|---|
| | | Rep. | | Polyn. SEQ | | HESC | PDX1/SOX17 | PANC/SOX17 | HESC | | PDX1 | PDX1 | PANC | PANC |
| | Affy. target nucl. | Public | | ID NOs: rep. | Gene | fold | fold | fold | fold | FC | vs. | vs. | vs. | vs. |
| Probe Set ID | SEQ ID NO: | ID | SEQ ID NO: | by target | Symbol | change | change | change | change | average | HESC | SOX17 | HESC | SOX17 |
| 8115147 | 2059 | NM_001025159 | 2335 | 2996, 5297, | CD74 | 2.79 | 2.22 | 12.88 | 16.18 | 8.52 | 2.8E−02 | 2.8E−02 | 2.6E−03 | 4.9E−03 |
| | | | | 5295, 5296, | | | | | | | | | | |
| | | | | 7571, 5325, | | | | | | | | | | |
| | | | | 8303, 8172, | | | | | | | | | | |
| | | | | 8179, 8156, | | | | | | | | | | |
| | | | | 6067, 8367, | | | | | | | | | | |
| | | | | 8576, 7868, | | | | | | | | | | |
| 7947156 | 2060 | NM_001135091 | 2336 | 3463, 4618, | MUC15 | 8.35 | 7.47 | 2.89 | 3.22 | 5.48 | 4.6E−02 | 4.6E−02 | 1.9E−01 | 2.3E−01 |
| | | | | 4620, 4619, | | | | | | | | | | |
| | | | | 5504, 6821, | | | | | | | | | | |
| | | | | 7005, | | | | | | | | | | |
| 7996081 | 2061 | NM_201524 | 2337 | 3334, 4786, | GPR56 | 4.74 | 3.21 | 5.30 | 7.82 | 5.27 | 1.5E−01 | 1.5E−01 | 8.2E−04 | 5.7E−03 |
| | | | | 4787, 4788, | | | | | | | | | | |
| | | | | 4789, 4790, | | | | | | | | | | |
| | | | | 4791, 4792, | | | | | | | | | | |
| | | | | 4793, 6472, | | | | | | | | | | |
| | | | | 7052, 6947, | | | | | | | | | | |
| | | | | 6626, 7618, | | | | | | | | | | |
| 7916584 | 2062 | NM_002353 | 2338 | 2675, 4337, | TACSTD2 | 2.77 | 2.65 | 6.30 | 6.58 | 4.57 | 1.9E−02 | 1.9E−02 | 7.8E−02 | 9.1E−02 |
| | | | | 6094, | (TROP- | | | | | | | | | |
| | | | | | 2) | | | | | | | | | |
| 7918936 | 2063 | NM_024626 | 2339 | 2837, 3971, | VTCN1 | 6.12 | 5.23 | 2.52 | 2.95 | 4.21 | 4.0E−02 | 4.0E−02 | 1.4E−01 | 2.3E−01 |
| | | | | 6218, 6213, | | | | | | | | | | |
| | | | | 7307, 8522, | | | | | | | | | | |
| | | | | 5804, 6025, | | | | | | | | | | |
| 8056184 | 2064 | NM_000888 | 2340 | 3091, 2830, | ITGB6 | 5.53 | 4.77 | 2.62 | 3.04 | 3.99 | 1.8E−01 | 1.8E−01 | 1.1E−01 | 1.7E−01 |
| | | | | 8224, 8635, | | | | | | | | | | |
| | | | | 5643, 7596, | | | | | | | | | | |
| | | | | 6710, | | | | | | | | | | |
| 8156134 | 2065 | NM_006180 | 2341 | 3803, 3756, | NTRK2 | 3.42 | 3.52 | 4.32 | 4.20 | 3.87 | 1.5E−01 | 1.5E−01 | 2.6E−04 | 4.0E−03 |
| | | | | 4629, 4630, | | | | | | | | | | |
| | | | | 3840, 3841, | | | | | | | | | | |
| | | | | 7335, 5675, | | | | | | | | | | |
| | | | | 5488, 5700, | | | | | | | | | | |
| | | | | 5977, 6773, | | | | | | | | | | |
| | | | | 7194, 6916, | | | | | | | | | | |
| | | | | 6615, | | | | | | | | | | |
| 8095744 | 2066 | NM_001657 | 2342 | 2941, 3130, | AREG | 3.27 | 2.86 | 3.81 | 4.36 | 3.57 | 1.7E−01 | 1.7E−01 | 4.9E−02 | 7.2E−02 |
| | | | | 6586, 5463, | | | | | | | | | | |
| | | | | 6936, | | | | | | | | | | |
| 8081686 | 2067 | NM_033254 | 2343 | 2900, 3458, | BOC | 4.26 | 2.87 | 2.32 | 3.44 | 3.22 | 1.0E−01 | 1.0E−01 | 4.1E−02 | 1.8E−01 |
| | | | | 4375, 3408, | | | | | | | | | | |
| | | | | 2980, 3094, | | | | | | | | | | |
| | | | | 3128, 3691, | | | | | | | | | | |
| | | | | 4325, 3512, | | | | | | | | | | |
| | | | | 7851, 7097, | | | | | | | | | | |
| | | | | 8462, 8015, | | | | | | | | | | |
| | | | | 8182, 8307, | | | | | | | | | | |
| | | | | 8026, 7628, | | | | | | | | | | |
| | | | | 7853, 5922, | | | | | | | | | | |
| | | | | 7736, 5497, | | | | | | | | | | |
| | | | | 8579, | | | | | | | | | | |
| 8046695 | 2068 | NM_000885 | 2344 | 2653, 3850, | ITGA4 | 2.24 | 2.71 | 3.61 | 3.00 | 2.89 | 2.9E−02 | 2.9E−02 | 2.2E−02 | 2.1E−02 |
| | | | | 4838, 4839, | | | | | | | | | | |
| | | | | 4840, 4841, | | | | | | | | | | |
| | | | | 4842, 4843, | | | | | | | | | | |
| | | | | 4844, 7580, | | | | | | | | | | |
| | | | | 7623, 8157, | | | | | | | | | | |
| | | | | 8345, 8766, | | | | | | | | | | |
| | | | | 7537, 7987, | | | | | | | | | | |
| | | | | 8342, 8492, | | | | | | | | | | |
| 7961151 | 2069 | NM_007360 | 2345 | 4264, 2991, | KLRK1 | 2.51 | 2.29 | 3.05 | 3.34 | 2.80 | 7.9E−02 | 7.9E−02 | 6.9E−02 | 8.2E−02 |
| | | | | 3980, 5238, | | | | | | | | | | |
| | | | | 5378, 6831, | | | | | | | | | | |
| | | | | 5634, | | | | | | | | | | |

Table 16.
Provided are the description of the cell surface genes along with the sequence identifiers of the Affymetrix probes, the target sequence identified by the Affymetrix probe, the polynucleotide represented by the target sequence and the Public ID (and SEQ ID NO:) of the mRNA sequence representative of the target sequence.
“Polyn.” = polynucleotide;
“Rep.” = representative;
Also shown are the fold change and T-test p-values for change in expression levels of the indicated genes between the PDX1-GFP cells and undifferentiated hESCs (PDX1/HESC); the PDX1-GFP cells and SOX17-GFP cells (PDX1/SOX17); the Pancreas cells and SOX17 cells (PANC/SOX17); and the Pancreas cells and the hESCs (PANC/HESC);

TABLE 17
SOX17 specific putative cell surface genes

| | | | SEQ | | | | | | | | | |
|---|---|---|---|---|---|---|---|---|---|---|---|---|
| | | | ID | | | | | | | | | |
| | Affy. | | NO: | | | | | | | | | |
| | target | | (of | | | | | | | | | |
| | nucl. | | Rep. | | | SOX17/ | SOX17/ | SOX17/ | | | | |
| | SEQ | Rep. | Pub- | Polyn. | | HESC | PDX1 | PANC | FC | SOX17 | SOX17 | SOX17 |
| Probe | ID | Public | lic | SEQ ID NOs: | Gene | fold | fold | fold | aver- | vs. | vs. | vs. |
| set ID | NO: | ID | ID) | rep. by target | Symbol | change | change | change | age | HESC | PDX1 | PANC |
| 8065412 | 2070 | NM_001898 | 2346 | 3369, 3033, 5734, | CST1 | 8.15 | 10.57 | 155.94 | 58.22 | 0.0006 | 0.1703 | 0.0001 |
| | | | | 6511, | | | | | | | | |
| 7927631 | 2071 | NM_012242 | 2347 | 3471, 3796, 7543, | DKK1 | 12.95 | 7.52 | 73.19 | 31.22 | 0.0004 | 0.0534 | 0.0002 |
| | | | | 8463, 8242, 5959, | | | | | | | | |
| 8152617 | 2072 | NM_005328 | 2348 | 2676, 4348, 5843, | HAS2 | 4.17 | 5.70 | 73.73 | 27.86 | 0.0191 | 0.0616 | 0.0009 |
| | | | | 6409, | | | | | | | | |
| 7921834 | 2073 | NM_001643 | 2349 | 2901, 2758, 6253, | APOA2 | 17.82 | 4.25 | 45.73 | 22.60 | 0.0032 | 0.3017 | 0.0010 |
| | | | | 8161, 7460, 7113, | | | | | | | | |
| | | | | 8544, 6696, 7530, | | | | | | | | |
| | | | | 7963, 6627, 6449, | | | | | | | | |
| 8022674 | 2074 | NM_001792 | 2350 | 3134, 4668, 5546, | CDH2 | 2.39 | 2.80 | 61.48 | 22.22 | 0.0457 | 0.1237 | 0.0002 |
| 7957140 | 2075 | NM_003667 | 2351 | 2732, 3193, 6795, | LGR5 | 7.91 | 8.46 | 32.45 | 16.28 | 0.0013 | 0.0713 | 0.0001 |
| | | | | 5509, | | | | | | | | |
| 8095646 | 2076 | NM_001134 | 2352 | 3041, 2756, 7886, | AFP | 8.81 | 2.45 | 30.64 | 13.97 | 0.1268 | 0.6168 | 0.0390 |
| | | | | 7273, 8047, 8272, | | | | | | | | |
| 8065071 | 2077 | NM_198391 | 2353 | 2812, 5172, 5173, | FLRT3 | 9.61 | 5.74 | 24.40 | 13.25 | 0.0051 | 0.0774 | 0.0017 |
| | | | | 5918, 7056, 6380, | | | | | | | | |
| 8050619 | 2078 | NM_000384 | 2354 | 2558, 3976, 5351, | APOB | 17.42 | 3.68 | 15.61 | 12.24 | 0.0141 | 0.3073 | 0.0164 |
| 8172670 | 2079 | NM_001013742 | 2355 | 3778, 5274, 6444, | DGKK | 9.55 | 8.75 | 14.66 | 10.99 | 0.0227 | 0.0287 | 0.0133 |
| 7997188 | 2080 | NM_005143 | 2356 | 3893, 4016, 4018, | HP | 7.70 | 14.45 | 4.02 | 8.72 | 0.0000 | 0.0003 | 0.0848 |
| | | | | 2580, 2622, 2977, | | | | | | | | |
| | | | | 2992, 3453, 3617, | | | | | | | | |
| | | | | 4365, 4366, 6921, | | | | | | | | |
| | | | | 6310, 6000, 6001, | | | | | | | | |
| 8166747 | 2081 | NM_138780 | 2357 | 3411, 4887, 4885, | SYTL5 | 13.15 | 7.21 | 4.94 | 8.44 | 0.0348 | 0.0865 | 0.1644 |
| | | | | 4886, 5912, 6888, | | | | | | | | |
| | | | | 5629, | | | | | | | | |
| 7977786 | 2082 | NM_003982 | 2358 | 2789, 5292, 5291, | SLC7A7 | 6.69 | 6.71 | 5.99 | 6.46 | 0.0520 | 0.0694 | 0.0685 |
| | | | | 7158, 7255, 5870, | | | | | | | | |
| | | | | 8255, 6471, 7642, | | | | | | | | |
| 8020795 | 2083 | NM_000371 | 2359 | 2722, 4730, 6739, | TTR | 14.97 | 2.62 | 1.70 | 6.43 | 0.0295 | 0.5580 | 0.7566 |
| | | | | 5362, | | | | | | | | |
| 8057506 | 2084 | NM_001463 | 2360 | 2679, 5106, 5695, | FRZB | 3.96 | 2.12 | 13.08 | 6.39 | 0.0323 | 0.2374 | 0.0095 |
| 8121916 | 2085 | NM_032784 | 2361 | 3018, 3878, 6102, | RSPO3 | 9.02 | 2.83 | 6.85 | 6.24 | 0.0361 | 0.4235 | 0.0693 |
| | | | | 6281, 8688, | | | | | | | | |
| 8155930 | 2086 | NM_001490 | 2362 | 2578, 4156, 4157, | GCNT1 | 3.13 | 2.82 | 12.65 | 6.20 | 0.0322 | 0.0469 | 0.0024 |
| | | | | 4158, 4159, 4160, | | | | | | | | |
| | | | | 8460, 6349, 8001, | | | | | | | | |
| | | | | 7226, 6641, | | | | | | | | |
| 8151341 | 2087 | NM_007332 | 2363 | 4060, 8269, 5433, | TRPA1 | 6.01 | 5.25 | 6.96 | 6.07 | 0.0138 | 0.0181 | 0.0118 |
| 8143534 | 2088 | NM_000420 | 2364 | 2886, 2987, 6934, | KEL | 5.85 | 3.84 | 7.89 | 5.86 | 0.0101 | 0.0277 | 0.0058 |
| | | | | 8187, 8288, 6818, | | | | | | | | |
| | | | | 6144, 8559, | | | | | | | | |
| 7976858 | 2089 | NM_001362 | 2365 | 2990, 4161, 8265, | DIO3 | 4.61 | 5.01 | 7.09 | 5.57 | 0.0164 | 0.0135 | 0.0069 |
| | | | | 6088, | | | | | | | | |
| 8171472 | 2090 | NM_020665 | 2366 | 2960, 4942, 6430, | TMEM27 | 4.68 | 4.58 | 7.38 | 5.55 | 0.0062 | 0.0088 | 0.0031 |
| 8029536 | 2091 | NM_001645 | 2367 | 3322, 3714, 5431, | APOC1 | 3.42 | 3.05 | 9.63 | 5.37 | 0.1049 | 0.1256 | 0.0172 |
| 8059279 | 2092 | NM_004438 | 2368 | 3926, 3577, 6427, | EPHA4 | 3.81 | 2.77 | 9.52 | 5.36 | 0.0070 | 0.0234 | 0.0083 |
| | | | | 7497, 5543, | | | | | | | | |
| 8103415 | 2093 | NM_001128424 | 2369 | 3395, 4433, 4434, | C4orf18 | 7.34 | 5.08 | 3.39 | 5.27 | 0.0084 | 0.1540 | 0.0567 |
| | | | | 4435, 7152, 7195, | | | | | | | | |
| | | | | 5766, 5649, | | | | | | | | |
| 8155192 | 2094 | NM_022343 | 2370 | 3083, 3132, 7426, | GLIPR2 | 3.24 | 6.10 | 6.17 | 5.17 | 9.69E−02 | 2.99E−02 | 3.47E−02 |
| | | | | 7611, 7741, 8325, | | | | | | | | |
| | | | | 6925, | | | | | | | | |
| 8097449 | 2095 | NM_032961 | 2371 | 2914, 2936, 2935, | PCDH10 | 2.82 | 2.41 | 9.33 | 4.85 | 2.75E−02 | 2.95E−01 | 2.51E−03 |
| | | | | 7099, 5512, 8691, | | | | | | | | |
| 7970241 | 2096 | NM_000504 | 2372 | 2567, 2573, 3210, | F10 | 6.85 | 3.59 | 3.89 | 4.77 | 1.83E−02 | 9.73E−02 | 5.48E−02 |
| | | | | 3246, 4308, 4309, | | | | | | | | |
| | | | | 3935, 7894, 6670, | | | | | | | | |
| | | | | 7728, 6624, 7953, | | | | | | | | |
| | | | | 7352, 6493, | | | | | | | | |
| 8127193 | 2097 | NM_021073 | 2373 | 2611, 3202, 5997, | BMP5 | 7.19 | 2.33 | 4.68 | 4.73 | 1.45E−02 | 3.43E−01 | 4.07E−02 |
| | | | | 7150, | | | | | | | | |
| 7919314 | 2098 | NM_001461 | 2374 | 3169, 4740, 4742, | FMO5 | 6.01 | 6.14 | 1.82 | 4.66 | 2.69E−02 | 2.24E−02 | 4.69E−01 |
| | | | | 4741, 5452, 5926, | | | | | | | | |
| | | | | 6568, 7792, 6924, | | | | | | | | |
| 7968872 | 2099 | NM_013238 | 2375 | 3842, 3846, 7013, | DNAJC15 | 3.99 | 4.94 | 4.96 | 4.63 | 1.82E−02 | 3.52E−02 | 1.17E−02 |
| | | | | 8073, | | | | | | | | |
| 7942332 | 2100 | NM_016730 | 2376 | 2548, 4931, 4932, | FOLR1 | 5.10 | 2.93 | 5.60 | 4.54 | 1.56E−02 | 7.53E−02 | 1.31E−02 |
| | | | | 4933, 4934, 5730, | | | | | | | | |
| | | | | 7111, 7703, 7300, | | | | | | | | |
| 8147030 | 2101 | NM_007029 | 2377 | 4711, 5225, 5342, | STMN2 | 4.91 | 2.31 | 6.26 | 4.49 | 4.21E−03 | 2.20E−01 | 1.10E−02 |
| 7901316 | 2102 | NM_001135181 | 2378 | 4682, 4626, 4627, | SLC5A9 | 4.12 | 4.66 | 4.70 | 4.49 | 3.29E−02 | 2.49E−02 | 2.98E−02 |
| | | | | 6649, 6403, 7403, | | | | | | | | |
| | | | | 7829, 6781, 6361, | | | | | | | | |
| 8167287 | 2103 | NM_022825 | 2379 | 2854, 2855, 2856, | PORCN | 4.41 | 3.25 | 5.77 | 4.47 | 5.07E−03 | 1.25E−02 | 3.33E−03 |
| | | | | 2857, 4728, 2616, | | | | | | | | |
| | | | | 4468, 2979, 2983, | | | | | | | | |
| | | | | 3366, 3574, 3575, | | | | | | | | |
| | | | | 3573, 3576, 5975, | | | | | | | | |
| | | | | 8479, 5883, 6961, | | | | | | | | |
| | | | | 5689, 8317, 8547, | | | | | | | | |
| | | | | 6074, 7887, 5982, | | | | | | | | |
| | | | | 7832, 6053, 6535, | | | | | | | | |
| 8105013 | 2104 | NM_152403 | 2380 | 3530, 5277, 5276, | EGFLAM | 4.32 | 4.61 | 4.31 | 4.41 | 2.36E−02 | 2.67E−02 | 6.88E−02 |
| | | | | 5275, 6119, 5859, | | | | | | | | |
| | | | | 8466, 5742, 6783, | | | | | | | | |
| | | | | 8384, 6717, 7825, | | | | | | | | |
| | | | | 8629, 8422, 7942, | | | | | | | | |
| | | | | 6265, | | | | | | | | |
| 8059955 | 2105 | NM_022449 | 2381 | 3268, 4986, 4985, | RAB17 | 2.97 | 5.62 | 4.64 | 4.41 | 9.80E−02 | 2.73E−02 | 5.52E−02 |
| | | | | 7579, 8393, 6896, | | | | | | | | |
| | | | | 6505, 7240, 5533, | | | | | | | | |
| 8065416 | 2106 | NM_001322 | 2382 | 3515, 3034, 5782, | CST2 | 4.29 | 3.10 | 5.27 | 4.22 | 1.11E−03 | 8.10E−02 | 6.18E−04 |
| 8073633 | 2107 | NM_025225 | 2383 | 3547, 2988, 7337, | PNPLA3 | 2.32 | 2.76 | 7.56 | 4.21 | 1.20E−01 | 8.06E−02 | 1.41E−02 |
| | | | | 5314, 8107, 8426, | | | | | | | | |
| 8175288 | 2108 | NM_019556 | 2384 | 2903, 2824, 6997, | MOSPD1 | 2.05 | 3.50 | 6.98 | 4.18 | 6.67E−02 | 1.46E−02 | 2.67E−03 |
| | | | | 8283, 6003, 6290, | | | | | | | | |
| | | | | 7788, 7752, 5881, | | | | | | | | |
| 8139057 | 2109 | NM_014800 | 2385 | 2968, 3692, 4045, | ELMO1 | 5.57 | 4.60 | 2.36 | 4.18 | 1.38E−02 | 1.85E−02 | 2.21E−01 |
| | | | | 2861, 3438, 4258, | | | | | | | | |
| | | | | 4520, 4479, 2801, | | | | | | | | |
| | | | | 2880, 3542, 5280, | | | | | | | | |
| | | | | 5279, 8359, 7086, | | | | | | | | |
| | | | | 5936, 6939, 6791, | | | | | | | | |
| | | | | 6584, 7972, 7197, | | | | | | | | |
| | | | | 7051, 6279, 5770, | | | | | | | | |
| | | | | 6974, 6770, 7488, | | | | | | | | |
| | | | | 7401, 7549, 6438, | | | | | | | | |
| | | | | 7349, | | | | | | | | |
| 8022666 | 2110 | NM_031422 | 2386 | 3460, 4937, 5865, | CHST9 | 3.68 | 2.03 | 6.76 | 4.16 | 9.17E−02 | 2.98E−01 | 4.17E−02 |
| 7924342 | 2111 | NM_018713 | 2387 | 3493, 3718, 6268, | SLC30A10 | 4.77 | 3.28 | 4.38 | 4.15 | 3.27E−02 | 7.14E−02 | 4.01E−02 |
| | | | | 6130, 8273, 8216, | | | | | | | | |
| 7993588 | 2112 | NM_024847 | 2388 | 3156, 4846, 4845, | TMC7 | 3.45 | 2.13 | 6.80 | 4.13 | 8.15E−02 | 2.29E−01 | 2.94E−02 |
| | | | | 5727, 7486, | | | | | | | | |
| 8144656 | 2113 | BC132945 | 2389 | 4115, 2976, | C8orf49 | 4.28 | 4.29 | 3.78 | 4.12 | 1.72E−02 | 1.62E−02 | 2.23E−02 |
| 8111234 | 2114 | NM_004061 | 2390 | 3260, 4595, 7174, | CDH12 | 4.25 | 3.48 | 4.28 | 4.01 | 4.39E−02 | 6.74E−02 | 4.30E−02 |
| | | | | 8759, 8207, 8652, | | | | | | | | |
| | | | | 8503, 7723, 8276, | | | | | | | | |
| 8113358 | 2115 | NM_005668 | 2391 | 3302, 4599, 3244, | ST8SIA4 | 3.69 | 5.57 | 2.70 | 3.99 | 4.46E−02 | 2.36E−02 | 1.69E−01 |
| | | | | 7055, 7738, 5386, | | | | | | | | |
| 8090823 | 2116 | NM_005630 | 2392 | 2724, 4396, 7489, | SLCO2A1 | 5.26 | 3.69 | 2.94 | 3.96 | 5.59E−02 | 1.74E−01 | 1.69E−01 |
| | | | | 6355, 8401, 8414, | | | | | | | | |
| | | | | 8074, 5640, | | | | | | | | |
| 8121144 | 2117 | NM_024641 | 2393 | 4179, 5290, 6156, | MANEA | 4.38 | 3.33 | 4.07 | 3.93 | 4.95E−03 | 4.71E−02 | 4.99E−03 |
| | | | | 5952, 8006, | | | | | | | | |
| 7964602 | 2118 | NM_153377 | 2394 | 3457, 3537, 4639, | LRIG3 | 3.70 | 4.41 | 3.36 | 3.82 | 5.09E−02 | 4.70E−02 | 7.91E−02 |
| | | | | 5656, 6683, 7048, | | | | | | | | |
| 8111998 | 2119 | NM_021072 | 2395 | 3252, 5301, 5807, | HCN1 | 3.60 | 3.20 | 4.59 | 3.80 | 3.66E−02 | 5.55E−02 | 2.73E−02 |
| 8111387 | 2120 | NM_030955 | 2396 | 2863, 3711, 8350, | ADAMTS12 | 3.27 | 2.68 | 5.03 | 3.66 | 3.37E−02 | 6.13E−02 | 3.57E−02 |
| | | | | 8347, 7769, 6108, | | | | | | | | |
| | | | | 8583, | | | | | | | | |
| 7948058 | 2121 | NM_004476 | 2397 | 3060, 3615, 2779, | FOLH1 | 3.84 | 3.34 | 3.70 | 3.63 | 5.45E−02 | 8.44E−02 | 5.93E−02 |
| | | | | 2843, 3871, 2598, | | | | | | | | |
| | | | | 4703, 4705, 4140, | | | | | | | | |
| | | | | 4138, 2773, 3026, | | | | | | | | |
| | | | | 3280, 5177, 5176, | | | | | | | | |
| | | | | 2766, 5178, 3821, | | | | | | | | |
| | | | | 6173, 5921, 6307, | | | | | | | | |
| | | | | 5425, 6469, 6968, | | | | | | | | |
| 8098041 | 2122 | NM_018342 | 2398 | 2802, 3163, 3170, | TMEM144 | 4.83 | 2.59 | 3.36 | 3.59 | 4.76E−02 | 1.51E−01 | 8.13E−02 |
| | | | | 3261, 3319, 3506, | | | | | | | | |
| | | | | 3267, 4584, 8697, | | | | | | | | |
| | | | | 8424, 5686, 8259, | | | | | | | | |
| | | | | 8744, 8370, 7977, | | | | | | | | |
| | | | | 8192, 7923, 7849, | | | | | | | | |
| | | | | 8039, 7954, 8413, | | | | | | | | |
| | | | | 7830, | | | | | | | | |
| 8013606 | 2123 | NM_000638 | 2399 | 2897, 3932, 5348, | VTN | 5.44 | 2.52 | 2.78 | 3.58 | 3.57E−02 | 2.92E−01 | 1.39E−01 |
| 7913237 | 2124 | NM_018584 | 2400 | 3291, 4040, 7514, | CAMK2N1 | 5.38 | 2.04 | 2.93 | 3.45 | 2.99E−03 | 1.68E−01 | 1.56E−02 |
| | | | | 8167, | | | | | | | | |
| 7972297 | 2125 | NM_005845 | 2401 | 3298, 4237, 4238, | ABCC4 | 3.94 | 2.02 | 4.33 | 3.43 | 3.04E−02 | 1.61E−01 | 2.42E−02 |
| | | | | 6825, 6506, 6826, | | | | | | | | |
| | | | | 6736, 7298, | | | | | | | | |
| 8094520 | 2126 | NM_032456 | 2402 | 2723, 5014, 5015, | PCDH7 | 2.10 | 2.44 | 5.60 | 3.38 | 6.57E−03 | 3.94E−02 | 3.10E−04 |
| | | | | 2937, 5262, 5768, | | | | | | | | |
| | | | | 5971, | | | | | | | | |
| 7911273 | 2127 | NM_001004696 | 2403 | 3717, 6107, | OR2T4 | 3.58 | 3.35 | 3.17 | 3.37 | 1.66E−02 | 2.69E−02 | 2.30E−02 |
| 8123388 | 2128 | NM_018974 | 2404 | 3851, 4738, 4736, | UNC93A | 2.39 | 3.04 | 4.59 | 3.34 | 3.61E−02 | 2.35E−02 | 5.64E−03 |
| | | | | 5385, 8261, 6041, | | | | | | | | |
| | | | | 8180, 6272, | | | | | | | | |
| 7902235 | 2129 | NM_020794 | 2405 | 2985, 3272, 3712, | LRRC7 | 4.47 | 2.42 | 2.94 | 3.27 | 4.41E−03 | 1.18E−01 | 1.57E−02 |
| | | | | 4096, 4697, 4027, | | | | | | | | |
| | | | | 5312, 5716, 5818, | | | | | | | | |
| | | | | 7008, 6195, 6139, | | | | | | | | |
| 8145736 | 2130 | NM_013958 | 2406 | 2651, 4050, 4820, | NRG1 | 2.76 | 2.44 | 4.60 | 3.26 | 3.01E−03 | 3.23E−02 | 2.10E−03 |
| | | | | 4824, 4825, 4826, | | | | | | | | |
| | | | | 4827, 4828, 4829, | | | | | | | | |
| | | | | 4830, 4823, 4821, | | | | | | | | |
| | | | | 4822, 4831, 4832, | | | | | | | | |
| | | | | 4833, 4834, 4835, | | | | | | | | |
| | | | | 5786, 8022, 8533, | | | | | | | | |
| | | | | 5741, 6039, 6077, | | | | | | | | |
| | | | | 7952, 8077, 7456, | | | | | | | | |
| | | | | 5800, 5979, 7905, | | | | | | | | |
| | | | | 8268, 8671, | | | | | | | | |
| 8174389 | 2131 | NM_033641 | 2407 | 2623, 4165, 4167, | COL4A6 | 2.45 | 2.49 | 4.84 | 3.26 | 8.73E−02 | 8.17E−02 | 1.62E−02 |
| | | | | 6197, 5733, 6413, | | | | | | | | |
| | | | | 8100, 7288, 7442, | | | | | | | | |
| | | | | 7535, | | | | | | | | |
| 7947512 | 2132 | NM_015430 | 2408 | 3786, 3701, 3702, | PAMR1 | 4.04 | 2.34 | 3.37 | 3.25 | 1.98E−02 | 1.39E−01 | 4.14E−02 |
| | | | | 6790, 5537, 6920, | | | | | | | | |
| 8154135 | 2133 | NM_004170 | 2409 | 3070, 5025, 5401, | SLC1A1 | 2.42 | 3.71 | 3.59 | 3.24 | 2.52E−01 | 1.18E−01 | 1.28E−01 |
| | | | | 7218, 8331, | | | | | | | | |
| 8089011 | 2134 | NM_000313 | 2410 | 2597, 4770, 6690, | PROS1 | 3.68 | 3.53 | 2.45 | 3.22 | 5.10E−02 | 5.29E−02 | 1.40E−01 |
| 8118209 | 2135 | NM_019101 | 2411 | 2785, 3005, 2797, | APOM | 3.46 | 2.22 | 3.77 | 3.15 | 2.08E−01 | 3.99E−01 | 1.84E−01 |
| | | | | 3131, 7568, 7419, | | | | | | | | |
| | | | | 7154, 6913, 7443, | | | | | | | | |
| | | | | 7676, 7525, 6531, | | | | | | | | |
| | | | | 7361, 7365, 7639, | | | | | | | | |
| | | | | 7323, 7713, 7039, | | | | | | | | |
| | | | | 6734, 7139, 6637, | | | | | | | | |
| | | | | 6503, 6767, 6861, | | | | | | | | |
| | | | | 6765, | | | | | | | | |
| 8045664 | 2136 | NM_177964 | 2412 | 3039, 3538, 8714, | LYPD6B | 3.68 | 2.06 | 3.60 | 3.12 | 3.42E−02 | 2.45E−01 | 3.90E−02 |
| | | | | 5464, 7286, 6455, | | | | | | | | |
| | | | | 7123, 7806, 7494, | | | | | | | | |
| | | | | 8341, 7067, 6613, | | | | | | | | |
| 8004691 | 2137 | NM_203411 | 2413 | 3456, 3564, 5821, | TMEM88 | 2.64 | 2.18 | 4.46 | 3.09 | 1.78E−01 | 3.55E−01 | 1.06E−01 |
| 7921702 | 2138 | NM_080878 | 2414 | 3464, 3488, 6169, | ITLN2 | 2.45 | 2.26 | 4.52 | 3.08 | 2.29E−02 | 5.63E−02 | 3.65E−03 |
| | | | | 7935, 8767, | | | | | | | | |
| 8132250 | 2139 | NM_133468 | 2415 | 3324, 4608, 8606, | BMPER | 2.95 | 2.80 | 3.43 | 3.06 | 1.67E−02 | 1.55E−02 | 6.52E−02 |
| | | | | 5589, 7995, 6712, | | | | | | | | |
| | | | | 6435, 7169, 8472, | | | | | | | | |
| 8132347 | 2140 | NM_181791 | 2416 | 3313, 3318, 6342, | GPR141 | 2.93 | 2.87 | 2.84 | 2.88 | 1.22E−01 | 1.27E−01 | 1.25E−01 |
| | | | | 5701, 6692, | | | | | | | | |
| 8119898 | 2141 | NM_001025366 | 2417 | 3808, 4966, 4967, | VEGFA | 3.81 | 2.14 | 2.02 | 2.66 | 8.92E−03 | 1.74E−01 | 8.31E−02 |
| | | | | 4968, 4969, 4970, | | | | | | | | |
| | | | | 4971, 4972, 4973, | | | | | | | | |
| | | | | 4974, 4975, 4976, | | | | | | | | |
| | | | | 4977, 4978, 4979, | | | | | | | | |
| | | | | 4980, 4981, 8712, | | | | | | | | |
| | | | | 5968, 6175, 7640, | | | | | | | | |
| | | | | 5961, 5690, 7243, | | | | | | | | |
| | | | | 8549, 6759, 6136, | | | | | | | | |
| | | | | 7716, 8136, 8355, | | | | | | | | |
| | | | | 8159, 8018, 7079, | | | | | | | | |
| | | | | 8270, 8120, 7866, | | | | | | | | |
| | | | | 8507, 8066, 7946, | | | | | | | | |

Table 17.
Provided are the description of the putative cell surface genes along with the sequence identifiers of the Affymetrix probes, the target sequence identified by the Affymetrix probe, the polynucleotide represented by the target sequence and the Public ID (and SEQ ID NO:) of the mRNA sequence representative of the target sequence.
“Polyn.” = polynucleotide;
“Rep.” = representative;
Also shown are the fold change and T-test p-values for change in expression levels of the indicated genes between the SOX17-GFP cells and undifferentiated hESCs (SOX17/HESC); the SOX17-GFP cells and PDX1-GFP cells (SOX17/PDX1); and the SOX17-GFP cells and the Pancreas cells (SOX17/PANC).

TABLE 18
PDX1 specific putative cell surface genes

| | Affy. target | | SEQ ID NO: | | | |
|---|---|---|---|---|---|---|
| Probe | nucl. SEQ | Rep. | (of Rep. | Polyn. SEQ ID NOs: | Gene | PDX1/HESC |
| set ID | ID NO: | Public ID | Public ID) | rep. by target | Symbol | fold change |
| 7989073 | 2142 | NM_173814 | 2418 | 3710, 4778, 6379, | PRTG | 17.99 |
| 8135774 | 2143 | NM_002851 | 2419 | 2599, 3943, 7457, | PTPRZ1 | 1.82 |
| | | | | 8030, 7815, 8011, | | |
| | | | | 8237, 7646, | | |
| 8109926 | 2144 | NM_014211 | 2420 | 3898, 4597, 7818, | GABRP | 10.28 |
| | | | | 8036, 8604, 8494, | | |
| | | | | 8777, 8597, 5487, | | |
| 7963970 | 2145 | NM_006928 | 2421 | 3105, 5245, 6941, | SILV | 3.32 |
| | | | | 6287, | | |
| 8020384 | 2146 | AK293321 | 2422 | 4467, 2876, 4295, | KIAA1772 | 12.92 |
| | | | | 4675, 7359, 7061, | | |
| | | | | 5529, 7232, | | |
| 8169061 | 2147 | NM_000533 | 2423 | 3671, 3836, 3741, | PLP1 | 3.49 |
| | | | | 3742, 2596, 2595, | | |
| | | | | 2588, 4267, 4502, | | |
| | | | | 4503, 2878, 4324, | | |
| | | | | 4329, 4438, 3554, | | |
| | | | | 3553, 8469, 6590, | | |
| | | | | 7115, 7231, 7458, | | |
| | | | | 6933, 7196, 7209, | | |
| | | | | 8108, 8781, 8623, | | |
| | | | | 8141, 8486, 7855, | | |
| | | | | 5832, 8385, 5923, | | |
| | | | | 8694, 6335, 7709, | | |
| | | | | 6348, 8343, 7178, | | |
| | | | | 7629, | | |
| 7953873 | 2148 | BX647938 | 2424 | 3414, 3204, 8476, | OVOS | 3.13 |
| | | | | 8450, | | |
| 8112971 | 2149 | NM_001884 | 2425 | 2661, 3452, 4443, | HAPLN1 | 4.27 |
| | | | | 8313, 8478, 8578, | | |
| | | | | 8217, 5490, 8326, | | |
| | | | | 8275, | | |
| 8128284 | 2150 | NM_004440 | 2426 | 2636, 4616, 6203, | EPHA7 | 2.00 |
| | | | | 6224, | | |
| 7953532 | 2151 | NM_001975 | 2427 | 3363, 2973, 5374, | ENO2 | 2.71 |
| 8108697 | 2152 | NM_015669 | 2428 | 2872, 2931, 5379, | PCDHB5 | 1.92 |
| 7953873 | 2153 | BX647938 | 2429 | 3414, 3204, 8476, | OVOS | 2.96 |
| | | | | 8450, | | |
| 7957338 | 2154 | NM_005639 | 2430 | 3480, 4632, 4633, | SYT1 | 2.87 |
| | | | | 4634, 7165, 5424, | | |
| | | | | 6857, | | |
| 7972259 | 2155 | NM_001922 | 2431 | 2627, 4441, 4442, | DCT | 6.21 |
| | | | | 6478, 8000, 7156, | | |
| | | | | 7726, 6808, 8056, | | |
| 8113356 | 2156 | AK172782 | 2432 | 3609, | GPAM | 5.84 |
| 7972239 | 2157 | NM_032229 | 2433 | 3864, 3532, 6395, | SLITRK6 | 5.14 |
| 8021245 | 2158 | NM_005215 | 2434 | 4508, 4919, 7276, | DCC | 5.58 |
| | | | | 5767, 6546, | | |
| 7968678 | 2159 | NM_207361 | 2435 | 3444, 4093, 5476, | FREM2 | 5.40 |
| | | | | 7899, | | |
| 8018114 | 2160 | NM_001144952 | 2436 | 2814, 4748, 7774, | SDK2 | 5.29 |
| | | | | 5765, 6851, 6326, | | |
| 8128001 | 2161 | NM_000735 | 2437 | 2949, 5306, 5947, | CGA | 5.24 |
| 8004545 | 2162 | NM_001678 | 2438 | 2604, 3681, 5449, | ATP1B2 | 5.83 |
| 8140686 | 2163 | NM_152754 | 2439 | 3466, 3557, 8721, | SEMA3D | 5.79 |
| | | | | 5583, | | |
| 8108753 | 2164 | NM_018935 | 2440 | 3191, 2929, 5380, | PCDHB15 | 4.40 |
| 7996837 | 2165 | NM_004360 | 2441 | 4149, 4182, 2614, | CDH1 | 2.09 |
| | | | | 4278, 4556, 2794, | | |
| | | | | 2795, 4415, 4294, | | |
| | | | | 4315, 4347, 5506, | | |
| | | | | 7453, 5404, 7133, | | |
| 7929822 | 2166 | NM_003393 | 2442 | 3013, 4006, 6207, | WNT8B | 4.75 |
| 8168517 | 2167 | NM_005296 | 2443 | 3834, 4756, 7854, | LPAR4 | 1.95 |
| | | | | 5927, | | |
| 7994026 | 2168 | NM_130464 | 2444 | 3833, 4524, 5020, | NPIPL3 | 5.42 |
| | | | | 4635, 3908, 7496, | | |
| | | | | 7414, 7388, 6046, | | |
| | | | | 6948, 7475, 6819, | | |
| | | | | 8569, 5650, 6371, | | |
| | | | | 7765, 6554, 6829, | | |
| | | | | 5907, 7686, 6199, | | |
| | | | | 8130, 8706, 8211, | | |
| | | | | 7864, | | |
| 8046895 | 2169 | NM_177454 | 2445 | 4274, 4070, 5467, | FAM171B | 3.56 |
| | | | | 5763, | | |
| 8143144 | 2170 | NM_002825 | 2446 | 2905, 3560, 6250, | PTN | 2.21 |
| 7929779 | 2171 | NM_000392 | 2447 | 2682, 4397, 7717, | ABCC2 | 5.16 |
| | | | | 5949, 5908, | | |
| 8100870 | 2172 | NM_014243 | 2448 | 4101, 5286, 8348, | ADAMTS3 | 3.79 |
| | | | | 5586, | | |
| 8141843 | 2173 | NM_006989 | 2449 | 5151, 5150, 7699, | RASA4 | 5.77 |
| | | | | 5542, 6353, | | |
| 8030448 | 2174 | NM_001136052 | 2450 | 3049, 5236, 5237, | CPT1C | 3.10 |
| | | | | 7371, 6022, 7446, | | |
| | | | | 5780, 5691, | | |
| 8078014 | 2175 | NM_003043 | 2451 | 3914, 4382, 4385, | SLC6A6 | 1.83 |
| | | | | 4527, 2650, 2637, | | |
| | | | | 3349, 4300, 4293, | | |
| | | | | 4603, 3999, 4602, | | |
| | | | | 6095, 6731, 7138, | | |
| | | | | 7680, 7533, 7619, | | |
| | | | | 7898, 7128, 6509, | | |
| | | | | 7006, | | |
| 8108688 | 2176 | NM_018937 | 2452 | 2924, 2930, 5388, | PCDHB3 | 3.94 |
| 8006336 | 2177 | NM_052888 | 2453 | 3521, 3984, 4680, | LRRC37B | 4.03 |
| | | | | 4511, 4567, 4302, | | |
| | | | | 3733, 5844, 6194, | | |
| | | | | 7424, | | |
| 7959025 | 2178 | NM_001109903 | 2454 | 3352, 4242, 4243, | RNFT2 | 2.20 |
| | | | | 5418, 5592, 7222, | | |
| | | | | 7129, | | |
| 8051785 | 2179 | NM_133329 | 2455 | 3647, 5227, 5228, | KCNG3 | 1.99 |
| | | | | 5783, 7561, | | |
| 8083166 | 2180 | NM_003304 | 2456 | 2670, 3955, 8655, | TRPC1 | 2.51 |
| | | | | 8076, 5551, 6798, | | |
| | | | | 7437, | | |
| 8049128 | 2181 | NM_031313 | 2457 | 2557, 4233, 5696, | ALPPL2 | 3.77 |
| 8148962 | 2182 | NM_001005504 | 2458 | 4378, 4092, 3719, | OR4F21 | 3.52 |
| | | | | 3723, 3734, 5799, | | |
| | | | | 7532, 5680, 6665, | | |
| | | | | 7961, | | |
| 8006433 | 2183 | NM_002982 | 2459 | 2971, 3759, 5331, | CCL2 | 4.78 |
| 7956522 | 2184 | AF063608 | 2460 | 2859, 7555, | KIF5A | 1.94 |
| 8033818 | 2185 | NM_058164 | 2461 | 2754, 4134, 5475, | OLFM2 | 3.68 |
| 8031076 | 2186 | NM_031896 | 2462 | 3827, 5226, 7212, | CACNG7 | 2.65 |
| | | | | 5339, | | |
| 7967386 | 2187 | NM_022782 | 2463 | 3124, 3475, 5829, | MPHOSPH9 | 2.00 |
| | | | | 5803, 7370, | | |
| 8143110 | 2188 | NM_012450 | 2464 | 3802, 3305, 7278, | SLC13A4 | 2.72 |
| | | | | 8106, 8640, 7462, | | |
| | | | | 8737, 6233, 7314, | | |
| | | | | 7467, | | |
| 8129573 | 2189 | NM_015529 | 2465 | 2831, 4077, 8607, | MOXD1 | 3.57 |
| | | | | 6186, | | |
| 8128837 | 2190 | NM_001123364 | 2466 | 4362, | C6orf186 | 3.86 |
| 7955469 | 2191 | NM_001039960 | 2467 | 4335, 3940, 3941, | SLC4A8 | 1.83 |
| | | | | 6177, 6955, 5856, | | |
| | | | | 6574, | | |
| 8063636 | 2192 | NM_001001433 | 2468 | 4565, 5270, 5269, | STX16 | 1.57 |
| | | | | 5271, 5272, 6016, | | |
| | | | | 6278, 6873, 8633, | | |
| | | | | 8620, 8642, 7876, | | |
| | | | | 6090, 8358, 7184, | | |
| | | | | 6337, 8702, 6864, | | |
| | | | | 5934, 6359, 5902, | | |
| | | | | 6322, | | |

| Probe | PDX1/SOX17 | PDX1/PANC | FC | PDX1/ | PDX1/ | PDX1/ |
|---|---|---|---|---|---|---|
| set ID | fold change | fold change | average | HESC | SOX17 | PANC |
| 7989073 | 1.67 | 44.84 | 21.50 | 2.18E−03 | 4.65E−01 | 1.27E−03 |
| 8135774 | 7.84 | 43.05 | 17.57 | 2.84E−02 | 9.92E−04 | 8.98E−05 |
| 8109926 | 14.17 | 13.85 | 12.77 | 6.22E−02 | 4.32E−02 | 4.56E−02 |
| 7963970 | 8.34 | 26.38 | 12.68 | 2.55E−03 | 1.25E−03 | 8.28E−05 |
| 8020384 | 3.53 | 11.66 | 9.37 | 1.98E−05 | 1.24E−02 | 8.94E−04 |
| 8169061 | 6.21 | 13.94 | 7.88 | 4.42E−04 | 1.55E−03 | 3.02E−04 |
| 7953873 | 4.15 | 13.46 | 6.91 | 1.90E−02 | 2.03E−02 | 2.06E−03 |
| 8112971 | 5.91 | 10.17 | 6.78 | 1.95E−02 | 9.53E−03 | 3.52E−03 |
| 8128284 | 2.17 | 15.05 | 6.41 | 2.20E−01 | 1.86E−01 | 4.99E−03 |
| 7953532 | 3.64 | 11.81 | 6.05 | 3.42E−02 | 8.95E−02 | 2.06E−03 |
| 8108697 | 11.87 | 3.96 | 5.92 | 3.08E−01 | 1.83E−02 | 1.25E−01 |
| 7953873 | 4.05 | 10.68 | 5.90 | 1.67E−02 | 1.84E−02 | 2.26E−03 |
| 7957338 | 4.38 | 10.29 | 5.85 | 1.17E−02 | 5.02E−03 | 5.53E−04 |
| 7972259 | 6.19 | 4.67 | 5.69 | 1.32E−01 | 1.33E−01 | 1.99E−01 |
| 8113356 | 5.67 | 5.49 | 5.67 | 1.15E−01 | 1.24E−01 | 1.27E−01 |
| 7972239 | 5.03 | 5.97 | 5.38 | 1.07E−01 | 1.10E−01 | 8.58E−02 |
| 8021245 | 4.92 | 5.31 | 5.27 | 1.01E−01 | 1.39E−01 | 1.08E−01 |
| 7968678 | 1.62 | 8.14 | 5.06 | 1.60E−02 | 4.62E−01 | 2.29E−02 |
| 8018114 | 3.87 | 6.00 | 5.05 | 7.13E−03 | 2.36E−02 | 6.24E−03 |
| 8128001 | 4.37 | 5.35 | 4.99 | 2.50E−02 | 3.39E−02 | 2.05E−02 |
| 8004545 | 4.82 | 4.24 | 4.96 | 2.18E−03 | 8.00E−03 | 8.78E−03 |
| 8140686 | 2.31 | 6.55 | 4.88 | 5.75E−02 | 4.03E−01 | 7.48E−02 |
| 8108753 | 5.61 | 3.46 | 4.49 | 1.30E−02 | 6.15E−03 | 3.65E−02 |
| 7996837 | 7.44 | 3.84 | 4.45 | 5.03E−04 | 5.81E−04 | 3.27E−01 |
| 7929822 | 3.80 | 4.79 | 4.45 | 1.08E−01 | 1.55E−01 | 1.06E−01 |
| 8168517 | 3.31 | 7.09 | 4.12 | 1.71E−01 | 5.48E−02 | 8.05E−03 |
| 7994026 | 2.63 | 3.75 | 3.93 | 2.06E−02 | 2.06E−01 | 3.92E−02 |
| 8046895 | 1.84 | 6.16 | 3.85 | 2.89E−02 | 2.67E−01 | 7.34E−03 |
| 8143144 | 3.53 | 5.72 | 3.82 | 1.00E−01 | 8.57E−02 | 1.75E−02 |
| 7929779 | 1.91 | 4.16 | 3.74 | 1.77E−01 | 6.36E−01 | 2.27E−01 |
| 8100870 | 3.04 | 4.35 | 3.73 | 3.65E−02 | 6.50E−02 | 3.23E−02 |
| 8141843 | 1.96 | 3.11 | 3.61 | 1.73E−02 | 1.93E−01 | 4.40E−02 |
| 8030448 | 1.73 | 5.83 | 3.55 | 9.71E−04 | 5.50E−02 | 2.61E−04 |
| 8078014 | 2.25 | 6.42 | 3.50 | 2.76E−02 | 3.80E−02 | 2.83E−03 |
| 8108688 | 3.21 | 3.27 | 3.47 | 3.06E−02 | 5.11E−02 | 6.64E−02 |
| 8006336 | 2.00 | 4.37 | 3.46 | 2.70E−02 | 2.13E−01 | 3.59E−02 |
| 7959025 | 2.09 | 5.91 | 3.40 | 6.84E−03 | 1.43E−02 | 1.87E−03 |
| 8051785 | 4.61 | 3.32 | 3.31 | 2.11E−01 | 3.59E−02 | 6.45E−02 |
| 8083166 | 1.92 | 5.44 | 3.29 | 1.48E−04 | 2.85E−02 | 1.01E−03 |
| 8049128 | 3.01 | 2.98 | 3.25 | 2.85E−01 | 3.75E−01 | 3.66E−01 |
| 8148962 | 2.75 | 3.48 | 3.25 | 1.01E−01 | 1.78E−01 | 1.06E−01 |
| 8006433 | 2.60 | 2.30 | 3.22 | 7.29E−02 | 2.46E−01 | 2.62E−01 |
| 7956522 | 3.39 | 4.30 | 3.21 | 6.96E−02 | 1.39E−02 | 6.49E−03 |
| 8033818 | 2.33 | 3.58 | 3.20 | 6.17E−03 | 1.08E−01 | 9.26E−03 |
| 8031076 | 2.97 | 3.68 | 3.10 | 1.49E−02 | 1.44E−01 | 5.39E−03 |
| 7967386 | 2.05 | 5.23 | 3.09 | 3.11E−02 | 1.48E−01 | 9.67E−04 |
| 8143110 | 1.89 | 4.63 | 3.08 | 2.25E−02 | 1.00E−01 | 6.15E−03 |
| 8129573 | 2.63 | 2.94 | 3.05 | 1.08E−01 | 1.97E−01 | 1.57E−01 |
| 8128837 | 3.24 | 1.97 | 3.02 | 9.06E−02 | 1.28E−01 | 3.35E−01 |
| 7955469 | 2.07 | 5.16 | 3.02 | 1.77E−04 | 4.25E−03 | 4.18E−05 |
| 8063636 | 1.54 | 1.76 | 1.62 | 2.08E−01 | 3.28E−01 | 1.30E−01 |

Table 18. Provided are the description of the putative cell surface genes along with the sequence identifiers of the Affymetrix probes, the target sequence identified by the Affymetrix probe, the polynucleotide represented by the target sequence and the Public ID (and SEQ ID NO:) of the mRNA sequence representative of the target sequence. “Polyn.” = polynucleotide; “Rep.” = representative; Also shown are the fold change and T-test p-values for change in expression levels of the indicated genes between the PDX1-GFP cells and undifferentiated hESCs (PDX1/HESC); the PDX1-GFP cells and the Pancreas cells (PDX1/PANC); and the PDX1-GFP cells and SOX17-GFP cells (PDX1/SOX17).

TABLE 19
SOX17 and PDX1 specific putative cell surface genes

| | Affy. target | | SEQ ID NO: | | | | |
|---|---|---|---|---|---|---|---|
| Probe | nucl. SEQ | Rep. | (of Rep. | Polyn. SEQ ID NOs: | Gene | PDX1/PANC | SOX17/PANC |
| set ID | ID NO: | Public ID | Public ID) | rep. by target | Symbol | fold change | fold change |
| 7989073 | 2193 | NM_173814 | 2469 | 3710, 4778, | PRTG | 44.84 | 26.86 |
| | | | | 6379, | | | |
| 7927631 | 2194 | NM_012242 | 2470 | 3471, 3796, | DKK1 | 9.73 | 73.19 |
| | | | | 7543, 8463, | | | |
| | | | | 8242, 5959, | | | |
| 7921834 | 2195 | NM_001643 | 2471 | 2901, 2758, | APOA2 | 10.76 | 45.73 |
| | | | | 6253, 8161, | | | |
| | | | | 7460, 7113, | | | |
| | | | | 8544, 6696, | | | |
| | | | | 7530, 7963, | | | |
| | | | | 6627, 6449, | | | |
| 8095646 | 2196 | NM_001134 | 2472 | 3041, 2756, | AFP | 12.50 | 30.64 |
| | | | | 7886, 7273, | | | |
| | | | | 8047, 8272, | | | |
| 8050619 | 2197 | NM_000384 | 2473 | 2558, 3976, | APOB | 4.24 | 15.61 |
| | | | | 5351, | | | |
| 8065071 | 2198 | NM_198391 | 2474 | 2812, 5172, | FLRT3 | 4.25 | 24.40 |
| | | | | 5173, 5918, | | | |
| | | | | 7056, 6380, | | | |
| 8020384 | 2199 | AK293321 | 2475 | 4467, 2876, | KIAA1772 | 11.66 | 3.30 |
| | | | | 4295, 4675, | | | |
| | | | | 7359, 7061, | | | |
| | | | | 5529, 7232, | | | |
| 8113800 | 2200 | NM_001999 | 2476 | 2620, 3843, | FBN2 | 9.22 | 12.60 |
| | | | | 5455, 7802, | | | |
| | | | | 7852, 8234, | | | |
| 8057506 | 2201 | NM_001463 | 2477 | 2679, 5106, | FRZB | 6.16 | 13.08 |
| | | | | 5695, | | | |
| 8038683 | 2202 | NM_002774 | 2478 | 2673, 3799, | KLK6 | 4.93 | 6.26 |
| | | | | 3800, 3801, | | | |
| | | | | 7560, 5608, | | | |
| | | | | 6746, 7343, | | | |
| | | | | 6725, 6526, | | | |
| 7968678 | 2203 | NM_207361 | 2479 | 3444, 4093, | FREM2 | 8.14 | 5.01 |
| | | | | 5476, 7899, | | | |
| 8121916 | 2204 | NM_032784 | 2480 | 3018, 3878, | RSPO3 | 2.42 | 6.85 |
| | | | | 6102, 6281, | | | |
| | | | | 8688, | | | |
| 7951865 | 2205 | NM_000039 | 2481 | 3902, 2762, | APOA1 | 2.20 | 8.83 |
| | | | | 6306, 5375, | | | |
| | | | | 6654, 6990, | | | |
| 7951865 | 2206 | NM_000039 | 2482 | 3902, 2762, | APOA1 | 2.21 | 8.49 |
| | | | | 6306, 5375, | | | |
| | | | | 6654, 6990, | | | |
| 8140686 | 2207 | NM_152754 | 2483 | 3466, 3557, | SEMA3D | 6.55 | 2.84 |
| | | | | 8721, 5583, | | | |
| 8143534 | 2208 | NM_000420 | 2484 | 2886, 2987, | KEL | 2.06 | 7.89 |
| | | | | 6934, 8187, | | | |
| | | | | 8288, 6818, | | | |
| | | | | 6144, 8559, | | | |
| 8127193 | 2209 | NM_021073 | 2485 | 2611, 3202, | BMP5 | 2.01 | 4.68 |
| | | | | 5997, 7150, | | | |
| 8167973 | 2210 | NM_138737 | 2486 | 3469, 2884, | HEPH | 6.78 | 6.77 |
| | | | | 4726, 4486, | | | |
| | | | | 4512, 3021, | | | |
| | | | | 2834, 2951, | | | |
| | | | | 4313, 3058, | | | |
| | | | | 4952, 4953, | | | |
| | | | | 5726, 7553, | | | |
| | | | | 7348, 6504, | | | |
| | | | | 7890, 6899, | | | |
| | | | | 5938, 6468, | | | |
| | | | | 6569, | | | |
| 8147030 | 2211 | NM_007029 | 2487 | 4711, 5225, | STMN2 | 2.71 | 6.26 |
| | | | | 5342, | | | |
| 7955142 | 2212 | NM_000725 | 2488 | 3227, 5283, | CACNB3 | 5.25 | 4.99 |
| | | | | 5827, | | | |
| 8022666 | 2213 | NM_031422 | 2489 | 3460, 4937, | CHST9 | 3.33 | 6.76 |
| | | | | 5865, | | | |
| 7993588 | 2214 | NM_024847 | 2490 | 3156, 4846, | TMC7 | 3.19 | 6.80 |
| | | | | 4845, 5727, | | | |
| | | | | 7486, | | | |
| 8046895 | 2215 | NM_177454 | 2491 | 4274, 4070, | FAM171B | 6.16 | 3.35 |
| | | | | 5467, 5763, | | | |
| 8008132 | 2216 | NM_005175 | 2492 | 3118, 3700, | ATP5G1 | 6.24 | 3.00 |
| | | | | 3699, 7206, | | | |
| | | | | 8638, 7714, | | | |
| | | | | 8758, 6255, | | | |
| | | | | 7875, 7750, | | | |
| | | | | 8115, | | | |
| 7942332 | 2217 | NM_016730 | 2493 | 2548, 4931, | FOLR1 | 1.91 | 5.60 |
| | | | | 4932, 4933, | | | |
| | | | | 4934, 5730, | | | |
| | | | | 7111, 7703, | | | |
| | | | | 7300, | | | |
| 7929779 | 2218 | NM_000392 | 2494 | 2682, 4397, | ABCC2 | 4.16 | 2.18 |
| | | | | 7717, 5949, | | | |
| | | | | 5908, | | | |
| 8113433 | 2219 | NM_001962 | 2495 | 2657, 4446, | EFNA5 | 5.21 | 5.44 |
| | | | | 8787, 5710, | | | |
| | | | | 8776, 8760, | | | |
| 8030448 | 2220 | NM_001136052 | 2496 | 3049, 5236, | CPT1C | 5.83 | 3.37 |
| | | | | 5237, 7371, | | | |
| | | | | 6022, 7446, | | | |
| | | | | 5780, 5691, | | | |
| 8167656 | 2221 | NM_001005333 | 2497 | 3365, 3727, | MAGED1 | 3.13 | 5.78 |
| | | | | 3728, 3726, | | | |
| | | | | 8338, 8682, | | | |
| | | | | 7309, 7060, | | | |
| | | | | 6807, 7682, | | | |
| | | | | 8515, 8260, | | | |
| | | | | 6701, 5806, | | | |
| | | | | 7744, | | | |
| 8141843 | 2222 | NM_006989 | 2498 | 5151, 5150, | RASA4 | 3.11 | 1.59 |
| | | | | 7699, 5542, | | | |
| | | | | 6353, | | | |
| 8073015 | 2223 | NM_006855 | 2499 | 2873, 2817, | KDELR3 | 2.26 | 3.38 |
| | | | | 2816, 5309, | | | |
| | | | | 7392, 7239, | | | |
| 8018761 | 2224 | NM_006456 | 2500 | 2638, 4437, | ST6GALNAC2 | 1.54 | 2.34 |
| | | | | 5345, | | | |
| 8097692 | 2225 | NM_001957 | 2501 | 2600, 4920, | EDNRA | 2.63 | 2.16 |
| | | | | 4921, 4922, | | | |
| | | | | 8628, 5591, | | | |
| | | | | 5960, 8235, | | | |
| | | | | 5962, 8220, | | | |
| | | | | 6628, 7962, | | | |
| 8006336 | 2226 | NM_052888 | 2502 | 3521, 3984, | LRRC37B | 4.37 | 2.19 |
| | | | | 4680, 4511, | | | |
| | | | | 4567, 4302, | | | |
| | | | | 3733, 5844, | | | |
| | | | | 6194, 7424, | | | |
| 7972297 | 2227 | NM_005845 | 2503 | 3298, 4237, | ABCC4 | 2.14 | 4.33 |
| | | | | 4238, 6825, | | | |
| | | | | 6506, 6826, | | | |
| | | | | 6736, 7298, | | | |
| 8167603 | 2228 | NM_001127899 | 2504 | 2659, 4413, | CLCN5 | 2.79 | 4.87 |
| | | | | 4414, 4062, | | | |
| | | | | 7768, 5769, | | | |
| | | | | 6329, 6401, | | | |
| | | | | 6907, 7160, | | | |
| 8050160 | 2229 | NM_138799 | 2505 | 4760, 3543, | MBOAT2 | 4.88 | 3.47 |
| | | | | 5812, 8164, | | | |
| | | | | 8465, 8453, | | | |
| | | | | 7310, 8461, | | | |
| | | | | 8368, 6454, | | | |
| | | | | 7808, | | | |
| 7917052 | 2230 | NM_152697 | 2506 | 3153, 4453, | SLC44A5 | 2.71 | 3.64 |
| | | | | 4454, 7183, | | | |
| | | | | 6087, 6160, | | | |
| 7980146 | 2231 | NM_006432 | 2507 | 3361, 3263, | NPC2 | 2.91 | 3.66 |
| | | | | 7305, 5357, | | | |
| 8131096 | 2232 | NM_001128636 | 2508 | 4884, | ELFN1 | 3.03 | 2.52 |
| 8016832 | 2233 | NM_012329 | 2509 | 3499, 3725, | MMD | 4.53 | 3.01 |
| | | | | 5396, | | | |
| 8068353 | 2234 | NM_006933 | 2510 | 3065, 4367, | SLC5A3 | 3.32 | 3.03 |
| | | | | 4168, 7291, | | | |
| | | | | 8103, 8705, | | | |
| | | | | 8188, 8498, | | | |
| | | | | 6457, | | | |
| 8150906 | 2235 | NM_017813 | 2511 | 4236, 5520, | IMPAD1 | 2.34 | 4.01 |
| 8096771 | 2236 | NM_021227 | 2512 | 3331, 3544, | OSTC | 3.36 | 3.77 |
| | | | | 8513, 8662, | | | |
| | | | | 6166, | | | |
| 8022711 | 2237 | NM_024422 | 2513 | 3516, 4406, | DSC2 | 3.66 | 4.14 |
| | | | | 4407, 5438, | | | |
| | | | | 5505, 6352, | | | |
| | | | | 7116, | | | |
| 8157270 | 2238 | NM_001859 | 2514 | 2699, 4628, | SLC31A1 | 4.11 | 4.15 |
| | | | | 6193, 6305, | | | |
| 7947165 | 2239 | NM_178498 | 2515 | 3423, 4239, | SLC5A12 | 4.13 | 3.22 |
| | | | | 7203, | | | |
| 8135488 | 2240 | NM_001099660 | 2516 | 3450, 4205, | LRRN3 | 2.69 | 1.97 |
| | | | | 4202, 4200, | | | |
| | | | | 6645, 7164, | | | |
| | | | | 5798, | | | |
| 7994026 | 2241 | NM_130464 | 2517 | 3833, 4524, | NPIPL3 | 3.51 | 2.04 |
| | | | | 5020, 4635, | | | |
| | | | | 3908, 7496, | | | |
| | | | | 7414, 7388, | | | |
| | | | | 6046, 6948, | | | |
| | | | | 7475, 6819, | | | |
| | | | | 8569, 5650, | | | |
| | | | | 6371, 7765, | | | |
| | | | | 6554, 6829, | | | |
| | | | | 5907, 7686, | | | |
| | | | | 6199, 8130, | | | |
| | | | | 8706, 8211, | | | |
| | | | | 7864, | | | |
| 8008802 | 2242 | NM_182569 | 2518 | 3086, 4924, | GDPD1 | 3.19 | 2.86 |
| | | | | 4925, 4923, | | | |
| | | | | 5759, | | | |
| 7994026 | 2243 | NM_130464 | 2519 | 3833, 4524, | NPIPL3 | 3.44 | 2.08 |
| | | | | 5020, 4635, | | | |
| | | | | 3908, 7496, | | | |
| | | | | 7414, 7388, | | | |
| | | | | 6046, 6948, | | | |
| | | | | 7475, 6819, | | | |
| | | | | 8569, 5650, | | | |
| | | | | 6371, 7765, | | | |
| | | | | 6554, 6829, | | | |
| | | | | 5907, 7686, | | | |
| | | | | 6199, 8130, | | | |
| | | | | 8706, 8211, | | | |
| | | | | 7864, | | | |
| 7994026 | 2244 | NM_130464 | 2520 | 3833, 4524, | NPIPL3 | 3.48 | 2.07 |
| | | | | 5020, 4635, | | | |
| | | | | 3908, 7496, | | | |
| | | | | 7414, 7388, | | | |
| | | | | 6046, 6948, | | | |
| | | | | 7475, 6819, | | | |
| | | | | 8569, 5650, | | | |
| | | | | 6371, 7765, | | | |
| | | | | 6554, 6829, | | | |
| | | | | 5907, 7686, | | | |
| | | | | 6199, 8130, | | | |
| | | | | 8706, 8211, | | | |
| | | | | 7864, | | | |
| 8160546 | 2245 | NM_152570 | 2521 | 4386, 3147, | LINGO2 | 2.80 | 2.77 |
| | | | | 5841, 7024, | | | |
| 8045664 | 2246 | NM_177964 | 2522 | 3039, 3538, | LYPD6B | 1.75 | 3.60 |
| | | | | 8714, 5464, | | | |
| | | | | 7286, 6455, | | | |
| | | | | 7123, 7806, | | | |
| | | | | 7494, 8341, | | | |
| | | | | 7067, 6613, | | | |

| | | | | PDX1 | PDX1 | SOX17 | SOX17 |
|---|---|---|---|---|---|---|---|
| Probe | SOX17/HESC | PDX1/HESC | FC | vs. | vs. | vs. | vs. |
| set ID | fold change | fold change | average | HESC | PANC | HESC | PANC |
| 7989073 | 10.78 | 17.99 | 25.12 | 2.18E−03 | 1.27E−03 | 9.95E−03 | 4.28E−03 |
| 7927631 | 12.95 | 1.72 | 24.40 | 4.85E−01 | 3.70E−02 | 4.00E−04 | 1.77E−04 |
| 7921834 | 17.82 | 4.19 | 19.63 | 2.79E−01 | 1.06E−01 | 3.17E−03 | 9.95E−04 |
| 8095646 | 8.81 | 3.59 | 13.89 | 3.53E−01 | 1.07E−01 | 1.27E−01 | 3.90E−02 |
| 8050619 | 17.42 | 4.73 | 10.50 | 1.55E−01 | 1.80E−01 | 1.41E−02 | 1.64E−02 |
| 8065071 | 9.61 | 1.67 | 9.98 | 4.67E−01 | 9.17E−02 | 5.11E−03 | 1.73E−03 |
| 8020384 | 3.66 | 12.92 | 7.89 | 1.98E−05 | 8.94E−04 | 1.07E−02 | 3.58E−02 |
| 8113800 | 3.03 | 2.22 | 6.77 | 5.94E−02 | 2.49E−03 | 1.98E−02 | 1.36E−03 |
| 8057506 | 3.96 | 1.87 | 6.27 | 1.38E−01 | 1.99E−02 | 3.23E−02 | 9.55E−03 |
| 8038683 | 6.87 | 5.41 | 5.87 | 5.13E−02 | 5.92E−02 | 1.34E−01 | 1.49E−01 |
| 7968678 | 3.33 | 5.40 | 5.47 | 1.60E−02 | 2.29E−02 | 4.98E−02 | 5.29E−02 |
| 8121916 | 9.02 | 3.19 | 5.37 | 2.83E−01 | 4.23E−01 | 3.61E−02 | 6.93E−02 |
| 7951865 | 7.79 | 1.94 | 5.19 | 2.33E−01 | 1.74E−01 | 1.18E−02 | 1.00E−02 |
| 7951865 | 7.44 | 1.94 | 5.02 | 2.29E−01 | 1.67E−01 | 1.16E−02 | 9.63E−03 |
| 8140686 | 2.50 | 5.79 | 4.42 | 5.75E−02 | 7.48E−02 | 2.06E−01 | 2.31E−01 |
| 8143534 | 5.85 | 1.53 | 4.33 | 1.95E−02 | 2.85E−03 | 1.01E−02 | 5.80E−03 |
| 8127193 | 7.19 | 3.09 | 4.24 | 1.49E−01 | 3.51E−01 | 1.45E−02 | 4.07E−02 |
| 8167973 | 1.56 | 1.56 | 4.16 | 1.17E−01 | 7.23E−03 | 4.00E−01 | 2.71E−02 |
| 8147030 | 4.91 | 2.12 | 4.00 | 2.20E−01 | 1.74E−01 | 4.21E−03 | 1.10E−02 |
| 7955142 | 2.69 | 2.83 | 3.94 | 4.21E−02 | 9.05E−03 | 7.93E−03 | 1.19E−03 |
| 8022666 | 3.68 | 1.82 | 3.90 | 2.88E−02 | 1.92E−02 | 9.17E−02 | 4.17E−02 |
| 7993588 | 3.45 | 1.62 | 3.76 | 2.02E−02 | 1.03E−02 | 8.15E−02 | 2.94E−02 |
| 8046895 | 1.94 | 3.56 | 3.75 | 2.89E−02 | 7.34E−03 | 1.36E−01 | 2.25E−02 |
| 8008132 | 1.73 | 3.61 | 3.65 | 6.59E−02 | 2.56E−02 | 5.24E−01 | 2.42E−01 |
| 7942332 | 5.10 | 1.74 | 3.59 | 4.99E−02 | 3.32E−02 | 1.56E−02 | 1.31E−02 |
| 7929779 | 2.70 | 5.16 | 3.55 | 1.77E−01 | 2.27E−01 | 2.68E−01 | 3.68E−01 |
| 8113433 | 1.78 | 1.70 | 3.53 | 2.74E−01 | 3.02E−02 | 3.25E−02 | 6.71E−03 |
| 8030448 | 1.79 | 3.10 | 3.52 | 9.71E−04 | 2.61E−04 | 2.27E−02 | 2.18E−03 |
| 8167656 | 3.33 | 1.80 | 3.51 | 1.86E−03 | 6.73E−03 | 2.72E−02 | 1.27E−02 |
| 8141843 | 2.95 | 5.77 | 3.35 | 1.73E−02 | 4.40E−02 | 2.15E−02 | 8.07E−02 |
| 8073015 | 4.63 | 3.09 | 3.34 | 5.00E−02 | 1.47E−01 | 2.55E−02 | 6.57E−02 |
| 8018761 | 5.70 | 3.73 | 3.33 | 1.28E−01 | 5.74E−01 | 1.89E−02 | 1.49E−01 |
| 8097692 | 3.77 | 4.59 | 3.29 | 6.31E−02 | 2.87E−01 | 1.87E−03 | 2.30E−01 |
| 8006336 | 2.02 | 4.03 | 3.15 | 2.70E−02 | 3.59E−02 | 8.81E−02 | 1.18E−01 |
| 7972297 | 3.94 | 1.95 | 3.09 | 2.00E−03 | 7.17E−04 | 3.04E−02 | 2.42E−02 |
| 8167603 | 2.90 | 1.66 | 3.06 | 4.81E−04 | 5.85E−05 | 4.81E−02 | 1.41E−02 |
| 8050160 | 1.60 | 2.26 | 3.05 | 6.44E−02 | 9.59E−03 | 1.64E−01 | 1.42E−02 |
| 7917052 | 3.22 | 2.40 | 2.99 | 3.64E−03 | 2.74E−02 | 9.92E−02 | 9.89E−02 |
| 7980146 | 3.01 | 2.39 | 2.99 | 2.93E−02 | 5.07E−02 | 1.71E−02 | 3.13E−02 |
| 8131096 | 2.91 | 3.50 | 2.99 | 7.80E−03 | 1.14E−02 | 8.80E−02 | 1.23E−01 |
| 8016832 | 1.61 | 2.41 | 2.89 | 6.75E−03 | 1.87E−01 | 1.50E−01 | 3.20E−01 |
| 8068353 | 2.47 | 2.71 | 2.88 | 6.65E−02 | 1.10E−01 | 4.94E−04 | 6.50E−02 |
| 8150906 | 3.26 | 1.91 | 2.88 | 3.17E−01 | 2.27E−01 | 1.13E−01 | 8.71E−02 |
| 8096771 | 2.27 | 2.03 | 2.86 | 4.86E−02 | 2.51E−02 | 1.02E−01 | 4.36E−02 |
| 8022711 | 1.85 | 1.64 | 2.82 | 2.46E−01 | 3.49E−02 | 1.35E−01 | 2.09E−02 |
| 8157270 | 1.52 | 1.50 | 2.82 | 2.50E−01 | 1.64E−02 | 3.33E−01 | 2.82E−02 |
| 7947165 | 1.68 | 2.16 | 2.80 | 1.62E−02 | 1.45E−03 | 4.66E−02 | 2.41E−03 |
| 8135488 | 2.75 | 3.76 | 2.79 | 1.53E−03 | 3.07E−02 | 1.35E−04 | 5.92E−02 |
| 7994026 | 2.06 | 3.55 | 2.79 | 2.47E−02 | 2.52E−02 | 1.04E−01 | 1.07E−01 |
| 8008802 | 2.40 | 2.68 | 2.78 | 6.34E−05 | 3.96E−04 | 2.05E−02 | 1.40E−02 |
| 7994026 | 2.10 | 3.49 | 2.78 | 2.59E−02 | 2.62E−02 | 9.45E−02 | 9.69E−02 |
| 7994026 | 2.07 | 3.48 | 2.78 | 2.55E−02 | 2.52E−02 | 9.97E−02 | 9.87E−02 |
| 8160546 | 2.73 | 2.76 | 2.76 | 1.09E−02 | 1.44E−02 | 3.38E−02 | 3.79E−02 |
| 8045664 | 3.68 | 1.79 | 2.71 | 1.63E−01 | 1.89E−01 | 3.42E−02 | 3.90E−02 |

Table 19. Provided are the description of the putative cell surface genes along with the sequence identifiers of the Affymetrix probes, the target sequence identified by the Affymetrix probe, the polynucleotide represented by the target sequence and the Public ID (and SEQ ID NO:) of the mRNA sequence representative of the target sequence. “Polyn.” = polynucleotide; “Rep.” = representative; Also shown are the fold change and T-test p-values for change in expression levels of the indicated genes between the PDX1-GFP cells and the Pancreas cells (PDX1/PANC); SOX17-GFP cells and the Pancreas cells (SOX17/PANC); SOX17-GFP cells and undifferentiated hESCs (PDX1/HESC); the PDX1-GFP cells and undifferentiated hESCs (PDX1/HESC).

TABLE 20
PDX1 and Pancreas specific putative cell surface genes

| | Affy. target | | SEQ ID NO: | | | | |
|---|---|---|---|---|---|---|---|
| Probe | nucl. SEQ | Rep. | (of Rep. | Polyn. SEQ ID NOs: | Gene | PDX1/ | PDX1/ |
| set ID | ID NO: | Public ID | Public ID) | rep. by target | Symbol | HESC | SOX17 |
| 7903414 | 2247 | NM_000699 | 2523 | 3814, 2634, | AMY2A | 3.79 | 2.83 |
| | | | | 2921, 3063, | | | |
| | | | | 3766, 3767, | | | |
| | | | | 3777, 3765, | | | |
| | | | | 3769, 6181, | | | |
| | | | | 8186, 6513, | | | |
| | | | | 8562, 7109, | | | |
| | | | | 6188, 7492, | | | |
| | | | | 7387, 8726, | | | |
| | | | | 6179, 8240, | | | |
| | | | | 6758, 6648, | | | |
| | | | | 5740, 6977, | | | |
| | | | | 6257, 5819, | | | |
| 8101659 | 2248 | NM_001128310 | 2524 | 3607, 4539, | SPARCL1 | 3.14 | 2.98 |
| | | | | 4554, 4700, | | | |
| | | | | 4490, 4558, | | | |
| | | | | 4476, 3089, | | | |
| | | | | 2943, 4431, | | | |
| | | | | 4430, 6384, | | | |
| | | | | 8285, 5454, | | | |
| | | | | 8543, 7693, | | | |
| | | | | 7326, 8142, | | | |
| | | | | 7471, | | | |
| 7961514 | 2249 | NM_000900 | 2525 | 3815, 5155, | MGP | 2.07 | 2.10 |
| | | | | 5156, 5372, | | | |
| 7960947 | 2250 | NM_000014 | 2526 | 3209, 3849, | A2M | 7.83 | 4.71 |
| | | | | 5717, 8772, | | | |
| | | | | 8168, 6820, | | | |
| | | | | 8158, 6446, | | | |
| | | | | 6742, | | | |
| 7965410 | 2251 | NM_001920 | 2527 | 2902, 3628, | DCN | 2.02 | 4.12 |
| | | | | 3629, 3630, | | | |
| | | | | 3631, 3632, | | | |
| | | | | 3633, 7344, | | | |
| | | | | 7248, 6470, | | | |
| | | | | 7199, 5678, | | | |
| | | | | 5337, 5322, | | | |
| | | | | 6594, | | | |
| 8023497 | 2252 | NM_005603 | 2528 | 2736, 5024, | ATP8B1 | 2.34 | 2.80 |
| | | | | 5707, | | | |
| 8096415 | 2253 | NM_007351 | 2529 | 3528, 3568, | MMRN1 | 7.09 | 5.79 |
| | | | | 6962, 7912, | | | |
| | | | | 6838, 5465, | | | |
| 7954090 | 2254 | NM_001423 | 2530 | 2678, 4610, | EMP1 | 2.26 | 2.14 |
| | | | | 6653, 7265, | | | |
| | | | | 5426, | | | |
| 7913216 | 2255 | NM_000300 | 2531 | 2906, 4866, | PLA2G2A | 2.85 | 5.25 |
| | | | | 4867, 4868, | | | |
| | | | | 4869, 6945, | | | |
| | | | | 6892, 8598, | | | |
| | | | | 8048, 8615, | | | |
| | | | | 6396, 7663, | | | |
| 7954293 | 2256 | NM_000921 | 2532 | 3510, 5300, | PDE3A | 2.94 | 2.38 |
| | | | | 5941, | | | |
| 8098611 | 2257 | NM_003265 | 2533 | 3835, 3032, | TLR3 | 2.25 | 2.60 |
| | | | | 8206, 5688, | | | |
| 8051583 | 2258 | NM_000104 | 2534 | 2630, 4421, | CYP1B1 | 3.41 | 2.85 |
| | | | | 6727, 8527, | | | |
| | | | | 5409, | | | |
| 8066925 | 2259 | NM_000961 | 2535 | 3882, 3795, | PTGIS | 4.05 | 5.49 |
| | | | | 5363, 8250, | | | |
| | | | | 8695, | | | |
| 8058063 | 2260 | NM_144629 | 2536 | 3913, 4395, | RFTN2 | 4.30 | 3.80 |
| | | | | 5599, 7926, | | | |
| 8145977 | 2261 | NM_021623 | 2537 | 4259, 4207, | PLEKHA2 | 2.02 | 2.85 |
| | | | | 8302, 7202, | | | |
| | | | | 6843, 7732, | | | |
| | | | | 8390, | | | |
| 7975390 | 2262 | NM_001034852 | 2538 | 4277, 5268, | SMOC1 | 3.45 | 3.29 |
| | | | | 5267, 7459, | | | |
| | | | | 5893, | | | |
| 8163896 | 2263 | NM_004099 | 2539 | 2946, 3496, | STOM | 2.23 | 2.77 |
| | | | | 3495, 6038, | | | |
| | | | | 5639, | | | |
| 8068024 | 2264 | NM_021219 | 2540 | 2864, 3085, | JAM2 | 3.47 | 3.81 |
| | | | | 8520, 7625, | | | |
| | | | | 6556, 8774, | | | |
| | | | | 7964, 7436, | | | |
| | | | | 6761, 5705, | | | |
| 8077270 | 2265 | NM_006614 | 2541 | 2694, 3806, | CHL1 | 2.67 | 2.03 |
| | | | | 3927, 4681, | | | |
| | | | | 3440, 3238, | | | |
| | | | | 6369, 6718, | | | |
| | | | | 6522, 7572, | | | |
| | | | | 7141, 5444, | | | |
| | | | | 7590, 6487, | | | |
| | | | | 6827, 7208, | | | |
| 7982366 | 2266 | NM_001144757 | 2542 | 3813, 4731, | SCG5 | 3.05 | 3.07 |
| | | | | 4732, 8086, | | | |
| | | | | 6330, 8119, | | | |
| | | | | 8148, 5657, | | | |
| 8100541 | 2267 | NM_001553 | 2543 | 3500, 2759, | IGFBP7 | 2.65 | 2.26 |
| | | | | 5754, 7872, | | | |
| | | | | 7990, | | | |
| 8104746 | 2268 | NM_000908 | 2544 | 4247, 5263, | NPR3 | 2.87 | 2.48 |
| | | | | 6508, 8718, | | | |
| | | | | 5468, 7324, | | | |
| 7914127 | 2269 | NM_002038 | 2545 | 3350, 3961, | IFI6 | 2.10 | 2.58 |
| | | | | 3962, 3960, | | | |
| | | | | 6118, 6098, | | | |
| | | | | 6254, | | | |
| 7909390 | 2270 | NM_175710 | 2546 | 3897, 4185, | CR1L | 2.16 | 2.05 |
| | | | | 8470, 6548, | | | |
| | | | | 5851, | | | |
| 8129558 | 2271 | NM_030908 | 2547 | 4048, 4376, | OR2A4 | 2.17 | 2.16 |
| | | | | 2917, 5157, | | | |
| | | | | 3729, 5808, | | | |
| | | | | 7931, | | | |
| 8143633 | 2272 | NM_001005328 | 8793 | 4048, 4376, | OR2A7 | 2.15 | 2.14 |
| | | | | 2917, 5157, | | | |
| | | | | 3729, 5808, | | | |
| | | | | 7931, | | | |

| | | | | PDX1 | PDX1 | PANC | PANC |
|---|---|---|---|---|---|---|---|
| Probe | PANC/ | PANC/ | FC | vs. | vs. | vs. | vs. |
| set ID | SOX17 | HESC | average | HESC | SOX17 | HESC | SOX17 |
| 7903414 | 63.39 | 84.98 | 38.75 | 6.94E−03 | 6.94E−03 | 3.93E−02 | 4.82E−02 |
| 8101659 | 59.17 | 62.31 | 31.90 | 7.73E−02 | 7.73E−02 | 7.74E−04 | 8.61E−04 |
| 7961514 | 51.99 | 51.42 | 26.89 | 2.49E−01 | 2.49E−01 | 1.55E−03 | 1.73E−03 |
| 7960947 | 35.60 | 59.17 | 26.83 | 2.35E−01 | 2.35E−01 | 2.79E−04 | 4.65E−04 |
| 7965410 | 42.02 | 20.66 | 17.21 | 1.69E−01 | 1.69E−01 | 8.61E−03 | 4.37E−03 |
| 8023497 | 10.73 | 8.96 | 6.21 | 4.46E−03 | 4.46E−03 | 2.60E−02 | 2.05E−02 |
| 8096415 | 4.78 | 5.86 | 5.88 | 1.60E−01 | 1.60E−01 | 2.49E−02 | 3.48E−02 |
| 7954090 | 9.03 | 9.56 | 5.75 | 2.69E−01 | 2.69E−01 | 1.32E−02 | 1.54E−02 |
| 7913216 | 8.17 | 4.44 | 5.18 | 1.13E−02 | 1.13E−02 | 7.39E−02 | 4.19E−02 |
| 7954293 | 5.02 | 6.18 | 4.13 | 2.66E−01 | 2.66E−01 | 5.56E−04 | 2.20E−02 |
| 8098611 | 6.01 | 5.20 | 4.02 | 2.63E−02 | 2.63E−02 | 1.79E−04 | 6.80E−04 |
| 8051583 | 4.07 | 4.87 | 3.80 | 3.83E−02 | 3.83E−02 | 4.62E−02 | 7.35E−02 |
| 8066925 | 3.11 | 2.30 | 3.74 | 9.29E−04 | 9.29E−04 | 6.62E−02 | 2.86E−02 |
| 8058063 | 2.58 | 2.92 | 3.40 | 1.45E−01 | 1.45E−01 | 7.03E−02 | 1.21E−01 |
| 8145977 | 5.08 | 3.60 | 3.39 | 4.17E−02 | 4.17E−02 | 3.87E−02 | 4.15E−02 |
| 7975390 | 3.18 | 3.34 | 3.31 | 1.41E−01 | 1.41E−01 | 4.59E−03 | 3.14E−02 |
| 8163896 | 4.38 | 3.53 | 3.23 | 3.49E−02 | 3.49E−02 | 1.08E−02 | 2.35E−02 |
| 8068024 | 2.75 | 2.50 | 3.14 | 1.36E−01 | 1.36E−01 | 9.78E−02 | 8.38E−02 |
| 8077270 | 3.09 | 4.08 | 2.97 | 2.29E−01 | 2.29E−01 | 3.29E−03 | 2.04E−02 |
| 7982366 | 2.83 | 2.81 | 2.94 | 1.24E−02 | 1.24E−02 | 2.50E−01 | 2.63E−01 |
| 8100541 | 2.94 | 3.45 | 2.82 | 4.45E−01 | 4.45E−01 | 5.51E−03 | 1.56E−01 |
| 8104746 | 2.05 | 2.37 | 2.44 | 2.26E−01 | 2.26E−01 | 3.10E−01 | 4.14E−01 |
| 7914127 | 2.75 | 2.25 | 2.42 | 1.47E−02 | 1.47E−02 | 5.76E−02 | 3.14E−02 |
| 7909390 | 2.06 | 2.17 | 2.11 | 2.28E−01 | 2.28E−01 | 3.57E−02 | 5.29E−02 |
| 8129558 | 2.03 | 2.04 | 2.10 | 2.92E−03 | 2.92E−03 | 1.24E−01 | 1.32E−01 |
| 8143633 | 2.02 | 2.03 | 2.09 | 6.13E−03 | 6.13E−03 | 1.43E−01 | 1.56E−01 |

Table 20. Provided are the description of the putative cell surface genes along with the sequence identifiers of the Affymetrix probes, the target sequence identified by the Affymetrix probe, the polynucleotide represented by the target sequence and the Public ID (and SEQ ID NO:) of the mRNA sequence representative of the target sequence. “Polyn.” = polynucleotide; “Rep.” = representative; Also shown are the fold change and T-test p-values for change in expression levels of the indicated genes between the PDX1-GFP cells and undifferentiated hESCs (PDX1/HESC); the PDX1-GFP cells and SOX17-GFP cells (PDX1/SOX17); the Pancreas cells and SOX17 cells (PANC/SOX17); and the Pancreas cells and the hESCs (PANC/HESC);

### Example 5

[0381] TROP-2 Facs Sorting of Cells Derived from Embryoid Bodies Results in an Isolated Population of PDX1-Positive Cells (at Least 84% PDX1 Positive)

[0382] Experimental Results

[0383] Separation of TROP-2 Expressing Cells by FACS ARIA and Staining with PDX1

[0384] Embryoid bodies were prepared from H9.2 hESCs and grown for 28 days in EBs medium (DMEM, 20% serum replacement, 1 mM Glutamax and 1% nonessential amino acid—all from GIBCO Invitrogen) with a change of medium every 3 days. The EBs were separated to single cells by treating for 20-30 minutes with TrypLE Select (Invitrogen) in 37° C. The cells were washed once with EBs medium, once more in FACS buffer (0.5% BSA, 10 mM EDTA, 25 mM Hepes in PBS). 10⁷ cells were diluted in 950 μl FACS buffer with 50 μl of anti-human TROP-2—APC (R&D Systems Inc., Minneapolis, Minn.) and incubated for 30 minutes at room temperature in the dark with shaking every 5 minutes. The cells were washed twice with PBS and centrifuged for 3 minutes at 1500 rpm. The cells were filtered with a 40 lam strainer (BD) and resuspended in FACS buffer. The FACS ARIA (BD) sorter was used to separate TROP-2 positive cells from the whole EB population. 1.3% of the cells were positive for allophycocyanin (APC) and were collected into DMEM with 10% FBS. The cells were spun down by Cytospin onto glass slides and fixed with cold acetone.

[0385] In order to stain the cells with PDX1 antibody, the cells were fixed again with 4% paraformaldehyde for 15 minutes and washed twice with PBS. The cells were blocked for one hour by adding 5% Normal Goat Serum (NGS), 1% BSA (bovine serum albumin), 0.5% Triton in PBS (phosphate buffered saline). The cells were washed twice with PBS and stained with goat polyclonal PDX1 (ABcam, Cambridge, UK) at a dilution of 1:1000 in PBS with 1% Triton, 0.5% BSA and 1% FBS over night in 4° C. The cells were washed twice with PBS and stained with anti-goat Cy3 secondary antibody 1:100 (Jackson Laboratories, West Grove, Pa.). Cells were rinsed twice with PBS and the nuclei were stained with DAPI 1:1000 (Sigma) and then the cells were mounted in fluorescent mounting media (Dako). The slides were analyzed using a confocal microscope (LSM 700, Zeiss).

### Experimental Results

[0386] As shown in FIGS. 14A-C (representative confocal microscopy images) 84% of the cells which were isolated using an anti-human TROP-2 antibody were positive for PDX1 expression. These results demonstrate the isolation, for the first time, of a population of cells comprising at least 84% PDX1-positive cells which are not genetically modified.

### Example 6

### Endoderm Cells Expressing Bst2, Flrt3, Colec12, Gpr49/Lgr50R LIF-R can be Separated by FACS from Cell Populations Derived from Young Embryoid Bodies

[0387] Seven days old EBs contain cells of mesoderm, ectoderm and endoderm lineages but not fully differentiated tissues. These cells were tested for the expression of several surface markers which were found to be increased in the SOX17 expressing definitive endoderm cells by Affymetrix expression analysis.

[0388] Experimental Results

[0389] Sorting with Endoderm Markers Using FACS with Single Markers on Young EBs

[0390] H9.2 ESCs were grown for 7 days in EBs medium (DMEM, 20% serum replacement, 1 mM Glutamax and 1% nonessential amino acid-all from GIBCO Invitrogen) with a change of medium every 3 days. The EBs were separated to single cells by treating for 20-30 minutes with TrypLE Select (Invitrogen) in 37° C. The cells were washed once with EBs medium and once more in FACS buffer (0.5% BSA, 10 mM EDTA, 25 mM Hepes in PBS). The following antibodies were tested:

1. Rabbit anti BST-2 (Santa Cruz) 1:200
2. Rabbit anti FLRT-3 (Santa Cruz) 1:50
3. Goat anti CL-P1/COLEC12 (R&D) 1:40
4. Rabbit anti GPR-49/LGRS (Novus) 1:100
5. Anti human LIF-R-PE (R&D) 1:10
6. Control non treated cells

[0391] The cells were incubated for 30 minutes at room temperature with the antibodies in FACS buffer (0.5% BSA, 10 mM EDTA, 25 mM Hepes in PBS) and washed twice with PBS, followed by secondary antibodies anti rabbit Cy3 (for BST2, FLRT-3 and GPR-49) or anti goat Cy3 (COLEC12) for 15 minutes at room temperature. The cells were washed twice more with PBS and resuspended in FACS buffer. The expression levels of these markers in the EBS was compared to those in undifferentiated hESCs cells by FACS calibrator (BD) using Flow-Jo analysis.

[0392] Experimental Results

[0393] The results are presented in FIGS. 12A-E and are summarized in Table 21 hereinbelow.

TABLE 21
Expression analysis of antibodies in undifferentiated embryonic
stem cells and in 7-day old embryoid bodies

| Antibody | ESCs | 7 days EBs |
|---|---|---|
| BST-2 | 2.25% | 43.3% |
| FLRT-3* | 1.56% | 1.71% |
| COLEC12 | 0.26% | 70.19% |
| GPR-49/LGR5 | 1.34% | 38.2% |
| LIF-R | 2.28% | 16.13% |

Table 21. *The result with FLRT3 may change after optimization of the antibody which is not usually used in FACS analysis.

[0394] The results presented in FIGS. 12A-E and in Table 21 above show that in young embryoid bodies there is increase in cells expressing the endodermal specific markers identified in the SOX17 expressing cells as compared to undifferentiated hESC. These results point to the potential usefulness of these markers for characterization and isolation of populations enriched in definitive endoderm.

### Example 7

### Negative Selection with Underexpressed Markers can be Used to Enrich for Definitive Endoderm

[0395] Experimental Methods

[0396] Induction of Differentiation of Undifferentiated hESCs into Definite Endodermal Cells Using the IDE1/IDE2 Protocol

[0397] Undifferentiated H9.2 cells were treated with IDE1 or IDE2 as follows: The cells were washed once with PBS followed by incubation for 24 hours in RPMI with 5 μM IDE1/IDE2. The next day the medium was changed to RPMI with 0.2% FBS and 5 μM IDE1/IDE2 was added for 2 days. The cells were separated to single cells by treating the cells for 20-30 minutes with TrypLE Select (Invitrogen) in 37° C. The cells were washed once with EBs medium and once more in FACS buffer (0.5% BSA, 10 mM EDTA, 25 mM Hepes in PBS).

[0398] BST2 Expression on Adherent Cells

[0399] The cells which were induced by IDE1/IDE2 as described above were stained 1:100-1:200 with anti rabbit BST-2 (Santa Cruz) for 30 minutes in room temperature followed by secondary antibody Cy3 anti rabbit for 15 minutes at room temperature. Finally the cells were resuspended in FACS buffer and were tested by FACS calibrator.

[0400] BST2 Positive/KDR Negative and CXCR4 Positive/KDR negative

[0401] The cells which were induced by IDE1/IDE2 as described above were stained 1:100-1:200 with anti rabbit BST-2 (Santa-Cruz) or 1:10 anti-human CXCR4-PerCP and 1:10 anti-human VEGF R2/KDR-FITC (both from R&D) for 30 min in room temperature followed by secondary antibody Cy3 anti rabbit for 15 min at room temperature (for the samples with BST2). Finally the cells were resuspended in FACS buffer and were tested by FACS calibrator.

[0402] Experimental Results

[0403] Cells which are Induced to Differentiate into Definite Endodermal Cells Express BST2

[0404] The results of the FACS analysis showed that 11.9% of the cells in IDE1/IDE2 treated population express BST-2, and that only a subset of these, 10.7%, are BST2⁺/KDR⁻ (FIGS. 13A-C). These results demonstrate that combined use of the BST-2 marker with the KDR marker, which is underexpressed in definitive endoderm, may enable greater purification of an enriched definite endodermal cell population

[0405] Cells which are Induced to Differentiate into Definite Endodermal Cells Exhibit a BST2+/KDR− or CXCR4+/KDR− Expression Pattern

[0406] The results of the FACS analysis showed that 1.05% of the cells treated with IDE1/2 express CXCR4 but not KDR (i.e., they exhibit the CXCR4+/KDR− expression signature) (FIG. 13D). As above, the combined use of positive and negative selection may yield a more highly enriched definitive endoderm population.

[0407] Altogether, these results show that the markers identified in the present study, individually and in combinations that include both overexpressed and underexpressed markers, can be used to isolate definite endodermal cells from a non-genetically modified population of cells that are differentiated from pluripotent stem cells.

[0408] Analysis and Discussion

[0409] Differentiation of cells towards pancreatic beta—cells is still a challenging task. Based on genetic labeling approach the present inventors have succeeded in isolating from HESCs an enriched population of endoderm cells and pancreatic progenitor cells. These populations were then used in microarray analysis to identify candidate markers for defining (alone or in combination with other markers) specific precursor cell types characteristic of particular stages of the differentiation process. From the present analysis, a PDX1 specific gene GPR50 (FIG. 9, Table 14) and PDX1/Pancreas specific gene TROP2 (FIG. 11, Table 16) were selected for further study as promising genes. Particular emphasis has been placed on cell surface markers that by replacing genetic modification provide a more robust and stable approach for defining and isolating cell precursor populations. The information gained through these studies will permit more efficient generation of populations enriched with functional beta cells derived from stem cells. These protocols will rely on more efficient production of pancreatic progenitor cells and on their enrichment to enable improved treatment of diabetes.

[0410] hESCs represent one source of pluripotent cells capable of differentiating into almost any cell type (2). As a result, the therapeutic potential of these and other renewable stem cells for treating various diseases has generated much excitement. The present inventors disclose a method for selecting differentiating cells that will develop into functional insulin-producing beta cells. Such enriched populations may eventually be used in replacement therapy (e.g., cell transplantation) for the treatment of insulin dependent diabetes.

[0411] Selection and enrichment processes are needed because presently available protocols for differentiation of hESCs to definitive endoderm and pancreatic progenitors cells (5, 19, 21-24), do not yield pure populations. The importance of isolating the progenitors lies in the facts that, in contrast to mature beta cells, the progenitor cells have a proliferative capacity, and in contrast to hESCs they are non-tumorigenic. Thus purification or enrichment of progenitors followed by their continued culture would yield a more suitable transplant population.

[0412] The present inventors generated hESC clones harboring SOX17 and PDX1 BAC reporter constructs and identified a subpopulation of GFP⁺ cells.

[0413] SOX17 was originally identified as a stage-specific transcription activator during mouse spermatogenesis (26). Members of this gene family encode transcription factors that regulate the specification of cell types and tissue differentiation. Consistent with the general role of SOX genes in lineage specification, SOX17 is expressed specifically in the endoderm during gastrulation and plays a key role in endoderm formation.

[0414] PDX1 is expressed broadly in the pancreas during the first several days of pancreatic development, as the organ grows and branches. PDX1 regulates the insulin gene and from E15.5 (mouse embryonic days) onwards its expression becomes mainly restricted to β-cells. The transitions of PDX1 expression coincide with the overall conversion of progenitors to mature endocrine and exocrine cells (27).

[0415] The hESC clones harboring the SOX17 or PDX1⁺ BAC reporter and expressing GFP were isolated by FACS sorting and were analyzed by qPCR and microarray to identify cell surface and other markers expressed at these particular stages of the differentiation process.

[0416] The present inventors chose to use BACs, which are composed of relatively large stretches of genomic DNA, in order to render the transgenes less susceptible to mosaic or position effect variation. The larger size of BACs might also provide a more complete set of regulatory sequences (28).

[0417] Using this approach, the present inventors have succeeded in isolating enriched populations of endoderm and, for the first time pancreatic progenitor cells derived from human ESCs. Cell sorting based on SOX17 expression in reporter lines revealed markers which were previously correlated with definitive endoderm, thus validating the approach. Similarly, cells sorted base on PDX1 expression, revealed pancreatic progenitor markers. Affymetrix analysis then identified stage specific cell surface markers that enable cell type enrichment without the need for genetically modified hESCs. These markers provide a more robust, stable and clinically relevant approach for defining and isolating cell precursor populations.

[0418] To exemplify the above approach, use was made of two surface markers which are overexpressed in the PDX1⁺ cells, GPR50 and TROP-2. The latter was also found to be overepxressed in the pancreas array. Little is known about GPR50. The X-linked orphan receptor GPR50 shares 45% homology with the melatonin receptors, yet its ligand and physiological function remain mostly unknown. It is an orphan GPCR which has no affinity for melatonin, but as a dimer with MT1, it inhibits melatonin signaling (29, 30). Other reports have shown that GPR50 is also an important regulator of energy metabolism (31) The role of TROP-2 is not well understood and the physiological ligand is still unknown. TROP-2, the human trophoblast cell-surface glycoprotein, has been shown to play a role in regulating the growth of variety epithelial cancers including pancreatic tumors (32-35). Cell sorting of unmodified hESCs using these two markers enabled isolation of a cell population with a high relative expression of pancreatic progenitor transcription factors. These results exemplify the potential usefulness of the newly identified markers each alone, in combination with one another or in combination with other markers, in enabling isolation of enriched endoderm and pancreas progenitor populations. Other uses of these markers include quality control of candidate replacement therapy cell populations.

[0419] The availability of stage specific reporter constructs for key stages of pancreatic beta cell differentiation enables systematic assessment of the effect of signaling factors, small molecules or other compounds on growth, differentiation and survival of these progenitor cells. These constructs also provide valuable tools for efficient isolation of cell populations enriched for endoderm progenitor or pancreatic progenitor cells and their subsequent characterization by strategies such as microarray expression profiling. The discovery, through such an analysis, of new stage specific cell markers, including cell surface markers, opens the possibility for purification or enrichment of critical cell populations undergoing beta cell differentiation without the need for genetic modification. They also provide information about a “molecular signature” that can be used for “quality control” in assessing potential islet replacement cells developed from non-pancreatic sources.

[0420] Although the invention has been described in conjunction with specific embodiments thereof, it is evident that many alternatives, modifications and variations will be apparent to those skilled in the art. Accordingly, it is intended to embrace all such alternatives, modifications and variations that fall within the spirit and broad scope of the appended claims.

[0421] All publications, patents and patent applications mentioned in this specification are herein incorporated in their entirety by reference into the specification, to the same extent as if each individual publication, patent or patent application was specifically and individually indicated to be incorporated herein by reference. In addition, citation or identification of any reference in this application shall not be construed as an admission that such reference is available as prior art to the present invention. To the extent that section headings are used, they should not be construed as necessarily limiting.

### REFERENCES

### Additional References are Cited in Text

[0422] 1. White S A, J A Shaw and D E Sutherland. (2009). Pancreas transplantation. Lancet 373:1808-1817.
[0423] 2. Itskovitz-Eldor J, M Schuldiner, D Karsenti, A Eden, O Yanuka, M Amit, H Soreq and N Benvenisty. (2000). Differentiation of human embryonic stem cells into embryoid bodies compromising the three embryonic germ layers. Mol Med 6:88-95.
[0424] 3. Schuldiner M, O Yanuka, J Itskovitz-Eldor, D A Melton and N Benvenisty. (2000). Effects of eight growth factors on the differentiation of cells derived from human embryonic stem cells. Proc Natl Acad Sci USA 97:11307-11312.
[0425] 4. Thomson J A, J Itskovitz-Eldor, S S Shapiro, M A Waknitz, J J Swiergiel, V S Marshall and J M Jones. (1998). Embryonic stem cell lines derived from human blastocysts. Science 282:1145-1147.
[0426] 5. D'Amour K A, A G Bang, S Eliazer, O G Kelly, A D Agulnick, N G Smart, M A Moorman, E Kroon, M K Carpenter, E E Baetge, K A D'Amour, A D Agulnick, S Eliazer, O G Kelly, E Kroon and E E Baetge. (2006). Production of pancreatic hormone-expressing endocrine cells from human embryonic stem cells. Efficient differentiation of human embryonic stem cells to definitive endoderm. Nat Biotechnol 24:1392-1401.
[0427] 6. Jiang J, M Au, K Lu, A Eshpeter, G Korbutt, G Fisk and A S Majumdar. (2007). Generation of insulin-producing islet-like clusters from human embryonic stem cells. Stem Cells 25:1940-1953.
[0428] 7. Jiang W, Y Shi, D Zhao, S Chen, J Yong, J Zhang, T Qing, X Sun, P Zhang, M Ding, D Li and H Deng. (2007). In vitro derivation of functional insulin-producing cells from human embryonic stem cells. Cell Res 17:333-344.
[0429] 8. Kroon E, L A Martinson, K Kadoya, A G Bang, O G Kelly, S Eliazer, H Young, M Richardson, N G Smart, J Cunningham, A D Agulnick, K A D'Amour, M K Carpenter and E E Baetge. (2008). Pancreatic endoderm derived from human embryonic stem cells generates glucose-responsive insulin-secreting cells in vivo. Nat Biotechnol 26:443-452.
[0430] 9. Segev H, B Fishman, A Ziskind, M Shulman and J Itskovitz-Eldor. (2004). Differentiation of human embryonic stem cells into insulin-producing clusters. Stem Cells 22:265-274.
[0431] 10. Maehr R, S Chen, M Snitow, T Ludwig, L Yagasaki, R Goland, R L Leibel and D A Melton. (2009). Generation of pluripotent stem cells from patients with type 1 diabetes. Proc Natl Acad Sci USA 106:15768-15773.
[0432] 11. Tateishi K, J He, O Taranova, G Liang, A C D'Alessio and Y Zhang. (2008). Generation of insulin-secreting islet-like clusters from human skin fibroblasts. J Biol Chem 283:31601-31607.
[0433] 12. Wells J M and D A Melton. (1999). Vertebrate endoderm development. Annu Rev Cell Dev Biol 15:393-410.
[0434] 13. Amit M and J Itskovitz-Eldor. (2002). Derivation and spontaneous differentiation of human embryonic stem cells. J Anat 200:225-232.
[0435] 14. Biancotti J C, K Narwani, N Buehler, B Mandefro, T Golan-Lev, O Yanuka, A Clark, D Hill, N Benvenisty and N Lavon. (2010). Human embryonic stem cells as models for aneuploid chromosomal syndromes. Stem Cells 28:1530-1540.
[0436] 15. Lavon N, K Narwani, T Golan-Lev, N Buehler, D Hill and N Benvenisty. (2008). Derivation of euploid human embryonic stem cells from aneuploid embryos. Stem Cells 26:1874-1882.
[0437] 16. Amit M, C Shariki, V Margulets and J Itskovitz-Eldor. (2004). Feeder layer- and serum-free culture of human embryonic stem cells. Biol Reprod 70:837-845. Epub 2003 November 2019.
[0438] 17. Copeland N G, N A Jenkins and D L Court. (2001). Recombineering: a powerful new tool for mouse functional genomics. Nat Rev Genet 2:769-779.
[0439] 18. Zwaka T P and J A Thomson. (2003). Homologous recombination in human embryonic stem cells. Nat Biotechnol 21:319-321.
[0440] 19. D'Amour K A, A D Agulnick, S Eliazer, O G Kelly, E Kroon and E E Baetge. (2005). Efficient differentiation of human embryonic stem cells to definitive endoderm. Nat Biotechnol 23:1534-1541. Epub 2005 October 1528.
[0441] 20. Yasunaga M, S Tada, S Torikai-Nishikawa, Y Nakano, M Okada, L M Jakt, S Nishikawa, T Chiba, T Era and S Nishikawa. (2005). Induction and monitoring of definitive and visceral endoderm differentiation of mouse E S cells. Nat Biotechnol 23:1542-1550. Epub 2005 November 1527.
[0442] 21. Chen S, M Borowiak, J L Fox, R Maehr, K Osafune, L Davidow, K Lam, L F
[0443] Peng, S L Schreiber, L L Rubin and D Melton. (2009). A small molecule that directs differentiation of human ESCs into the pancreatic lineage. Nat Chem Biol 5:258-265.
[0444] 22. Frandsen U, A D Porneki, C Floridon, B M Abdallah and M Kassem. (2007). Activin B mediated induction of Pdx1 in human embryonic stem cell derived embryoid bodies. Biochem Biophys Res Commun 362:568-574.
[0445] 23. Shi Y, L Hou, F Tang, W Jiang, P Wang, M Ding and H Deng. (2005). Inducing embryonic stem cells to differentiate into pancreatic beta cells by a novel three-step approach with activin A and all-trans retinoic acid. Stem Cells 23:656-662.
[0446] 24. Shim J H, S E Kim, D H Woo, S K Kim, C H Oh, R McKay and J H Kim. (2007). Directed differentiation of human embryonic stem cells towards a pancreatic cell fate. Diabetologia 50:1228-1238.
[0447] 25. Lavon N, O Yanuka and N Benvenisty. (2004). Differentiation and isolation of hepatic-like cells from human embryonic stem cells. Differentiation 72:230-238.
[0448] 26. Kanai Y, M Kanai-Azuma, T Noce, T C Saido, T Shiroishi, Y Hayashi and K Yazaki. (1996). Identification of two Sox17 messenger RNA isoforms, with and without the high mobility group box region, and their differential expression in mouse spermatogenesis. J Cell Biol 133:667-681.
[0449] 27. Gu G, J Dubauskaite and D A Melton. (2002). Direct evidence for the pancreatic lineage: NGN3+ cells are islet progenitors and are distinct from duct progenitors. Development 129:2447-2457.
[0450] 28. Shizuya H and H Kouros-Mehr. (2001). The development and applications of the bacterial artificial chromosome cloning system. Keio J Med 50:26-30.
[0451] 29. Chaste P, N Clement, O Mercati, J L Guillaume, R Delorme, H G Botros, C Pagan, S Perivier, I Scheid, G Nygren, H Anckarsater, M Rastam, O Stahlberg, C Gillberg, E Serrano, N Lemiere, J M Launay, M C Mouren-Simeoni, M Leboyer, C Gillberg, R Jockers and T Bourgeron. (2010). Identification of pathway-biased and deleterious melatonin receptor mutants in autism spectrum disorders and in the general population. PLoS One 5:e11495.
[0452] 30. Levoye A, J Dam, M A Ayoub, J L Guillaume, C Couturier, P Delagrange and R Jockers. (2006). The orphan GPR50 receptor specifically inhibits M T1 melatonin receptor function through heterodimerization. Embo J 25:3012-3023.
[0453] 31. Ivanova E A, D A Bechtold, S M Dupre, J Brennand, P Barrett, S M Luckman and A S Loudon. (2008). Altered metabolism in the melatonin-related receptor (GPR50) knockout mouse. Am J Physiol Endocrinol Metab 294:E176-182.
[0454] 32. Fong D, P Moser, C Krammel, J M Gostner, R Margreiter, M Mitterer, G Gastl and G Spizzo. (2008). High expression of TROP2 correlates with poor prognosis in pancreatic cancer. Br J Cancer 99:1290-1295.
[0455] 33. Fong D, G Spizzo, J M Gostner, G Gastl, P Moser, C Krammel, S Gerhard, M Rasse and K Laimer. (2008). TROP2: a novel prognostic marker in squamous cell carcinoma of the oral cavity. Mod Pathol 21:186-191.
[0456] 34. Ohmachi T, F Tanaka, K Mimori, H Inoue, K Yanaga and M Mori. (2006). Clinical significance of TROP2 expression in colorectal cancer. Clin Cancer Res 12:3057-3063.
[0457] 35. Chang C H, P Gupta, R Michel, M Loo, Y Wang, T M Cardillo and D M Goldenberg. (2010). Ranpirnase (frog RNase) targeted with a humanized, internalizing, anti-Trop-2 antibody has potent cytotoxicity against diverse epithelial cancer cells. Mol Cancer Ther 9:2276-2286.

The application's sequence listing, which the Patent Office published only in electronic form, follows.

SEQUENCE LISTING (8793 sequences)

SEQ ID NO: 1 - DNA, 163539 bp, Artificial sequence
  Sox17 GFP reporter BAC (RP11-53M11)
gaattcctcaggcccatgaactctactctgaaaaacactaaacaattcctctgccattatatgtgaaatccaaagggagaactgaagactcaggctgatcccagaacaccgtaccatcttaagctagctaagcatatgaacttattcaatctacctatagttttcctgccttcaagcactcccctggactgtgataaaaatatatgtgtacttggcatgcaatggaatcctgccaagaagggcaactgtttcttataaatgctaaataaacctaaatttctaaaaattattggaaataaattcaaatgaaccaataaaatttttaaatgaaccagtaagtatattttaacggaactgagttcattgaaattttaaacacctagagtttattgctggggggaaaggatttgtgaagaaacttcatttattgcattatctgaatttattaaaaatattttgcttggccaggagcagtggctcctgcctgtaatcccggtactttggaaggcagaggcaggcgatcacctgaggtcaggtgttcaagactagcctagccaacatggtgaaaccccatctttactaaaaatacaaaaaaaattagccaggcatggtggtgcacgcctgtaatcccagctactcagaaggctgaggcagaagaatcacttgaacccaggaggcagaggttgcagtgaggcgagatcgtgccatagtgctccagcctgggtgacagagccagacttcgtctcaaaaaataaataaataaaataaatagaaaataaaaataaaaattttgctcatcctatccatgtattttcaatttagtaagtgtaaacatagtagatactttctgttgtagcatgtaaggcttgatattatttcaatgggggaggatttctagcttggtagtaaattgcattttacagaggacaaaaaaaaaaaaaagaatgcaagcattttaaccctcaccaaggatgctgaaaaactgatacagtttgctctgtttcagagaagcctggaaaaatttaacaaaactggagagatctaggactaaggagaggtttcagaggctctttggattgagcatttggcaggactctgggacaattcccatatcatcccaaatttatccaaagccaagaaatctataaaaaagagatcaccatactctcgagatgggttggaggtgaagggtcatttgttttgcagctttatcctgcgtattagacttctgtttcctagggaacagtaaatgatagcatgaggcttacttgtttaaatgcaatctctcaatggtgtaaggcaccataaataaaaatcaagttgacccaaaacacaatgctacttaatatgtaataatgttgtaatatatagatgtttaatgtaaaagatcagttttaaaattactcatttttcagtattaatgtgacaacaatcaataggatatatgtgagtatatatctatacaaagacatatgtatgtatataattataaatttaccagtgatgaagattgataactgttgtaataacacagaaaatacaaacaggctgggcgcagtggctcactcctgtaattccagcactctgggaggctgaggtgagaggatggcttgaaccagggaggtcaaggctgcagtgagccgtgatggcgccactgccctccagcctcggtgacagagtaagaccttgtcaaaaaaaaaaaaagaaagacaaaagaaaaaagaaagaaaatacatgcaaataattgtcctgttatcaagcatgtgtcttttgattggttcttgaacatctgtccggagtcagttgtatatgtttctctgctgtaaatgcatttttttcctctcaagacttaaagaaataacaacaacaacaaaaaccctccagtttacccggatactttttggtggctccaagaggatctgattgtgtccttgacctcaagggccacctgaagagtagtaagaaggccttttcttatgggatgttggagcaactcaaatctgtaaacttgtccctgttgctcagtttaattgaaagctgccttcatttattgccattttgaacatgactgaattgggatgagaagagagcgcatttcttcctgatcgttttgaatcttttttataagttgcttctcttttccacgggaagctatggttatgtatacggtgagcaaggtaaaaatgaataaaatcctgactaaatgtttagcgccacctattggtagtgaagtacatattgattcttggtgacagacattcccaccaaagagagcagaagtaattttaatgattctttttcttccagtgtatatgcctgtatgcatgctttattatgactattatatttaaatataaacatatacttaaattttggtaataatataaatatggaattcttctaggttatgatttgtattatttagcttcacaatacccttgaagtagaatatgcagtgatagtctacttttcaacagtaaaaagaaaattctaggctgggttcagtgactcatgcctgtaatcccagcactttgggaggttgaggcaggaggatggcttgagtcgaggagttcaagaccagcctgggcaacatagtgagaccttgtctctacaaaaaaaaaaaaaaaaaaaaagaaaaagaaaaaagaaaaaggaaaagaaaattctagagaacggggaagaaacaacaacatgacattgtcacatgttgtttgttatgtttgtcttgaaatacatattgtcacctatacacaaagtatcttgaatgtgctctatatcttttgaaaccgcctttaaaatggttttccacagaaatttgagtttgaaataatgatgttatttaaattcagttacttatctgtgctaagaatgaactggccacagatggtgctgagacaactggatttgcacatggaaaacaataaagttggactcctacctcataccataaatgacacttaaatcaaaatggatcaaatgcctaaacaaaatgtaatatataggccaggcatggtggctcatgcctgtaatcccaacactttgggaggccgagacaggaggattgcttgagtccaggagttcaggaccaacctgggcaaaataatgagaccttgtctccattactttttaaaaaagtaatatatgcatataatgggctattatttggccttaaaaaggaaggaaattatgacacatgctacaacatccatgaaccttgggggcatgctaaatgaaactggccaatcagaaaaagacaaagactgtagaattccatttataagaggtagtcaaattcatagagacaaaaagtagaatgctggctgccagggctgggggcggggagaaattcggattgttgttcagtggatacagttcccatttgggaaggtaaaaccattctggagatggatggtggcaatgtttgcacaacaatgtgaatacaatcaacactactgaattgtatacttaaaatggttaaggtagtaaatttattgtatgtgtgttttactataataaaaaagtaaaactttttaaatgtctcagactcctaaatgtaagaactaaaattaaaattcataatagaaaacataaatataaatcttcatgatcttggattaggcagtaagttcttagatctgacgccaaaagcagagacaatcaaagaaaaacagaacaaacacatttcatcaaaattaataagttttgtgtttccaaggaaatcattaggagagtgaaaaggcaactagggagaaatcatttgcaaatcgtatatctcataaggaacttgtatctaaaacataaaaataacttttaaggctcaataataaaaagacaaacaactcaatttaaaatgggaaaagagtctgaacatttttccaaagaacgtacacaaatagccagtaagtacatgaaaagatgctcgatatcattagtcattagggaaatgcaaatcaaaaccacggtaggattctgactcatacccattcagatggctgtactaaaaaagatagataataccaagtactggcgagaatatggagaaattggaaccctcgtacatggttggtaggatttgtaaatggtgccgacactttggaaaacaatctgtcagctcctaaaatggttaaggttagttaccatatggtccagcaattccaccaaaaataattataaagataaaaaacttgtatacagatgttcatagcagcattattcatagtagtcaaaaagtggaaacaaacaatccacatgtctatcacctgatgaatggataaataaaatttggcatagcacacaatggaatataattcagccatagaaagaaatgaaatgctgatatatgctacaacacaaatgagctttgaaaacattgcactaagagaagccagtcataaaagaccacatatggtataactccatatgtgttatatgtgaaatgtctcaaataggcaaaactatagagatatgaaatttctgtgaaatgtctcaaatagacaaaactatagagatatgaaatagggtagttctttctttgggccatatctggggggataaactgctaaaagtttcttatggggtcacgaaaacatttaaaaattaatggtgatgatggttccagatatctcaatatactagaaatcactgaatttgtacacttttaaagaatgaattttatatgtaacatcttaaaaagatgttaatgggtcagcactagatccaccattgtcaacttgtgacattgatttaaaaataccttcagaatgagcaagactagaaaaagagatatgagatgtgaatcatatagaaggatgtgaaacatccttcatggtattaaggaatataaaactatttatatttagatttaatgaatgtgagtattacagtgctttatttacagcaaataatttccactaaaattaaagagacattggtcttatcattccttatctctatactcttttcagcaaacaatatgaacaagcatcttaaacctagaaattgtcccccagctatgacaattgctctccttcctggaactgcctttcctatatgttaatttcctcagtgcaaaagctgttattttcattcagaatgttaaagatacccctaggaaaagtcattttaaaagtcttgattttcacagccttcttctgcattagaagcttaagagatatcctagggctagtcttcactccaggttttaggagcaatctaggtaagaatctgcagaagctaggtgaaaatgcagatccatggaagctatttcaaacctatcacatccttccccaggtaatttttatactaatatatgctagaatgcgataaggttaaaaatattctacttctccactttatcagagaggtgggagttttgaaatctcattgccatgcaaagaactacggcccagaatgtgataaatgaaaggcacctaagagtcatgtagggcagtccttttattctgtgaaggaagaaacaagatgattaggccaaagccacacagatattagctgcacaaccagcacaagattgagcacgagatggggctcgggtgttgtgacgtccagcgcagtttcttcagctcagttagggcagaattaggttgattgggcaccattgaagtacatgctacatccatccaccattagatgaaacctctaattttagttctgcttattattttttattttatatattttttatattttatattatatttattttattttggtttattttatttaattttactattattttttaagacaggatcttgtgctgtcactcaagctggagtgcagtggcgcaatcacaactcactgcagcctcgaactcttgggttcacgaagtcctcccacctcaaccccccagtagctgggaccacaggcacgcaaccaccatgcctgacaaattttttaatttgtaaacgtttttgtagagatagggtctcaccatgctgcccaagctgcaattttagttctatataaatagggtagcccagggaaaagagaggggagctaccatggggaaggggttactgtggatatgatttttaaaattttctctgctacagctcttccacgtttacccacataaatttgaagtttaatttttagtctctagaaagcattttgtgatgtcttttaaaatattatgtatgtattaagaaagcttgcatccatatgtgtagaactatttccttttctttttgggcacccgtggctctctattaatattaagaatttcttagatgttgcaattcttcaaggaaacaatttcagaagatagtttcttttcctcccttcccttcccttgcccacatttctctctctttttacttccagttctggaaattggccagcagaattatttatggctcttagttcccatcacaccttaataataaacagaaggagttttcctttgttttaaaatttcaacagtacagtagttaaaaattggcttccatcagaaaactctttctccaagtctaatttgctatgccatgtatatacatgattaaccagtacaatacgtacagcaaagaaaccaggtgagagatttattgattctggctgaaacaaattgaaaagtaaccttgaacactttgtgaagtccataattgagttccacaaatcaactttggagccagtttagcatgtccatttagttgaggcaaagagcctgtgtttgatctaacttaataaagtaattccagtgtaaaaaggtaggtcaaaatgactaccttctaaaattcaaagttccttttttcatgagagaaattatatttatttcaaacagaactaatgatactgtatttggtacaatatgttattttcttagatatcttaggggtaccttctactaactaatactttgggataggcttctgggattcatgagtgtcaccaagttcagagctgatcttaagcaaaactgaatggcttggcccttctagaaaattatcttgcctctgataactcaaaattcaaattgagattgtaaactataacatagaagtatttagtgtaggtgatattatagaacaggtatctgttctactgatagtcaccccatttgagttaaatatgctatgtgacaatattaagaagctatgtcttctgaaattgtgtaaactttaaaaaatatatgaaaaattagaatactatacaaaacaataattattaaaccttctcccactttctgggatatccaagtctaatttgctatgaattataattattaaaccttcttccactttctgggatatccaagtctaatttgctatgccatgagagtggcatgctgcccaagctgcaattttagttctatataaatagggtaatccagggaaatcagaaatgcagagtgtgtttataagcacatgtgaataattacaatagcagacacacaattttaaattcaaatttgttgttgttttttgttggttttgtttcttgtttgggaaccacaaaataagcctgtctttctttggatcttaaaatttattcacaatgttttcatgttttatattaggaattatctggttctacagaagtagagaattccattcctacgggaatatcagaaggaggttaaagtgggcacaggtaaatcatccatttggctatcaaaaagtctgattctgaccaggcgcagtggctcacgcctataatcccaccactttgacaggccgaggcgggcagatgacctgatgtcaggagtcgagaccagcctggccaagatggtgaagccccgtctctactaaaaatacaaaaattagctgggcgtggaggcgggcacctgtaatcccagctacttgggaggctgaggcaggagaatcacttgaatccgggaggcggaggttgcagtgagaggagattgcgccactgcactccagcccgggcgacagagtgagactccgtctcaaaaaaaaaaaaaaaaaaaaaaaaaaaaaggctgactcttttttctggtcccaaataaaaatgactaacttcttcaaaatatagggtaataaaataccctgaaatgagtaaaagttattcattctgactataatacactttgttttggtagaaaaaaaatcttcataaatttaaaaactgaataataagcccttggttaatcatttaacattagaactcctattttctcttctagcaaatgtttccaaacagaaaaacgaccacaatcaattttagaaaacatgtttcccctttgaggaaggaaggacaaataagatgtttaaactgcagttggtaaaatcatttgctaaccctctgcgtggtaatgatgccacatcacctgcactttgctgtcttgatccatgctgaagtgatatgttcttggacccaagcagaactctctagcgatttgcatgttttgtcatattgtcacagacactcatggttaaataaaaacaatctggttagtataaagctcaatttgcagagaaataactattctctgtgtcagagtccacaggcaccagaagaaaacattttcacacagaacatggctatgtgccttttaaatccatttgcaaaattgtttcatttcttatgtaaaaaggtggaatattgactactgataaaaatttcctcctacacaaatatttttcaggttcatccaatcccacccttactcaatatagtggaacatgaagctaaattcatctggaatacttcactaactcccaaaatgaacaagggagtggaaagttgataaaaaatactagcccatacataatcagggaaacaagggttgtatgttaagtggattttcttccatccgtgtgattacctgaatgtcatttttaacttgggtaacttaaggtaaacttatctctctaagttcatcaatattcctgcacaaaccttcattgccatttaattttaataaaactgagaaagagagagtgaaaactcatgttacccattccaggcaggaagatgggaagaaaggaagcatgccattcagaattctgaattgatttgtacaatgtcttaggcaaaagctcttccagaaatatctatgaattcacgttgaacataagacacaaaattacagataaaggttaaaatcaaacttgtcagatgttaacattatcctgactactcataaattgattcatttatgtgctagaacatttttctactacccaccctggaggaggagagaatccatttactgggaatgtggaatgtgcttcgtccgggaggggaggggaaagaaagaatcttgactggtgctatgtaaagtggctgcacctttcaaccagttttcaatttcaaacaagacttttaatatctatgtcttttgattgtttctgacttttaatttttgaaataactgctttattaagatataatttagataccaatttcctcatctaacgtgtacagttcactgatttcttggtatattcagacttgtgtaatcatcaccataatcaagtttataacattttcatcaccccaaaaagaaccacacaccttttagccatcacccctcaacgcttttttttatcctttagccctaagcaactcataagtctacagatttgcctattttgaacatttcatataaatggaatcaggcaatttgtggtcctttgtgatgggcttctttcagttagcataatgtttttaaggtttcgtgtttaaataattttttaaaatttgggaatcttttcaaatttacaaaagagtggctaaaaaacattgtacggaaaacctccatttatcccttatctagattcatggtattgttaatcatgtttctaaaggtttttaatgtctgttgttatagcaataaaacattcaaaatggttatatttataaaagagtggtctgcaaatgcttataaataatttggattgtcatttggaacattctgaaaatgacatggaactcagggctatgaaaatccactggtagatgtgtagttgatgtaggcagattgaatttccatatgtgcctggcattattaaccatacagtcatacagtcgtgtaccacaggaacctttagtcaacgacagacttcatatatgactgcagccccataagatgataatgccatatttttacagtatttttcctgtgtttagatatgcatagttacacaaatacatttgtgcatgtaatactacattataattgcctacagtattcagtacagtaacatgctaggcagccaggagcaataggttataccacatagactaggtgtgtagtaggtgacaccatctaggtttgtgtaagtgcactttaggatgttttcacaaagaccaaatcgcctaaggaagcatttctcggaacacatccccattgttaagtgacagaagaccatacaagaaaactcaagattctcacaatcaaaatgaacatgtaggaaacagggcttaagaaggtcatagggctgggtgcagtggctcatgcctgtaattccagcacttttggaggctgaggcaggtggatcacttgaggtcaggagttcgagaccagcctggccaagatggtgaaaccccgtctctactaaaaatacaaaaattagccaggcttggtggtgggcatctgtaatccaagctactcagaaggctgaggcaggagaattgattgaacccgggaagcagaggttgcggtgagccaagattgcaccattgtactccagcctgggtgacaagagtaaaactccgtctcaaaaaaaaaaaaaaaaaaaaacaaaactcatagggataccaagtccttttccatcattcttaatcaactggaattacaaccaattagtatttattaagcacctaataatttgtgtcaaaaagttgtacaaagaggtaaggagtaagtataaagaagaataaaacaaggtggtcagttttaacaagatgatctacattgtgacctgaactctgtcagcaaaattaggacaaaatagctatgaaagatataaaaaattaattctttctgggagtaagacactactggaatcacaaaagaagatgtactcaacaaagcttcaagtcataatttttttttccttctgacattaaagattaccaaggctctagctctcttatggaaaaaagtaataagatgaagttaaggggatcttttccttagaagttttattatttacaaataatgaggggactaagaacctagttgttgttgttgactttttaggaataatagtactcgggcaccttgaatttaagcttagcataattatagttttaatctatgttgcaacagttctatggaatatcattaatcttttaccacttttaatatattaaagcattgcatcccagtcttggctagggaacataatttaatctgtattcaagcttggggtgcttgaatacagatacccagggttctctgcagatccccttaggagaacctctgtcaaaaaaagtttggaaaactctttgaaggacactcctttaggagtttatcagctaaatgtaggatgctctgggttactatattcattattgacacctagtttatggacatagaaagtatcctcactaaaatatttaataagaagcatgttctactgtctttgaaccaagacagagtgctcttagtaatcaaggtcaactgagctgggtgcagtggctcatgcctataatcccagcactttggaaggccgaggtaggtggatcacttgaagtcaggagtttgagaccagcctggccaacatggcgagacaccgtctctactgacaatacaaaaattagctgggtatggtggcaggtgccggtaatctcagctactcaggaggctgaagcaggagaatcgcttgaacctaggaggtggaggttgcagagagccgagattgcgccactgcactccagcctgggtgacagaacgagactctgtctcaaaaaaaacaaaaagtgaactggagtccttcgagcattggataaatactacagtggctaataatttccctctttacatgtgtaaaaccatgttagcagtttgggacacagagggcacaaactatggaatgagaagattcaattcttcctcttgtgtgaccctgggggagccatttcatccttttgaacctcattttctcttgtagaaaaaaaatgaaaagagtaagaatatctaactggtagggtaattttgatgatgaaattgaagtatgtatataaaagtactgtacacactgtcattattattttattttgtaaaacaataatttttccacattcttgtcctttagaaagcagtgccaactattgtaacaacttttttctttacgaagctacataccattttaaatatattgtgcaagtctattatatctgaaaataaatctacaaaagaaataattttccccttttgtgtactattctgtactatagcaattttgaccctttcacaattttggatctcctccatacagaaagttcccactctaaaagacttgaagatgtttgtggatgcctgggttagagaaaatgtacagatatataaaataataaaataaaataatttgaattcaaaaaagctatttataaagaaatgtaacatgcaaggaatatggctacccaatttaagcatcttcgagagtacagctatttgcaatttagaatgaaaggaattgaggataaacagttcaagtgtctgcctggaaaatacaatggcacatcaaataataattttaagtcctctgtctgaacaaaggctttagtatggtaataagtagtacaaagcaatcaatgtttcatatattataatttttcacatatggaaacttgcaactacagctctctgttggctgcatgtggtggaaacaaaaggaagatgggaatttaagggactccaagtgtatttataaagtcagaagttacactgagttggaggatagggtggaaggcatgacttgaaatatctaggtgaggagagtttggacaaaaacgctgatcccattagaaagccaaatggcacctcccaggtgtggagcaggcctgtcgcatctcacaggcggaacagcgggcacagccgaggggacgcccactctaaagagggtgaagaactaaaccccttagtttgggcttctgccaccagatcccctggattgactattagaaacttcacttctatttctccatcagtaaaacagaaaaagaaatattcgatgggtaggagtagctatggttaataaaataggtttaaatatttggcaacagaagaaagaattcaaatctgtgattgagaagcaggtcactggaaggttaagttaacctgaaaactccaattccccctttcctcatcactgcgtagtttgcttttcagtcgtttcactcagtctgcacctacactaaatcccagcagcgaagttgaaggcattcacgtctccactcaccaaggtccctggatctgaatggccaggcaaataacctagctgtgcgatagcgaatgcagtcaatatatggcatagtgttcatctggtgcttacgagtgatagaagtttttatctaatttcacttttataatcagtttgaggtctcattatttttcctttttttaaaaaataaggaccagtaacataaaatggcaaaaaaaaaaaaaaaaaaaaaaaaaagggctgctgttttaaggccccctgtgaactgtttgtatcccacctgcaggggaagtacagaaactgcaagtaagcaggttgggaatttgggagcaatttgaatggaatctgacacctgctgaaatctagaataaaaaaatgtgtattttgtatgcctttattttattcttctagtgatttatttttaatgtatgttaaaagtactactgtgtgacagattggaaataaaggaaaaacctgattcctctccacaggtaatcagtgagaacattgaattttgatgggcatttcaatgactgagttattttctccatagaaagagtgacacaagtgaggggtgagggggtggggagggagccctgtcttcagatctcccgttgtttgacttgggcgtaaggaactttctgagtcaacctgcaggtggcttggcagggattccttcttcccagctcctggctccaggtgatagctgtggtctcatctcctcagcaaacaccttcaaagagctcacagcagatatgcagtgggcagggagattggctttctccaaacacaggggagattgtggagggggagcaggtgaaaatcatattgttaatcacaaacaaacataattaaccggcaactggattaagatacctaatcagtcaaaattatttagaggctcttataaccatcacccttcttttggaagttcctgcttgctctgtgagataatgctctgttaatgaaatacatgtccataggggtcccctgaaggggacattcctcctcttaaagtgacataatgaggcttcaataaaatctctaagggggaagagtgttttaaagaacaagaggagacgtgaaaatgtgtggtcaaggactaaccaagagtcaaatgcttgcccagctttggtccctctgtgggctttaaagaaatccttcagtaaggctcagtctcaggtgatctttcattcattcaacaaatcttgcggagttcccacgatgggccagtcgccagcagttctgggcatggggggctgggtacagcaatgaacaacacaggtaacacccctgagagctagcattctaatgggcagggggtagacaatacaaataaatatagaacataatgactgctagtaatgagtgctttaaaaaattataaagcagagaacagtgtgtcacaagtttgtggaggaggtgggggacagtaacgattctaggtaggatgtctctctgagtaggtgtcgctgaatgaggggactgtagttccaggcataggcaagagaatatgagtttcgagcaaaaaggagcttggcatgttctgggaatggccagaagccagttgactagaacactgtgatgaaggcagagtcatgaaggatgggagtagaaggataggaatgagccactttggctgggcgcagtggctcatgcctgtaatcccagcactttgggaggccgaggcaggcagatcacttgaggtcaggagttcgagaccagcctgaccaacatagtgaaactctgtctctactaaaaataacaaaattagccgggcttggtggcgaatgcctgtaataccagctacttgggaggctgaggcagaagaatcacttgaacccaggaggtggaggttgcggtgagctgagatcatgccactgcactacagcctgggcaatagagtgagactccatctcaaaaaaaaaaaaaaattagatggtcatggtggtgggtgcctgtaatcccagctacttgggagcctgaggaaggagaactgcttgaacctggaaggcggaggttgcagtgagccaagatcgtgctgcactccagcctaggagacagagcaagactctgtctcaaaaaaaaaagaaagaaccagttcatatgggaccttgtaggtcaccagcatggataggatatttacataggattaaatcaaaattgatgattgtgatgttatgcatgtacacaagaaagtgcaaggagcattcactaataaaatgtacctaaatcaaatgctaggcaaaaggttaaaaagtagctataagttaaccatctttataaatatgccattataattcatgtgttaaacagcataaaatatgtactggcaaaatcaaattagcataggccctccaactgttgaagacttagactgctcaagaattaaagcttcaattcgaacaaccaccctaaaactgagttgacatgttaggtatttgtggatcacactacatacaatgaccaaaccagttagtcatatacatatgattgctatttgttaaatcattcatgctcagagtctttgcttaaccagaggctgccccttctggctctgggatgtcctatcatcaccttttctgtagacacgaccctgtcagattttcctcctttagtcctggaaagggagaaaagatttgccaagaagagaagagcctgtttacgtgccctaggtcatccactgcagctaacttttggggtatctgtttgttttgttttttgaggcagggtctcgctctgttgcccaggctggagtgcagtggtgcaatcatgactcactgcagccttaacctcctgggctcaagtgatccttccacctcagcctctcgagtagctaggactacaggtgtgcaccaccacgcctggataataaaaaaaaaaaaaattgtagagacaggcactcactatgttgcccaggctggtctcgagctcctagtctcaagcaatcctccctcttctgcctcccaaagtgctgggactataggcatgagccaccgtgcttgacccgtagctaaacttgtacctgcgcactgtcaggtttcctggggctgccagcagtgccgctcctgagctctctaagagaaagcaccacaccagggatgtagagttcagagagccactgagcctgctttggagacagaggggttgatcttcattttaatgtagttccactgaactttccctcttacactgaagatggaaatgactcatgggaattcaatcatgcaaagcagcagtataaattagattggccagcctctgcacttggggcaagtcatgcaatctggcttgttatgcattattttcttcatctacaatcatggagagtaatgtgtgtgtgggtgtggctgacagcagggaaaggcaatatatttatgaaatatttcctcaaagctgccacatattttattaacacatctggaaaatactatttaatgcttactcctctttcttccttagggtttgttttgttttgttttgtttttgagatgaaatcttgctctgtcacccaggctggagtgcagttgcacagtcttggctcactgcaacctccaactcccaggttcaagtgattctgctgcctcagcctcctgagtagctgggactacaggtatctgccacaacacccggctaatttttgtatttttagtagagatggggtttcaccatgttggcgaggctggtctcgaactcctgacctcgtgatctgcccacctccgcctcccaaagtgctgggattacaggagtaagccaccgcgcccggcccccttatggtttttaagaaaagaaatcctagttttgctttagccatgactaaaagccccagacgcaaagaatatttgtttgtttgtttgttttgttttttgttttttgagacagagtcttgctttgttgcccaggctggagtgcagtggcgtgatcttggctcactgcaacctccaatccccggttcaagagattctcgtgcctcagcctcccaagcagctgggactgcaggcacacaccaccaatattttagttcttaatggtacaatcttacagttttaaaacgatgagtgactgcattcaagacaaaccaaaattgtgccttgtttttaactgatgcctgaggaacgtgccagcaggtaaagggagtgaagacgaaaacatcaattagcttagagtttatggtcacactcgatacttaaaataatttttaaatagatttaaacaagtaattctttctttctttcgctttggggcatggaggaagcagggtgctgggcaaagcctgcacagaggcgctggcatgcctggaagccaaaaaaatgggggctgggagcgggcagtggtgtggccgggagcctgattacagtgagcacatatgtgcacatatggagagaaacaggagccaggtttctcactgtgggaaaagagatttacaaatacagcaaaggagcagtctagaaagaaccctaagatgttggattggaattggagactaacacaagatatatatatataaacacacacagaggtagatttagaaatagttatagatatgtatgtatgtggacacacacgtatacatacatgagcatacattatttcctagctctgtcttttgagggtgcctggaagcagggacagtacagtactgatgagaacccagatttccacttctaaatgccatcctccacaaaaagatgcccttgatccttggagaaatgcctggatctagggctaaatgaagggaaaattcaaaacgagcctggaatatcgtgttgtgctaaaaactatgaaaatggtcaaagggttataaggacatatcaaaagaatacaggagctagctcgaaaggcacctcactggccaaatctgtggcaactgcagcacccaaactattgatacaatctagggaataaaaagagaatcaattggccaggcatggtgtaatcacacctgtaatcccagcactttgggaggctgaggcgggcgaatcacctgaggtcaggagttcgagaccagcctggccaacatggtgaaaccctgtctgtaccaaaaatacaaaaatgttagctgggtgtggtggtgggcacctgtaatcccagctacttgggaggctgaggcaggagaatcacttgaacctgggaggcagaggttgcagtgagccaagaacatgccattgcactccagcctaggtgacaagaatgaaactccatctcaaaaaaaaaaaaaaaaaaagaaaggaatccacagagatacaaataaacaaacaaataaaagaagggagaacttccttacagtagaaggaatacatgccatttcattgtcagagttctcaacacaaagacacacacaaaattctcacttacaaaggggaaaaatagtgacctgaaggtagagaaactgggtagacaccaacttgatgaagtgaccagattagcatcaccagtgatgatgagacgtccgacggccttccttgtcataccctgatgggagcacaccaccatatcaacgattttcctacaaagaatgtgtgagtcaacatagacagaccagggtgtgggacattcttggcatgaaaggcctgcactctttaaaactataaaggttataagatagacagaaaaatatggaagacctttgataaataaatgtaacttgatcctgaattggatgttgggccagaaagagaaaagaggcattgttgaagcagcttgcaaaatttgaattgagtatgtggcttagatggtagtgacgtatggtagtaatgtcaatttcctaatttgtatggtatttgatggttttggggagagtgtccacattttaggggaatatacactggagtatttggagtaagtgatgagacattgtgccacagcttgctctcaaatgggtcagaaaaagactaatggcatgcatatatgcatatgatttaatatagaatatgtaacaatatatccatattacatatttatatagtatctatattaatatattatatactaatgtattctatgtttctattgttctgtgtatgtatatttagaaaagaagaatgagatggaacaaatgtgggaaaatgtttatttagatagagatggagcaaaagataaaatgctggtgaggcgcagtggctcacgcctgtaatcctagcactttggaaggtcaaggcaggtggatcacttgaggtcaggagttcgagactagcctggccaacatggtgaaaacctatctctactaaaaatataaaaattagcctggtgtggtggcgcaaacctgtaatcccggctactgaggaggctgaggcaggagaatcaagtgaacctgagaggtggaggttgcaatgagcccagatcacgccactgcactccagcctgtgcgacagtgagactccatctgaaaaaaaaagaaagctaacacagcagtctcagaaaaggtgatacagttctttgtgttattcttggaacttctctgcaagtttgacattatttcaaaataagtgattttaaaagaatatctgtgtatttatatagtggtataagtaacaaacactttcatttttagtggaatatgtagtatttcatatggaagatatttccatttttcaatactctctaggaattctggaacttggaaggaagggggtgagttatatagccctttttagcccctgtaaaaatgttatataaccagaaaatgtcaaaaagaaagagttatctattctctgtccaaattcccaaattctacttttagattagccactgaaataatcgattagctttactaacgtaatggaaacccagtaaatccatagtcattcctcataaaagtagaatctgcattcccctggatcaaaggtagggaccctctgtgcaataattaatttcaaataattttaaaaagggtttgctctataaaaaaatagcattccatttttacccaaagcagtatagtcttctttacagtccctgacttgcgttttatctcaatttgctatttttttctgtacagaaaattttctctaaatcattatatccctagacacacacacacacacacacacacacacacgcacacacagttttactcagcacttttactttacaaaggtgtctgtgatcatttttttcacttctttatctgacaaagatctgacattctccccttctttttttgggaaaattgagggtgaggacttgcaatttacctggtagcaagttattgaacaaccgagactagaatttagtcttttcactctacaacacaaagatctagcctaggttagtacatttgtgggttattcttcctttaaaatacttgataccagccacacttattgagattgtactctgcctctgtaagtctttaggagaagaatttaggcctacccatgtaaatacccatttgcaaagcatctctttgcattgcaaagatatactaatagaatattgaattctttgcaattgtatttttgcttgccggttgtaacagggttttagaaggttgacattcacaaaacaaagacttcttttaccaccagagtaaaaatgctcacattcaaatataactagaaaatgaacaataatttatagagaaatctctgaaagttttgctagtgtaagacaattttgattaaagtataacaatgttgttactagctatcatagatgttaacacatgatattatacattccatctagttgctataatgcatgtaccctcaacactgtggtagttttattttattttttctcacaatgttttcataagctaacatgcatttatttaatttaattttatttattaaatacctgtgtagaacttactatgtgcctggccctattataagtagtttatgaataattaattcatttcatcctcataaaactccctgaggtcattactattaccatcctccagttcacagatgaggtctaaagaagattaagcaacgtgtccaaggaatacaccactggtaaactgtagaactagaattccagcccaagcagttcaactccaaatatgtgttcataaccaatgtgtcatgctgtgccaagcctcagattcacagttgttggataattatttgtggattaaatgaacaaattactctcttgtctcttaggctgatttgaaagcattaagcaaattacccaattgttctgtaccttattttttcactttgtaaaacagaattgataatatttgccatccatttctcttccaaacaacaggaagaatggagagcatttactttacctacctgctgtatgtttttatgtctttaagactggatctgcagtgggtctagagtaggctaacagcttataccttaaacaggcaacaaaaccacaattcagtataattaagttgctttccatctgaatgagtgtgaagtagaggggcaaaagtttgagaacttcaacttccttacacatgagctttattcccatttaactctgaactgttctgtctttttttcagctgaatcagaatttgtttgtgtaaaataatagttaaatgaaatgttatctagggcttagattatatgatctaataaaaatatcaagttatagatcttctaaatgaaaatgctttcctcttacagcactgcatctctaatatttaaaaattatcaggacctagttagggataacactggaagtttctgtgccaagggtccttactccatctctgtctatccactgtctttattttgtccctgcgctttccattaggttctttattggctgtagacatggcatgaaaagaaattcaaaacaagacccactaatgttttgttttgttttttttagaaacaggatcttgctctcttgcccaggctggagtgcagtgatacagacatggctcattgcagcctccaactcctgaagacccactactgatagcagcaagggcagatagctggtccaagcactcttgtgtgcttttgagcaaatcatctgtcctttctcaatcttaatctcctcttctgaaaaatgaggctaataacaaaggctgcactgtctacctccagagctgtcaggagggtcagagaaattagtgaaactgctttgtaaactgtcctctaccattatgaagacgttaatactaaaggtcagtttcgaaaaattttccaaatatagacatttgcttttgcattatatccacatgcaaaattatccatttacattcttggcctggagctccaagtggaatcagttcagaaaagaaacagaatttgacttaatcctcaaaaaaggtggtatttcagatgctcaatgaatgtctggagactaaactcctggtgaatgagaaaaagaatatgacagacctgaagtcagatgaccacaggcctacacagatgtgtctgagatgagaacagtctttgctaaggtctacagaggtcattctcagtgcctttgctaaggtctacagaggtcattctcagtgccttgccttgtagggagatgaccttaggactccatccatgacagctgtaacagtatactgaagaatatattgaagaccagtgaattgcgtgggctctcaggacataaagatgaaatgtaccaaagaccctgtgttgttattaaagagtattgacagttttgcaaggtccaaaaagtggacagagaagaaaatttagttaacaggttaaccaaatactgactgcaaaggaatctagcaaggatccctaacattttctcttctgttcagaaactttggaagccaattcagataccctttcaaaatctgacatgtgtgtggctaaagttgtacaaaacagtgggtaatgagtgttgtcagaagtggcctgtcctatgccctatttaactttgatcacttccatgataacaaaatgcacaccttgccctaaccatctggcacaatccagccctgcttaccagggaaacttggcaagccagagttttcagggtggaaaggaaacctattatctctactagaaaaaaaaaatctcaaagcgcttgacctactgatgtcagcatcacctttacatgccaggaacaaattattacagaagaccatacctagaacacccagctggaagttaatgaatcagggaggaagactaatgacacggcacggtacattcctccgaggcagggaccgcgtctattctccttcgggtgggagtggaagtgctctgcgcacagtgggcacgctgctgataaggctgtctggtcaggtgaggacacaggtctccaaggaaagccctgccttctcctagggtgtggatggggaaagtgggagtaggagttcacctgcagcaccgagtgcatagaagctctgccgctattgaaatcccttttaaggctgaggggcagatctgaaaggggtgagcaagacagtactgtgtatgtgacgagtcctgggtgaggaacgggaccctctccctcattcccaacgccacctctccctggagtatgaggttccacagcccaggcaataaagggaagtagcccacacacctcaacccggggccacagttggaggtggggagatctaagaaacactccacggatgagtttctgaagagggaagtggaccgggaacagcgcatttcctgcttcgcctgtgcaaatcccaggcggggccaagcgggaacggggacacggtctaagagtcgcccgctgccagggaggggttggggggcagcctcgaggggacaccgcggaaccagggagggatgcgcatggagggagtgggagaaggcgtccaagtaaaatgcatgctccggtcatcgggggtaacgcgcgtccccaaatcccctctcgctgtcgccctttttttcagtcctcacggggagaggccggcgcagcagtggagcaccgcaggggctggatcggacccgcactgcagcatctgcagggctccgacctggtgcgggcctccaaggcagggggcgcgcggcggcacagccggtggccgcgattttccgggccactccttccccccttacactcccctcccgcccgcgaccttcgacctccatcctggacccacggggtactggcccggggacaaggaggagacgttaaaggtatcaaggggcgcggcaccgccgcctagacggcgccgggacgcgaggtgcgaatcggcggcgtccggctgcgctgccctacctgggaggtgcgggaccctcggccgcgctccaccgccgcgcgccacctcgtgctggcctccgggaggcagccgcccgcgcacgatttataaatgcaaaggccttattgttgttctttgttcagggataccattgtctagtcatccacgggcagcctggagttttcccagggtttgcggcgcgcactcccctcccccgcccccacagacttgctctccagcgccaacccggatctgcctaggtgcccacgggtccttcccgatcgacttgagtgtccttcctccagcccctgctttcccagcatcgaaaacacaaaagcctgccggaaatcacccagcctttgcctggtcactcaggggcccacggataagcgtggctctgattcctccaggtcagccccacggttcgccacctacccgagttaatttctgcgcccgctgaccaaaggccccaactggcaacgggcacagcttcttggtgcgctagtcgcttccttgcccagcctttagagcctcgggtccggcccaaggacccggggacgtgagcgcaattagtagccaggagccctgcgaccctggaccgtgcagtgctaacgcacccgaacggctatgcgagcggtgtactcggctcttacttgtgaaagttgtttcccccaaccccctgcgtaaatctcttgtgttgagaaaagcaaggcttgcaggaagccactccggatgtttgctgctttacatgtggcatctgtggctggctctgataacgtcccggggcaccacgtattaaagtgaagagactgaaatagaaggctccacacaccgcgcgcgggtcagcgacgtcgccgccctccacactgccccccgaaatataagacaagcgaatgatcagaagaaatgagatctaactaggtcacagtatgtaaaagggactagtcttggaaagccaccacaattcctcccctgtaaatttgtaaactgtgaatttatgatctcagggagggtgttataagaagtagggggaggggcgtcaaaatctgaagctcctactccaacctatgattgtgtactttcacctgatttctcttaccagaccaagatcagtccccaagaacaagggcaaataaaaatagggaaacccggccgggcgcggtggctcacgacggtaatcccagcactttgggagaccaaggcgggcggatcacctgaggtcaggagtttgagaccagcctgaccaatatgatgaaaccccgtctctactaaaaatacaaaaattagctaggcgtggtggcatgcgtctgtaatcccagctactcgggaggctgagacaggagaatcgcttgaatcggggaggcggaggttgcagcgagccgagatcgcgccattgcactccagcctgggcaacaagagggaaactctgtctcaataaatgaataagtaaataaatcaataaaatatggaaaccccacgttttcttccccatcattttctccaccttcttggctcccaagcgcacctctcccaataatgagctgggtgaggaagagcatgaggatgaagaaagtgtacagggctaaatctgtatatgtacattttttggactcacacctggattgtatttcctgtagtgttttttaaggaattagtcaaacagactagacagataaaaatgaattctggaccagatattgttttttaattttcaatgtttattctaggaaaactccttagctcataaaagatttagtgttaagagaaaattctgctttgagagctttgaaaaatatttattattatccagaaaagttagaaaagatctcaaaaaaaaaaaaaaaaaaaacagcaaaaaacaaggtactacggggttaatttgtagattgctctctctcctcctatagttttgttgcttatttaatcatttgcaatgtgcttttgctttatactgaagcccatttttttttcagaaaaaataaagctttaaaagtacatcatcatttaaatttgtctaaaatcaaccgctttcaaaactaccaactagaagtaacacctctctatgatttctttatgcagatttaattttttttcttgtttgaatcttagagacccaggaactagaaacactttcttaacttgtcccctagccaaggcttcacagatacttgcagaattaaagataagttggcttaaaacaattgtgtaagagttcttttgagaaaaagcaatgccagagaaactgaaggccaggagtttgcaaaagttttgtatttttatggatgccactaataagcaagactggacagacggtcttgttgttgtagtatcacactcaaagcagcagcattttacttctcagattccaggtgtaagctctacttttttatcacgccttcataataaagaaaatctgttctggagattcgtatattgatttctttgcaaagttatctctaattatgcaggaatggctgttagttgccctcaaaaaccaacacaaatacacaaacacaacagcctggcttagtgattattaagagctgcaagtctgaaggcggactgctgggtgtgaattccaccttctcaacgctgtagtctccagcaagttccttaacttctctgcctccgtttcctttcctgtaagatagagtctacctcagggttaatatgaggatatgcttctttgctaatgctggagggcgctaggaatagcagtggcaggctgtgtcatttctcagtgttgtataacggcttgttttaaaagtcccactgaaaactttttttttttccagatcgaaacacaagtttaatagtcattcagatttcattccagtctaaagaaacttatagaaatctaattatctgccagaataaccgctttaaactgactgtaagaaccacagttactttgcagctaaaacagattgttctcttcccccaaacaaactcggacatttagacaaatattgctgctgtctttacattttagaaatcagtattaaggctcacctgttactgaacacatacgagaaacagttttgttatgcgtatcttatatacatcatgtatacattttcgtactttcacatgatgtgtataataagatacacataaaaactggttggcttgtcatgagtaaatgctttattctttagagtgaaggaatattggatacagaacgtcgttccatatttaatcttgctttagaaaattaggatttatcttggacacagcattttgaatataacacaggcaagttgagtcctgggggaaaaattgtatttttaaatttattatcaacggtgtctttcgcatttgagaaaacacatttgaagatgcccatgcagttccttggaagtaaactaggtcacccaccactgaaacaccctcggcttctgcaaaaagatgtgctttaaagagaatagaatggacgctcggtatgttcatctaaacgaccttgggcaagtacgtcgattccaaggtacaatcagccctcccagacggcttttcgagtctccctaaccccggtgggagaggacgcggcgccagagcccagctccggctagttttcccgggggcaggtgtagccttgggcgcggggccgggggaggggcaaggggcgggcgtggggttggactgggacgtgggactcggaccacggcctgggcgtgggcctaacgacgcgggaccggcccgccctcgccgctccattggccacatctgtgcagaaaaggccccgcggcccaggggcgcccgcagtgtcactaggccggctgggggccctgggtacgctgtagaccagaccgcgacaggccagaacacgggcggcggcttcgggccgggagacccgcgcagccctcggggcatctcagtgcctcactccccaccccctcccccgggtcgggggaggcggcgcgtccggcggagggttgaggggagcggggcaggcctggagcgccatggtgagcaagggcgaggagctgttcaccggggtggtgcccatcctggtcgagctggacggcgacgtaaacggccacaagttcagcgtgtccggcgagggcgagggcgatgccacctacggcaagctgaccctgaagttcatctgcaccaccggcaagctgcccgtgccctggcccaccctcgtgaccaccctgacctacggcgtgcagtgcttcagccgctaccccgaccacatgaagcagcacgacttcttcaagtccgccatgcccgaaggctacgtccaggagcgcaccatcttcttcaaggacgacggcaactacaagacccgcgccgaggtgaagttcgagggcgacaccctggtgaaccgcatcgagctgaagggcatcgacttcaaggaggacggcaacatcctggggcacaagctggagtacaactacaacagccacaacgtctatatcatggccgacaagcagaagaacggcatcaaggtgaacttcaagatccgccacaacatcgaggacggcagcgtgcagctcgccgaccactaccagcagaacacccccatcggcgacggccccgtgctgctgcccgacaaccactacctgagcacccagtccgccctgagcaaagaccccaacgagaagcgcgatcacatggtcctgctggagttcgtgaccgccgccgggatcactctcggcatggacgagctgtacaagtaaagcggccgcgactctagatcataatcagccataccacatttgtagaggttttacttgctttaaaaaacctcccacacctccccctgaacctgaaacataaaatgaatgcaattgttgttgttaacttgtttattgcagcttataatggttacaaataaagcaatagcatcacaaatttcacaaataaagcatttttttcactgcattctagttgtggtttgtccaaactcatcaatgtatcttaaggcgtaaattgtaagcgttaatgggctgcaggaattcgattcaaggatccataacttcgtataatgtatgctatacgaagttatctcgagcgtcaggtggcacttttcggggaaatgtgcgcggaacccctatttgtttatttttctaaatacattcaaatatgtatccgctcatgagacaataaccctgataaatgcttcaataatattgaaaaaggaagagtcctgaggcggaaagaaccagctgtggaatgtgtgtcagttagggtgtggaaagtccccaggctccccagcaggcagaagtatgcaaagcatgcatctcaattagtcagcaaccaggtgtggaaagtccccaggctccccagcaggcagaagtatgcaaagcatgcatctcaattagtcagcaaccatagtcccgcccctaactccgcccatcccgcccctaactccgcccatcccgcccctaactccgcccagttccgcccattctccgccccatggctgactaattttttttatttatgcagaggccgaggccgcctcggcctctgagctattccagaagtagtgaggaggcttttttggaggcctaggcttttgcaaagatcgatcaagagacaggatgaggatcgtttcgcatgattgaacaagatggattgcacgcaggttctccggccgcttgggtggagaggctattcggctatgactgggcacaacagacaatcggctgctctgatgccgccgtgttccggctgtcagcgcaggggcgcccggttctttttgtcaagaccgacctgtccggtgccctgaatgaactgcaagacgaggcagcgcggctatcgtggctggccacgacgggcgttccttgcgcagctgtgctcgacgttgtcactgaagcgggaagggactggctgctattgggcgaagtgccggggcaggatctcctgtcatctcaccttgctcctgccgagaaagtatccatcatggctgatgcaatgcggcggctgcatacgcttgatccggctacctgcccattcgaccaccaagcgaaacatcgcatcgagcgagcacgtactcggatggaagccggtcttgtcgatcaggatgatctggacgaagagcatcaggggctcgcgccagccgaactgttcgccaggctcaaggcgagcatgcccgacggcgaggatctcgtcgtgacccatggcgatgcctgcttgccgaatatcatggtggaaaatggccgcttttctggattcatcgactgtggccggctgggtgtggcggaccgctatcaggacatagcgttggctacccgtgatattgctgaagagcttggcggcgaatgggctgaccgcttcctcgtgctttacggtatcgccgctcccgattcgcagcgcatcgccttctatcgccttcttgacgagttcttctgagcgggactctggggttcgaaatgaccgaccaagcgacgcccaacctgccatcacgagatttcgattccaccgccgccttctatgaaaggttgggcttcggaatcgttttccgggacgccggctggatgatcctccagcgcggggatctcatgctggagttcttcgcccaccctagggggaggctaactgaaacacggaaggagacaataccggaaggaacccgcgctatgacggcaataaaaagacagaataaaacgcacggtgttgggtcgtttgttcataaacgcggggttcggtcccagggctggcactctgtcgataccccaccgagaccccattggggccaatacgcccgcgtttcttccttttccccaccccaccccccaagttcgggtgaaggcccagggctcgcagccaacgtcggggcggcaggccctgccatagcctcaggttactcatatatacttagattgatttaaaacttcatttttaatttaaaaggatctaggtgaagatcctttttgataatctcatgaccaaaatcccttaacgtgagttttcgttccactgagcgtcagaccccgtagaaaagatctcgagataacttcgtataatgtatgctatacgaagttatgatccgccccagcctgcaggccagaagcagtgttacacacttcctggaggagctaaggaaatcctcagactcctgggtttttgttgttgctgttgttgttttttaaaaggtgtgttggcatataatttatggtaatttattttgtctgccacttgaacagtttgggggggtgaggtttcatttaaaatttgttcagagatttgtttcccatagttggattgtcaaaaccctatttccaagttcaagttaactagctttgaatgtgtcccaaaacagcttcctccatttcctgaaagtttattgatcaaagaaatgttgtcctgggtgtgttttttcaatcttctaaaaaataaaatctggaatcctgcttttttgctctactagtacctctgtcacactagtcttatcaaaaaccagttcttaagatcaatgttaagtttattagttaatgtaaatttctcatcctcgaaaagggtgaacataaatgcctttaaggagtatatctaaaaataaacattaggatatctaagtttgatgtaattgtttcaggaaggaaaaaagaaaagcattctggaatgagcctacttcaagtaatcttagtttctaaaactaacagttaatattttcaattccagtatatcactttaagtagaaggggatgtccaagtaattttggttttctaactgttgaatcataagcttgacctgcccccagaggctttttggatgtttttatctgtgttttgccatctctttacactcctcgacattcagtttaccttaatcttcacatttttacaccttgggaagtggcaagcatcgctgggtttaagataaaggagtcacaaaaactaatcaaaataaaatttgcattatgacaacttttaatacactttagcattttatttgattggttttttttttttttgcttttagatttaatacatatacggacgattgcacagacttaggggagaatccatgaatggtttgtgtgtagtgtccctatctatcaccattactttatcaagaagaaacagttacagggttgtgagtaaaagatggggatcagcccctgtaatctgccatactaatcgctgtggcacgtctcaccacatttgagattgagacataaatggaaacaggtgacttataatgggcatttcctgtgccagatgtttgttcaatgccattctaaacagtgtgagcctcaacaaacctgcaggtttaggtgctatttttcctattttgtaagaaaaggaggcaccaggccttcccctgccatgtatatgaaggcttgtattacaagttcttttgacatatttctcacctgttttcctctgggccagtatgtattcatgggcactgggagaatttacattctgttgatgagaaaccatataattatccttagcagcaagtgctatagaaaaaggaaaggcttggaggatagcttccagcatttacatgggagagatgtctgagctgaaatgattggctggattctcttgaaaaagggcatggaatatgttttttagaagggattcctggaatgtgaaggatagacagttttagtgaggaaaggtaagtttattctgtcaggcataacaggctgcctttaaaaaggttaaattctttctcttagctcagatgggttgtttctgcttccagcctgagctccttctgcagggtgtcccaagagttcccagtagataaagtggacagaagggctaccagcccaagttcagggctgtgctcagattacacttggcattttcatcatagtcagcccaagaagactcagttttacccttggctgccatctcttaacgatattaagataagtacagaaaagaaaaagaaaaagagttcttaggggaaagatctaaagtcctgtaaattacatctttaactactcactaggcgcaggtggaaaagcagtaagagctaaaattgttaagttaatgttcatgcatttacatggatggagggattggtgttcacaaataattttttttgggtaagaagcatcaagccaattccttctctttcctcaagcacacagatcaagtgactgcaggtagcagctagtgattttttttaattcctaattttagtttttatgggtacatagtaggggtatatatttatggggtacatgagatgttttgatacagatatgcaatgtgtaataatcacattatgtaaaatggggtatttattccctgcagcatttatcctttgtgttacaatccaatgatactcttagttattttaaaatgtacaattaaattaatattggctatagtcactctgttgtgctatcaaatactaggtcttattccttctatgtttttttttttttggtagttttaaattaccaaaacatttggtatccttaaaccctttctcattttaaagtacagggatgtgggccctggtggcaaaattagaaatagagctttggggtccattacagaccattatagttttaaagtgaacgacagaatgtaaaacttctgcctaggtcgaacgactctatgtcatcaccaagtgaacagacctccccccaccaccaggtatgacatcgccaaatgcataaatcccctctgtgacattaccaagtgcctggatacccccatgacatcaccaaatacgcagacctctgtttcctcaagtagattcagatgaagtgaccacaggtaccagctagtgaatttttgagacaaaatattaaatctgtctcaagtttttactgttttattttggagacaaatacacataaaggatacattgcttttctacccatgtctaatttggtactttagaattacattaggaggtaagaatccagctcttttatgagctaagatagccagacttgatgccagtacagaatgtgcatgcctttgagacatccggagcaataaggaagaggttattttttcccccatgagaatactgactacatctctattaaagctaccaggtgggtctgataaattacagataaacttgtaaatgacttacacaagcagctaagagataatattgcaatgaaacaatttacttattattcttatcagtagattattgcctctttagtttgaatcacgctgcagaagatatcagcttgaatttgtactgatattaggaaaagcacatacaagccaaaggaattcagataaaatggaaagggtgcaatgaaccaaaagacatcatctcagcctaacattttaaaatgtcccatttcattttgtttttaatactgtgcctgtcacataataaatgttcaacattcccttcctcctcctgttcctctttgatttgttttgacaatagtggacagggagaagtattttacatccattatttcagcacaaatttatttttcctgcttacaaggtgcttccttctgggtctacaatattcatctgaagaaaaatggcactgatgttcctacccagtccccatctggagtaggctcaagttcctccacagggtgggctcctaatggagagagtatttctttaggtcctctggcctgggatccagcagcatctcagtttttcaccataacacctatccctaccctccttctaatgagaaggtggctgtgtgctttctctggaattaccaagcagctttatgggaataattcagtttgcaccatcctccatatacaaacactgaaccctcaccactgatatttttcccaggttggttcaagacactggaaactacaatgtcttagtgcagcacttagtacacgcaagtgctaagtaagttgttgtgataatcatgatgttctttaatgtaaaaatttctctgtagctaagattcaagaaaccatttggctaaatattttaaaaatctcttcttgctgaagaaattttagctttgacaatctttttttccacttgaatcgaagtcttaaaccttttgccaaagttgacttcctaacaagtattccccaaattgatgttgctccaaaagatgatcttgtgaggatactctctgtgtgcaggttcagataacaaaaaaaataaacatcagtagctgtgctgtggatcccagttctgtaagtcagtgccttcccataagcctgataacttgttaggcaagaaaaagaactgtggtgcgtgtgaagttaaacccagcagttttctgctcttggttaaggactgtctcattttcagtattacctgacgttaccggttgctcagaaaactgactgaataacttgctggaagcaacttgctgggaagccccaaggaaactcaagagttcctgctttgcctctcttttctattagaggcagtcacctggtgactattattcctttctcttgaataatgtgtttgaacacaaaaatttaaccccagactgtaaactactggagcaaggattagagaatagctctatgaataaagctagcagtgtctgtcctccgtaagaagaaaaatctctgcagtttgaatcagaggttcacctggcttggaaacttagctctgtgagtttggagacatcaccgaccatttctgcactccagccagcttatctgtaaaaagcaggggtgacggtaaaacattttgccaaagttgactctggataacggcgaaagcttcactgaactgttgtagggattagatgagattacgctgaagggagtgcttcagtgccacagaaagtgatctctctccctctctccggcttcctatcttttgattttatgtatctctctctatctcagctgacttggggaatttaatttcattcttccattgggaaagaaaaaacaacaggaactcgccttccccgggtgctttccttagtggaatgagaattttacagccctataagatggtctgtgtttgctggagacacagcatctgtgttttactttgtgctttggacagcttagtctctttgattataaaatgagaaaaaaataattgtcagttggagaactttgtatagaatgtcttaatacacaagaactcccatcctgcatgaaaatcttaagatctttataaaagggacagttaattgggacatactgaatgcgatatcaagtttgccaacatttatctttctgttagcccctcctcccaccagtatggtttctgaagtcctgaatcgatttccataccgtttactttttgagaactgaacagggtctgaattcttgaggaggaataagcagagtgtaatggggaaaaaggcaaattaagaaaagattctggcttccagtagttccaggtaatactgaaacgcgatccgcaggcttttaaatccctcagtcctcagaagttatttctgtgaactgatggatatggacggactgatagaagaaaattagtagacaccagcaaaatggaaggagcaattttatagctgccccctatatagtggatttttctgctttttaaaataaatatttgtttggacgtttgaatacaatagtaaggatcagaggtgcacacatgcgcaccaagaatattgacctgaaaaagcttactgagataacaggaaggaaaaatagaaaataaaaatttaggtttgtagtttcaataacgagactgtggatatagaaaacattattgttttattcatttaaaaataattttaaaaatgtaaatgatgcacacgcttacaacaactcaaacaacattgcagacgggcttgtaatataaacagagttgtcagaagtttccatctctccccagccccagtgccacaggtcagaatcaattccttttttcttccccctactgggcattacctacattaataattctgcttgtctagtggttaattaattaatgtacctgcatggctaattttaggcttatgagttttagacatttactttctgctacgacagctaagaatttcctgcccgctcttcctcggaatatagttacatccttatttccacttctgttaattgtcttttaaagtccaggactacatacccttttctagttccatcgcgaaggcgggaagtctcgattcctcactgggaaaggtgaggacatggatgcctccacccttccctgaagcactcctctcctcttctgcggaggtggatttttaaaaacagattggggttggggtgggggagggacagcacgcagaatattgatgcaaacgtcatatgaaaaaaaatacatataatatatatgtatgtatacctgcaaagtgctgttacatatacgtgtgtatattaacagcattatgaatcccagacaattggggccgcttaccgccgtggctgtgactttaaattcactcacttcttacatccactaggaaaagaggatttgtttccctaaagcctataaaaggggaaaggcttaggcgcagtggcagccccgttccccgcaccctcctgccctcgggtcccgggcgggctgcgggagttcctcctgcgcgggcgtctgaggcgctagaggtcaccggagcgcgctcccctcgccagggacctacactcttcccgctgctacattaggccgcattaacaaggatctggattcactttaatttaaaaggtaaaagatcttaggtctgatgggggagtgcggcgaggagagctcggaccgcgacgtcgcgcgcccgcttcgaggagttttgagctcttagcttggtgccggggcccgcccggcgctagatgaagtgctcgtttactcggcctaagccacggtgactcgaaggtgagaatgcaacttcgcggtgcaccggctcaggggcctgcctgccgcgccaaggcttcggaagttctcagcgggaccgctgggacaggctttcctctgagggaagaggaggggatttgtgcctctgcacgttctttcctgtggaggggaaaatcaaaccctgtagccgtccgctgccgggtagggatcgggcgatgctcggcgcccgagttctccgccgttgaggtggagcccggcggcgggagcttagattctctgtgggccacatggtctcagaagaggccccgcggcccgggggcgcccgcagtgtcgctggaccggcggcagcgctggccacgccgtgggctgggactggcccggaacgcgggtggcggttcggcctcggagacccgcgcagccgtcggagcatctccgtgcctcgctcaccaccttcttttcctccgcgtccggcggagggtttcggcgcgcggggcaggcctggagcgccgtgagcaggccggatgcgggatacgccagtgactaccagagccagacccggagcgcgctgccggcggtgacggctaggctgggcccctgtccttgggccgagttgccgagctccctcggggacttgaaggtgaagggcgaggcgccggccggggccgcgggccgagccaagggcgagtctcgcatccggcgccttccaggtggggcgaaggtcgagcgccagaggctggcgagggacccccgcccagcttgacgcccagctgcgcccgacgccgggggaggcggagcgcggggaacccgggcgccgggaaccccggacgtgggagggctgggcttctgcgcggggagacgccgggcttggcgaacatcctcaagaaccggtcggtggctctacctccgaaaactctttcgtgtttagcgattctcatatttagtgtttccctttagggagacttgaccggcaattgcagactcgtcttgggagctggagatgacattaaataaaaagttcaaaaccaaattgttaattatctccaggtataaacgataacacaaaattttgcagtcttgggagaaaggttttaatgtgccgcctaattaggccaggttctgcaaaaacgaaacagctctattccaagttaaaaagtatgcccctattccaagttaaaagaaaaaaaagttgtattccttgttcatttattgagtaaggaattgagagatgggtgctgagttattacagattctaactgctcgccacacatggagctagaaatacatttaacagcctttcaggaaaacgcctaaagctttagaatttcaagctagccaggttgcaatctagagctctagtttgttgctgaagtttgggagaggatggcctctacctgtgcacacatcgagttaattttccagagtcttttgaagttaatagggagcggcttttctgtttgtttattttttgacagggtatccttctgtcgcccaagctggagtgcagtggtgcatcgcagctcactgcaacctggacctcctgggcccaagcgatcctcctgcctctgtctcccaaagtgctgggattataggcatgtgccaccgcgcctggcctgttttttgcttttaagagaaggaataacatggccagagtttgtttgtttattttttgagatgacgtctagctctgtcgcccaggctggagtgcagtggcgcgatctcggctcattgcaacctctgcctcccgggttcaagcgattctcctgtcccagcctcccaagcagctgggattactggcgcgtgccaccactcctggctaattgtcttattttttagtagagacgtggtttcgctatgttggccagtctggtcttgaactcctgacttcaagtgatccacccgccttggcctcccaaagtgttggaattacaggcgttacccaccgcgccccgcctgttttttgcttttaagagaaggaataaaatggcccgagtttattttaatcaaaccagtgtaaaaccctttctattctgcattatagctttatttaaaacttatttcatagaaatgtaagcagcatatgaaaacagtttccctgctccagtcccaacttcagatattcagatatgtgtcctgtgttcccttgaacacattttctcttttcttttctttctttcctttatttcttttctttttctttctttctttctttctttttctttctttcttttttctctttctttctctctctttctttctttctttctctttctttctttctttcctctctttctcgctttctttttttctttttttgagatggagtctggctctgtcaccacgctggagtgcagtggtgcgatctccgctcactgcaacctccgtctcctgggttcaagcagttctacctcagcctcccgagtagctcggattacaggcgtccgccaccaggcccagctattttttgcatttttagtagagacgggatttcactacgttggccacgatggtctggaactcctgacctcaggcgatctgcccaactcggcctcccaaaattctgggattacaggcgtgagccaccgcgcccagccgcacacattttctatttacagtcatacagaggagtttctccccccaagcccccattgggatcgcattttcctactattctgaaacttgctttttcagtttagagtacacatttggcggtcttgtattcctagaagatggacttcgatttaccggttgatggtcttctccactcttccgtggggtcagccccacttgtcccgtctccagtccaatgtcagtttgtgacttaatcttttacatcgtgtacagtctgagccctcagaccccctcacacatgcacaaattgagtttatgcacagaacagatagtacctgtacttaaatgtagactcactggggagcacgtttcactccataagaaaaggggtaaaaattgtgcacaccataattgcaatattttacaagaccggtgctttctttatctcaggggtgctggcagagagaggtgcatagaaaactctgggtgggttatttcctcctggagcattgcccctccgttgcctgcttacctgggcaagtgctggtctgcgtggatggcttattggcacttccgggaccctcatgtcgtaaggctgagacctaagaagctgattctgtccaggaggtgagatctgccccgataatcgtaggctgatggggtcgctgctctggcgtcatagttaatgttaacttccactcacactgtgttcgtctgggtgataaaagtgtgtggggcgcctctttgcaggcttcctgtcctcttgggagatgtctgcgctttgtgagtttgggaaacaactgggtacccagcgaggtgggcgcaggaggaggagctgccttcctccgggaggcggcgcagcgcggggatcttgcgggaccaggccagagaccaggaccgtcccccaaccgttcgcggccgcgtagccctgggcggcctgggcctgcccttccccgcgcagggctttccctcctgccggtcgctgccccgcacatggctctggtcgtactcccgctccactgccaccactgcccacgccctgcgtccccgtttgaccgcgtggagccggaccccgccttcctcgccccgcgctgccccaggcctgccccgcaccagcagctaagcgcaggtctctactgcaagcccgcagccccctcatcgctgggcctactggcgacccccggcgccatgcgcgtgaactgtgggcgacgggctcgcccttggcgggcggcgcgcgcggtttccagatgcagccgccgcgccggggcagctgacgccgcctccaaagacgcgccctgctggacggcgctgaccccacgcagccagcggagtctcctgggaacagcccaggcgccggtgccgacttcaacctctctgctcaggcctcttgagttgcgttaccagcttaccatgtattactaagactgacagaatataggaaatattcctgtctttctcagaaggaactttccagtaaagacagcgtttaatactgttaacgtctcaaaggaggcagtgaaaaatgtgctcagcttaagcatatgcaaagtcagtctatttccattttctacttatgcacattatattttgcattaaagtttgatcattttaaaagtggaaaattaatgggcagtggcagaaacagcttttttcccccaaaagtaatcttcttccaactagttttaaacattttactaacaattattgagtatcttctacattttaagtcattattttaaagttcttggttattgacatgttgtaaatttgaaaaataaagtttttcttaaaaaattgtgtgtgtatgtagattttatattctgcaaaattaaatgaagtgtgtgtgtgtgttattcagggccccgcaggaaacagctaacatacttaaagagtgcccgaagaaagatcatgagtggtctatacatgtgaatccatctcgggactggaagcatccagggccccaggcgctcaaagctgcactcatcaggcctgactgggatgatggcaaagcagtccctggagcccacgatgactgtggctttaggagttctgccagccaggagctctgaccttgaagctaatgctgattgtggcccagaaagatgggactaggaaataaatcccggagaaaatcctgttgcccacctggtttgctggccaaacctgacccccaaaccagaggacaggaggccagtggacgcaggaacccggagagctgggggagagggcatatgctgggggacatccaggtggaaagggccaggctttcctttaagcagctccatgggaggccgtttagcagagcaccgtcatattatgggtgcggagcgtcagggatgggaggagggaatcttagctgctgttcttctcattctcaagaactttatggcccaggtggggacccaaccaaaaatgagtaacaatacaacattgccgggtggaacgttccttccctactttctctggttgacattacttcttagaaaggttgggtgacaccctcttaggagcttgtgttttgtcccttaaatgttagaggtttgaaatactagtttctgaggaggcttttcaaaggttggggatacattagtacctgcagaatgagctaataaaatggattaatacatgccattctccatgataaatgtagagtacgtatcttgctatttttcatactacttacttaagactttgaatgagcttggctattttccgaccaaaaattagctatggttttcaaaagagctttgtaatgtttgagtgcttttccctggaatcagggatgtggatgtagggtgaatgatttctgtagaggatttctaaaatcggtttttcaggaagcatctttgtgatcaaaggtgcaattcaactccctggattcatgttaaataaattttgaaatgaaataccataggccggatgcaatggctcatgcctgtaatcccagcactttgggaggccagtctgaccaacatggaaaaactccgtctctactaaaaacacaaagtcagctgggcgtggtggcgcatgcctgtaatcccagctacttgggaggctgaggcaagagaatcgcttgaatctgggaggcggaggttgcggtgagccgagatagcgccattgtactccagcctgggcaacaagattgaaattccatctcaaaaaaagagaaatactgtaatacccacatgaccagcactgtattgctgtttaagaactggtgaccagcactgtattgcactttaagaattggggacagagctccctgtttggcctctcagatgggatgcgaccatggcagttgttgctgtctccccagaagaactttggtttttctttggagaacttgccctttcagcatcgtcagtcatgaggtctgggtggaggtcactcgggtgagcccggcatgtctcaagcttgttggcattacccatccccctacccccccagttatccagttaaaggacagacgtgactcagaaggcgggtggatcgcctgaggtcaggagttcgagaccagcctgaccaacatggagaaacctcgtctctactaaaaatacaaaaattagctgggtatggtggtgggtgcctgtaatcccagctacttgggaggctgaggcaggagaatcgcttgaacccaagaggtggaggttgcggtgagctgagattgtgccattgcactccagcctgaggaacagagcgagactccatcacaaaataaataaataaataaatgaacaaacaagagagtgactggaagcagccctccttggacacagtgggggtgacggtccataaccaatgcagccattttcatgagagttgggccaggaggttaccggtggagaacggacacaaagccaagcaaggacacagagaacctggatcccaggtgacaatatcaaggctcccagggagtgagctgtacctctgactacttcagttatgtgagcaaattcagtttatttactatgagttcattttcttttcacttgaaacaaagggattcataacagataaccagggtacagggcaggctggagcagtgattgctaattccactggctggcacaaggaaataccaaatatggagtctctttggaccgccggcatttgcattgcctgagatcatccagaaatgccgaatctcagaccatcgctgcacttcttctttagattggtccagaacagtacttctcaaatgaatgtgcatgcagatctccttgggatcttgctaaaaatgaagttccaagattctgcacttctagcaagttcccaagctaggctgatggatcatactcagagagcaaagccctggtctacacttacttcatagggaccattcttttttttttttttttttttcccccgagacggagtttcgctcttgctacccaggctggagtgcaatggtgcggtctcggctcaccacaacctccacctcccaggttcacgctattctcctgcctcagcctcctgagtagctgggattacaggtgcacgctgccaccacgcctagctaattttgtatttttagtagagatgaggtttctccatgttggtcaggctagtgttgaactcccaacctcaggtgatccgcccgcctcggcctcccaaagtgctgggactacaggcgtgagccaccgcgcccggccttagggaccattcttaacctaaaacacttgaagttcaggaacggacactgaagattcatttcagaaaagtcactagatgagaatcttgggtcatttctcctctgctccttacctcggcacagcctgtcctcctgactcaccaggatcctctttcttttctccaaagtcttatcaatgatctagttagatcgagactgacatgagctgacaacacatacaccctgttggcaggcggcaagcagcccccgcttcctcatgcatttccactggcctcactgccaaattcattattgctcatcatttcaagaatctgtctctggtttgcttgtctctcttactagattagagtcaggctcttgctgtaacacaacatactgaattagatactgagtttctaccttctataaacaaatgattctcaaagcaggttgcacactgcaatcagtggaagctttaaaaaaagactgaggcttggtctggccccttgagattctgacttaattggttttgcctgcagtcagggtgtttcagttttaaaatctctcgaagtgctgctaattgctgccataagtagatgaacatattgatatcacagagctacctgagaagtcagttacttatttaggtatttatttcatcaaatatttattgaacatctattatatgccagacactatacgttgtcttcaaagataagacacatacattccctgtcctaaaggagcctgtcatcctgtagaagggaaaggtgtatagacaaataattgtaatggtgtgttcaatgcaatgaaaagtataaaaactatcctttggcaaaaggcagagtggtggattccatgtaaaggggcatgggataaaggtaactatggctgacagtaactgagcattactatggaagaggaaggcctccagagagtgctgatgtgtgtgtgaggccttgaaggaggagagaacccaatgaagaaggtgagtgggagatgggatggggaaggtttttctgggttgaggttgggggatttggggatgagatggtggaggagctgagggggctcccttctgttttctttgtaaaatcagagtggggtgaaaacctgagagggcacagtgctgggtgttgggaggggcaggggcattggcaggggtgggcctgagaaaagcagtgagctctgttctgcaacattgaaggccctgataaaggtgagttcatagatcagcatccctcttcaggctcttgtgagcagaagctcccatgtaaacagagatgagactataggattcatccgaagctgtgctttcagcagcaggggtgaaggcagacaagagggccagagagtgttggtgagactggggttcgagagttccaatttccatatggaggaagtgagatctgaagagagcttgggaaaaagggagggagaagctgggatgacaggagaaagtatcagaggggaatttcagagacaagtaggtcagggtgaccaaaatgtgcaggatggactgctgagggggtgactgtcactggagttgtggagctctgggacgtggatgctgaaaccccccatggtggggaggggaagactgtgatcctctctgtacatggttcatgagatgcccaccagtgggtccacccagaggggaaggcaagtctagtgggagtggatttgaagaaatcattcaggagggggaggtaaaagagaacatagggacatggcactgaaatgcaaaacagagcaatggagaaacaggaaaatactgaggaaaaaggacagaggttcctagtgataaaaggaagccttgcacatccctctgaaagctggattttttttttttttttttttttagtttaggggtaaaagacctagagttctgaaactttgctagaggcaacagtggaactgttgctaccagctcaaggccaacctagacagcatctcttatcaactctgtaattgatagcaggctttacagataagtgatttcaacaatgcactcctgctgagaacttccagttagaattaattgatcttgatcactgggtgctaaacttcaaaaatcattattaaaaaatattctgcccaacagctccatattgacaccttgaggcaaagccccattcatctggcatcaattacagttctgctcagcctggagggatgcctgacttcccacacttgacattcctctcccctcccccagaccctagaaccttcccttatcctattactgagcattagggccaggttctctatctgacagcacaaggacaacacccaatgtcaagaggagcactatctgacccaagatataatggaacttcagaaggtggctggctttcccagaatttcccactagaggagggggatgcacctggggtgctggaaacatgcgtgcaggggtcctcctggagcctcctcctccagagaagtccagtgatctccaaaaacagggcacacagaccctgcaagatgcgccccctacttagagagagacagagccgcccgaagaccttcgaggacagaacccgagttcaccagtcaatgaacgccgggagcatcctcagaccctctgcagccaatgctggtgtgaaggtggagtcagttctttcttggaagtttattaccagcggcggctgcgacgtccatgtttgcaaaggaagggaggccttcctcttcccaagtggatcctacatcccgctccactcactccactcaggagaatcaaaaaagaggaagatagggctttctgccttccttttcccagcttttctttctgggctgtctcactcgggcttttgctgaaccatacaccccagaaccatccaagagcacaatggctctgtgctgtgggggagtctccaggtgcggttatatatagtgtgggccagcacacccactcccgttactcatgcagtttggccctggttgaatgcatgaacaatctcttccaggcactccctgttttcacttcccgctgcccacagggcccctcctctgtctgacccttgggggtcaacatcctttctagctaatccaccccacttcctccctcaggccgggctggaggctgttttttaacttcaggggttcctggagaagagcttcctctgccccttcacgatcacatcaaacacactggattcagggtcttgagatttgaagatttgaaagcagaaagatcagtgtgagtccaaactgtgggaaggaacatgatgaaagaggctggacttgaaatatccaccagcgaaggtgggcaaagggccgcctcaaacagggagaaatgggagcacctcgcattctgggttctctggacagcagcctgagcagctggagcaggggcgcaggggtgtctgaggggctctggcgagagttcgtgcaagcagcatactcaggcagggtgggcgctgcacaggtgatggagctggacacctcattttgagagccccctagctgggtctgtgacctggggccagccccaaccactcggaaggtctgtttcctccctgtaaaatgcaggtaattatattaaataactaactgcagagtcactgtaaggattggaaatatttgcacagtgcctgcctgaatgatggtattgggaggagacctgtgtacctgagttcctctgacctgatatttccacgggagctggggggcagctgatgaggaagaagcttctgccccaccagcgcaattctgtaccgagcaatgcagcctgagcctccgagtgaccaccctcctgagcagtcataattcactgggatagaaacatgaaacagttttttctcgaagtatggctttaaccatgctctcttaaatctccctgtcttgctctttaatgatcccttgggaagattttattactttttacttttatttgttaaaatctaactgtatttatttgaaaactaagaatgcaaaaagtcaattcgctgtaaaacctcaaacatagtttaaatcttatcccttttattcccttccctaaaggtttaaactgggaccctatctaccagccatggaagaggagggacaccctgccttacagatatcccttctcccctccctctctaaggcaggcttctgctgtgtgcgtgttagactggggtgtggaggaaggagagggaaagggacaagggtcattttacttacctggtagccgctgctgtgcttatctctggtgcttctctgcaggtcatttactggactaagatcccttatgtggcagggtccaactcatgggccacatgggatgctttagaaggtgctgggggccaccatactgccttcttcctgggagatgggctgcggctggccacttccacttccacctgcccatcctgggcggcaagcccacagctctgtgctcaggcgccctcacctggaaggcagttttctctgtggtgcactggcaagatgactagggcctgatcactttgcatggtgcccactctacaccaggaaaatccatgcactctggaaggtagtgagatggcccctactgcccctctcccagccctgccgcttcccctcaaattcttttttctttcaaatttgattcttagacatcaaatcagaaaccaaagttcaactctcctttattgcatttcctgaaacatctgtcttcctttttttttttttttttgagatggagtcttgctctgttgcccaggctggagtgcagtggcacaatctcggctcactgttaactttgcctcccaggttcaagtgattctcctgccttagcctcctgagtagctgggactacaggagcgcactaccacacccagctaatttttgtatttgtagtagagacaggcttcactgtcttggccaggctggtctctaactcctgagctcaagtgatccaaccacctttgcctcccaaggtgctgggattatagatgtaagccaccatgcccagcctgtcttccttttcagaaattatttaacctacaattatttattatgtaatttataagacattcaaggactaggtgtggtggctcacacctgtaatcccaacactttgggaagccaagatgggagaatcacctgaggtcaggagttcgagaccagcttggccaacatagtgaaacccctgtctccactaaagatatgaaaattagtctgtaatcccagctatttgagatgctgaggctggagaatcgcttgaacctaggaggcagaggttgcagtgagcagagatcgtgccactgcactccagcctgggcaacacagcaagactccgtctcaaaaaaaagacattcaaaattacacagtgtaatagcataccacccatcgtaagaaacaaacatcttctacagttggtcctttgtattcctttgtataatactacatccgaactgtgtttgtagtgattctttatttgcatgtgaaagaaacccaactctgactggactgataaaaagaaaggaagtattgattatgtaattaagccacagaaagggcaggtagacttttttcttcttttcaatttttttttgttttgttttgaacctttaatgataatatatatgcatactgttgggctatagaacaccatgtttggtttgtctttgggtcaagggttggggatgcgcatggcagcactagtgaacagggtctacatcaacaaagatacacgtggtcataaagcaagaaactggtgcgtggcgtggtcaactttcatttcctcatcactcagtagcatgttggggtccccacggctgatgtgggacagatgtccagactctgcgcattgcaaggtgtcctctaacacatccagctcgagcagcatgtggtgcatctcccttggaaatttctcataatgctcatacccctgaatcagccctttggaaacctcgagcaggtccagagtcttggctgcttccaggagtgctgcccactccaccatgggtagcatacacaagtgttgaactttgtagggttgatgtggacctcagtgtagtggggaggtggaaggggaagccacagggccccatcccctgcacatgtgagctcagctgattgtggggtgagcagtttcaagtcatcccattagctcttgccaggccagaagtggaacggtcctcttttctcttctgagcttctgttggcctgttggtttcattcctttcggctgtggatctccaatatactggatctattgggacagctctttccagcctcattgctagatagggcgtgtgccctccaccagctccagacagaaaaatgcaggggaagtcatatgcctatcgttgaatcaattattgtgtgtagggggactgggtattgggttaggctgagcctggttttttagagttaggtattttatttttagaaaaattgagagagaatgcttggtactacttagtatccactgtatagatccactcaattctttaaaatgctgcattgtattctgcttcagggctgtgctgttatttggccaatctctattaatggatattaaaggtgtctccatatggaatcaatctaggttcccatcaatgatgggttggatgaagaaaatgtggaacatgcacaccatagaatactatgcagccataaaaaagaacaaaatcatgtcctttatagcaacatggatgcagctggaggccattgtcctaagcagattaacacagaaacagaaagccaaatgtcacatgtccttacttataagtggaagctaaactttgggtatacatgggcataaagatgggaacaatagaccctggggactccaaaatggagaagggaggggagcaagggctgaaaagcttcctaatgggtactgtgttcactattcaggcgatgggttcaacagaagcccaaaccccagcgtcacacaatataccctcgtaacaaacctgcatgtgtaccctctgaatctaaaataaaaaaaaaatttaaataagaacttaaatggactggatgtggtggctcaccctgtaatcccggcactttgggaggctgaggcaggaggatcacttgaagccaggagtttgagaccagcctggccaacatggtgaaaccccatttctactaaaaatgcaaaaattaaccaggcttggtggcacatgcctgtcattccagctactcaggaagctgaagcaggagcatcacttgaacccgggaggcggaggttgcagtcagcagagatcaccccactgggtgacggagcaagactctgtatccaaaaaaggaaaaaagaaaagaaaataaattgtctctatttttttcctgatatgaacaatgctttccataacattcttttatttttgtaagcatgcgtccatattttttataagacaaatttccagaggtggaattgctgcctaatggtatgcgggtggatcacgaggtcaggagatcgagaccatcatggttaacatggtgaaacctcgtccctactaaaaatccaaaaaaaaaaaaaaaaaaaaaaaaagggaaagaaaattagccaagcgtggtggcgggcgcctatagtcccagctacttgggagcctgaggcagaagaatggcgtggacccgggaggcggagcttgcagtgagccgagattgcgccactgcactccagcctgggcgacagagcgagactgtcttaaaaaagaaataaaattgatattgccagattactttctagttgcactctaccagtagttcacaacagtgttggcttttccatactcccaccaacatcaacgtactggttaatttgtgctgtgtaacaagcttctgaaaacttagtggtttgaaaccaacaaccacttatttgcccaccattccattgatcagcaatttaggcagggcccagatgggatggctcacctatgttgaccatagtgccccagttttacagtcagctggaggtcagtgacctcgctcacatgtctggcagttggctggctgttaggtggagtgatggagacaactaggtcatttgtatttgtcagtcagcatgttgttggtggccaatggattcccaagaactggaagttgcaagttccattgcatcagtacttttcaagcctgcatttgggtaacatttgctaataaccctttggccaaagcaagccacttggtcaagctgggatccataagatggaaaataagctatacctcttcatgggacaaactgctaaatattgtgatcatttttgtaatctatcatagccaggttatatcattttgttaatcttggtcaatatgactggtaaaaaatgaaataatcttttcttaaattttactattatgattgatcattttttcccaatttgtgtccatcatttaaatttgttatataacttgagtgtctgtatttttgtttggggttttgttttgttttccactaaattgaaacaccatttttgacatatattaactttctcatatgtacttggatttgatttcttctgcatcctctatattttttctgtaccttatttgttaattcctgaaaatattttcaatatttctttttttttttttttttttttcagagaacagggtcttgttaagttggccaggctggccttgagctcctgggctcaagcaatcctcttgcctcagccttatgggtagctgggatcacaggtgctgccaccatgcctggctcctatttactattcttattttaaaatttctttttctggccaggcatggtggctcatgcctgtaatcccagcactttgggaggccaaggtgggtggatcacctgaggtcaggggtttcagaccagcctggccaacgtggtgaaatcctgtctctaccaaaaatacaaaaattaactgggcgtagtggcagacacctggtcacagctacttgggaggctgaggcaggagagttgcttgaacctgggaggtggaggttgcagtgagctgagattgcaccactgcactccagcctgggagacagagcaagactctgtacccctctccctaaatttatttttctattaattaacttttattattctatttaaagttaaaatcatacttatccagtttgaaaagaattggaatttaaattggaatgatagtacatttgtagcttactttaggtaaaatatatatttttacgattcattcccatctcatatttcctagcctggtctagagattcaatgcaatccctattagaatgccaattgctttttcttgcagaaaagacagtttgatcctaaaattcatatagaaatacaagggtcctcaaatagccaacacaatcttgaaaaaaaaagttggaggatttctatttcctgagttcaaaacttaatacaaagccaccgtctgatacttacaactcaacaataaaaggacaaataactcagtttaaaaatgggcaaagattttgaatagactattttttatactgtctttgtctggtttttggatcagggtaatattagtttcataaaatgaattgggaagtcttttctattttttggaggagattgtgtagaattggtgttacttccttttggattgtttgagagaattttcctgtgaagccatctgtgcctggagatttcctttttgggaggtttttaaattatagattcaatttcttcaacagtcataagattattcaaataatctcttttatattgaatggtattttgtgattttcaagtaagtggtctatttgttctaagttagtaaatttatgattatagaattgttcatagtattcacttactatcctgttgatatctgcagtgtctgcagtgatattctgtttcattcctgatatagtaattggtatcttctctctttctttgtcagtcttgctagaagtttgtaacttttatagagtttttcaaggacccagtttttgcttcattggttttctctattatttttctggtttcaattttattgatttcttgtttttccctgcccccaccacctttccttccttccttccttccttccttccttccttccttccttccttccttccttccttccttccttccttttttccttcctttttcttgctctgtcacccaggctggagtgcagtggcacaatcatggctcattgcaaccttgatctcctgggctcaagggattctcccacctcagcctcccaagtagctaggactacaggcaaatacctaaaaaaaaaaatcattctaccataaagactcacgcacacaaatgttcattatgcactattcacaatagcaaatacctggaatcaacttaaatgcccatcagtgacagattggataaagaaaacttggtacatatacaacagggaatgctatgcagccataaaaaagaatgagatcatgtgtttttgtaggaacatgaatggagctggaggctattatcctcagcaaactaatgtggggacagaaaacaaaatactgcatattctcacttaaaagctaaataatgagaattcacgaacacaaagaaagaaacaacagacactgaggtttccttcagggtggagggtgaaaggtgggagaggagcagaaaagataactatagggcttaatacctgtgtgatgaaataatctgtacaacaaacccctgtgacatgagtttacctgtgtaacaaacctgcacatgtacccctgaacctaaaatgaaaaaaattagcttgtgactttgctagctcacttattagttctaatagccttattggtagattatttgagattttctttgtagacccatatgtcatttgtgaataaagacagttttaattcatctttccacatttatatgccccctttttttcctcacgttactgagctggtgagggctttctgtacagtctcaaaaaggagaaacacccaagagtcttccttctttttctggtgacatgactcgttggtaagtcatctcccaagaggatgaaagtacatttttaattactagactctgcctccatgacactcacctttggaggcaatcaaaccaccttagtttgagaagggagtagagtgaactttggtagtgtgagaactgaaaaagtgagtgactcaacacttgtagtggctcatctcccagaatgaatgcccagtgattatgggtccctgatggacttaaacatgtctttggggaagctgggctcagagaagaatggacattcattgaactgagaggatagggctcttaggctacaacatggcaaatatggtgagaaagtctttgcatcatgtgtggctctgaggaaatggaggcatacaggggcaacatctaacttcagaagtcctggccaaccagtgctgggagatgggcctttgctttggacagagggaagactgtttgatggcagtcctgggtggcagagatatggcaatgccagtggcaatggtttgagagacaccagggctgttggagtcttggatccacttggcagtgaatgtttgagggatctttgtttggactgcatgtgactgaaattcttgaatgatccagaagaggataagagagagcctctaggagggtgaaaatgtacttcctgctagtcacacatttgggagttcaaatcagttttaattcaattgtgggaaatgaaataaataaaaagcagaatcattaaatgttttgagaaggaaacgatggacatgtcaagtgcatggtgtgccactgtatactggtgtgtactattctcacaggtcaagggaagaaaaggtgtgcacaagcatggaggctggagcaggtaaagcccatactggaaggacaagttcattggcctgttcagagtggaggagaacccaaggctcttgggccagggtggggggaacttgaacaatgcttctgcaaagaacttttcctacaatgagttaaaaacaattccaagatctggaaatatttccacttctttttcttatcagactaaaatccattttagtaggtatttcttgaagttattaagggaatagacttattgtttaaagagagggtggctgctccatttaccagggagaacctatttaagaacccacagtcttgggctctttccaaggcattgtaaatttactttacagtgtctgatttactttaaagcttcttgttattgcagtttaaaacaaaatttatcctgcacacatcctgtttaaaacagaattttctcctctgttaggcagagataaagaatgcaagaacgtgtgcttttatagcattgattgcaccttgatattaggtgaaaatgggccctgatgctttaaattatcaggttgatggctgaagggaaaccaaatcaatatgcattttaaaatgtaatttcattatttcttaatttagttagggtgatagttctaacaaatctaaatggaagaaaaattcattttgtctccttttcctcttgctccttcactttcttcacctttgtgttcctctttagaagtgtgacatgtacacatttttatatatagcattatggtactcctccaacatttagatcctattttcttttggaagacaacagtatgctccccaggctgcgtgacatgctggtggatcgcacctgtccctgtctggcacagaatcactagtagctagagcagctctcccttgctgagcagcccggggtaactgggaccttcttgtgcagcacttttatttccttttgccaactcacagcggatttgcctcttgcataagtgagcaaagcccccagaagtgttgtatgtgctaccccatgtcatgcaaagatggaggtagcaggctccatgcactgtgcatgcctttctgtctttgatagggctcaggtatttggcccacatctttatagtttcaaagactgccagtggaacaggagtcatgcttttcagcttatgacctctgaaagaaacacatctcatatatgcttgctttggagattcagctagttgacaatggttgatattgacaaaaaagtcaaaaatctacaagaataatattttactgctagtctcaaggaattttgacacagataggccttgactatggcccactgaagtgtcatgagaactaggtttgcttgctttttaggtaatcccctgtcatttctggataatctcgaagaaaatgccaatttcttgctgaggatgagcagccttcttggtctgaaaatagtgcttctgcctcagggcaacttccttcacgtgccctcacagatgcccccagtgctttatgctgccttctcctaagctcatcagcatcctgcccttatctgggaatcctctgtgactttgacctgggaaggtccttccactgccctgggcatcacatccactggtcatcatatccactggacatcacacacactggtcagttgctagggaaggttctggttgtagacctcggaactggccttgttttatggtaactctgtgacttcaggatagagactacgtgtcccatattggttccctttaaaacagtcaaccagaattgtgtcacttgctgtttcaaaacttgtgtttcttgtagaacctaggcctcagttgtggtttgaatgcttctatattcagatgacttttcgggcaaaaagattggcacttcattgatgactggtcaattcttcctagctagaccaccagtcctgctcatcgtctaggctctctttgactcaattcccccatcaattgtcaatcaagctctcttcttcccctcttctctatctatctctctaccccagctttggtgttctacaatatttaaatgttctaatttacagtttttgtgacactttggttccatgtaacagaaaatccaactgtaatttgcttaggtaaccatgatctttttaactcacacgactaaaatgtttacaagtaagacatatttcaagcatggctggatctagggactcaacaatattctcagaaccaaatttttctcctttcctttttataaattttgcctctggttccttggaggtgaatccatttttagataccacatggaggcaagatgactggagaagctctaatatccacatggcaagaggtacctacatggcgtggtccccattccattaatggcatcttaagttggctgcttcttgtgcaaaacccagtctctgttgggtaaatactgtcagttcaagatttcctccttggttttctccccaggggctctggaagtcatggtgcatgggggcggggaagtggcttctttcttggtgtcttcatgggcttccatccctgctcagtcttctgatgaaacatttgcttccccttctgctctccaagtaggtatctgttgtttttgtcccaacttcaaggtgtcctcattcagctacttccatctttctgtggcacaagaatttttggtcaccctgctgtttcctgtggggactgcctgagcctttaaaaaaaaaaaaacactggctaggggcagtggctcatgcctgtaattccagaattttgggaggccgaggcaggcagatcacctgaggtcaggagttccagaccagcctggccaacatggcaaaaccctgtctctactaaaaatacaaaaattagctgggcatggagggcacacctgtaatcccagctactcaggaggctgaggcaggagaatcacttgaacccagaaggcggaggttgcagtgagccaggattgtgcactgcactccagcctgggtgagaagaaacaaactgcgtctcaaaaaaagaaaaaaacaacaacaaaaaaaacctaaacatacttgctatcatttctagcctaacacttcaaatataaattgagtctcagattagcttactcacatatttccagccctgtgttggtgtttctaactccttctcacaagggttttgacaaggttgagcaggggccaaggagtaagctttgatcataagtattgaaaaccttctcctttctctagctggttagatttttaaaaaaatcacctattgcttaaaaaaagagctgcattcctttctgcgccctctctaactctgtaaagcatattcgttctgtgcttgagtctcctaggctttgctcttgctggtcacaggcaaatatctggaattttaatacacacagcaaacagcaacagttacaaaacattttctttcttaagtttctctgaatccatggctttcaagactgttctctgtgttttaaacttgaaagagtactgtgagagatggagaaaccaagaattggaccctccattgactcagaggctcctgctgagatgttaggaagaacaaacactgggaaatggggcagggtgggaaagggtgcggtggaggacgtgtatttgtttaagtggtccaaattttaacttatttctattatgcctaacagctcttgtatcctgaaatcatatataataaaatgctgtaatgaccatcacaggatgatcttacaaaggacataactagtagagtttaggagcattggtggaaaggagggaggaaatatacatattctcccaacatctcaggttggatcagggtgtagtgagtgttctgtctgggatgtgatatgctgagatgacaatgacagtatttgtgaagctcaagcttcatggtgttagttctgaacaggaagaaggaaggaggtgctacagcagtggttccagactctgggtaaatcaccctgggggtacttaacaaaaatacactgggcctcctgagccagaatctctggggttggtgataagcttccagggttttttcttttttttttgagacagagcctcactggcgcaagcttggctcactgcaacctccagctcccaggttcaggtgattatcctgcctcagcctcccgaacagctggaattacaggcatgcgctaccacacccgggtaatttttgtatttttattagacacggggtttcaccatgttggccaggctggcctcaaactcctgacctcaagtgatccaccagccttggcctcccaaagtgctgagattattggtgtgagccactgcgcctggccatagggaattttattgtagccagcctagtacaagtcaagtatgtttggggaacactgtgttagatcagggaagaatcaacaaaatataaaatggcagcatgatcccctggtagcctggttttaagagacttcattgtcaagtgctctgacatgaatagtgctagacaagaaagaatactgagctgaaagaattttaatgatttatatgtggaggagaagatgttttctttgtaaagttgtcaaagctaccatatttggaactctttagaaatggttggccgataagagaccctgatgtgcaaaacaaaccattggggaaagatgctaaactgtttttcttctattgattgaacctaattaaaatgatgtcttaacattaagctatattccacttgtcaagctatgaataattttatctgcctttctctcttctaaccaggctaacattaagagaggccagtattgaaggctgcatcattaaaaatcctgtccaggtaggagaagtctctggagaaagccctatacatcataagactgctctgtttctgtgtagcaggatagaacaaggaaagccttgtcttcattatttcccacggattttaggacatcttttgcagctgcattcagatactcacgaagtaagcctttgattaggaaggcggagaaacagagatgcttaaatggaaccgggcaaactaaagtgagcacatagcttagtttgtattccctttccttttgttctctctgatagtgtttattctttcttatctgaaagcattttattgtctacttaaaaaatcttaggtataaatttatagagcttggattttaggatttatataatctctgctttgctgaacattcaggtgcttttaacaactgaaatctttcaagttgtatgccaggtttttgtgtatgtaaggttttctatggaagaagattcaaatatttccttagattttcaaaggagtctttggcttcaagatgataaagaactaagcagaagtcttgatgctaagtcaacagttctctttgggaatttgacagtgctaatcggtagtttctatagattacaagatgccccacacctgaacaatagaaaaaaatctaaggtcatcaaatgagacccttgaggggcggtcctccttgcatctggtctgagggctgtagcaactggttcctttctcttgataatgcttttcttgtttgttttgaaatgtgggttgctagagagattaactgaactaggaggggttctcagagatgtggcagtgcagagagggctcatgacttagataactctttagcaaagtgctgtactgggccaaacttgacatcacctggtgcagtcttgtgcaggaggcatgcacctgagctctgatgaacaatcctctgtaaaactctattcttcttgctttgggtcttcttgcaaccccagggagcctgctcagagagtctgtcatggtcatggcataataattgattttaaactgggcacagtagtgtgcgcctatagtcccagctatttaggaggccaaggtgagaggattgcttgagcccaggagtttgagtccagcctgggcagcatatcgagatcttatgtctaaaacaacaaaaaaaattaactttataaaaaaactatatattttatcctctgtggctaaaaatttattcagaataccccctctatcttactccttaatatatttgaatgtcaatagctatttcaagaggaagagagggcaaaagtaaacattcttgaacattaatatatctgaagctttcctgtagtaacattccatccacagacaagtctgtaaagtaaggccatgccagtttatagatgagaaaaatgagcgctcctctagcaattctgcctcagcaatggtttctctaatcctttccactctgctgtcttctctgacctaaagcaaacccatttcttaggatgaccttcttccttttaagtgaatgaacaatttctgtcctcttcatggccagctataaagaaaaaacttgccttgactttctgtcttcagactctcatttcctttctctcctcatcattgcttctgaaacaccccagaaactcctacttgtcaacttatcctaaattccagagaactgatgtgagttggaaaggaacggtgggttcgagaagattgcagaaggctgggaacaattaaaaggatggaagtggcagccagggtacaaactgggtcaaaccaagaggggcccgtccctgtgagagggtcaaggtttcacagaagcacaggtgagtgcagaggtgcaagctgtgagttgttgcaagaaaagcaaatgagcatgtgtagaaggcaaatgcactggaaacgttgtctctgttgaatgtgcttatgatcagtgagagcctgcatggctcttggaatgctggaaacagttcccctgacagctgcctggtagtttttgttattcaaattgcacatcaaattgttctttgactggtctcatggattttattcctacacaggtgcaggctaatatgcagccacagactcgaagggaccctgcatgcaatttctggagctctttctctcacatcatcctttctgccactctgctcacaaattctagttgcctcagtctcccaaactccaacctctgtttcctgagctcagcagaactgctgcactatgcttgcagtctcctttcacaagtctttatagtcttatacactagctgatatattgtgtattatttgtttattttctgatattgtacagctatagtaggtcctcaatgtgttaaattaatacacgaatgcatcaacagaagggttcggttagttgctgtttttactattttatttcagtttagttttatttcattttactattttatttattttattgagacaagatctcactctgtcacccaggctggagcgcagtggcaccatcaaggctcactgcaccttcaacctcccaagctcagcctcctgagtagctaggaccacagatgtgccaccatgcccagctaactttttatattatttgaagagatgggatttcaccatgttgcccaggctggtctcaaactcctgggctccagtgagcctccctccttggcctgacaaagtgctggtattataggtgtgagcccccactcctggctttcagctggtttttattcaggttgtttggaggaggttgagtatggtgcaacctcagatgaagactccaaattctctttccctcaccctcttttctgggacccacagtccacccacatactattgatcttctgaatgccaaaccagactaattatcgtcttccttctattcccaagtctgccttccttagatattccttgtctggaaaaataatactatatacatgttttactttattcatggtaaattacctgctgtcctgaacttactctttcaaccacaacattaattgaaaattttttgcatctcctatgtgccagccactgtcctaggagctgggctaataaaagcactgccctctaagagcttacatttcagacagggagacacgcaggcatgcaggtactactacactgtaataaatcacaacagaggcagaaaacaagatgctcggagacttaacaggaaggtaaggtctccttgtttcgcccatgtctctgactctccccaaccactatctctagacttcgagaagtcccattcattctctgttattcagcacatatatatatctcttgggcatagttcaaggtccctggctttatgttgctccagtgtgtttatacagctaccataacacttactgcttgtaaggctaggatcatggttttttgtgcctctgtagtcaaatcaaaagcatagctcctagcacatcataggtgccgaaagaatcaagaggccaatgtgacatgccattttccttatgcagggcccaaatctcatgcccctgtatagatattttgtagggtttggtgacaggagtactggtggtggttatatactgtacggtatcactagagcatgggattttttttccataggttattggggtacaggtggtattcggttacaagagtaagttctttagtggtgctttgtgagattttggtgcacccatcaccagagcagtatacactgcaccctatttgtagtattttatcttttgcccccctctcatccttccccccaagtccccaaagtccatcgtgtcattcttatgtctttgagtcctcatagcttagctcccacatatcagtgagaatatacgatgtttggttttccattcctgagttgcttcacctagaataatagtctccagtctgggcacgatggctcacgcctgtaatcccagcactttggaaggtcaaggtgggtggatcacctgaggtcaggagttcaagaccagtctggccaacatggtgaaatcccatctctactaaaaatacaaaaaaaaccaaacaaacccaaacaacaacaacaacaaaaaaattagctgggtgcggtggtacatgcctgtaatcccagctactcaggaagctgaggtaggagaatcacttgaacctaggaggcagaggttgcagtgagtcaaaattgtgccactgtactccagcctgggcaacctagtgagactgtgtctcaaaaaaaagaaaagaaaagaaaaaagaataataatcttcagtctcatccaggtcactggaaatgccattagttcatttctttttatggctgagtagtattccatcatatatatatacacatatgcgtatatatatacacacatatgtgtgtatatatatacatgtatatatatacacacatatgtgtgtatatatatacgtatatatacacacgtatgtatatatacgtatatacatatatacatacatatatatacatacatatgtgtgtatatatatacgtatatatacttacatatgtgtgtatacatatacgtatatatacacacacatatgtgtgtatatatatacatgtatatatatacacacatatgtgtgtgtatatatatacatgtatatatacagatatatatatacatgcatatgtgtatgtgtgtatatatatacacatatgtgtacatatgtgtatatatgtatatatctcacagtttctttatccactcgttgattgatgggtatttaggttgtttccatgattttgcaattgcaaattgtgctgctataaacatgagtgtgcaatgacttcttttcttctaggtagatacccaatagtgggattgctggatccagtggtagttctacttttagtcctttaaggaatctccacactgttttccataatggctgtactagtttacattcccatcagcagtgtaaaagtgttccctgatagctgcatctatgccaacatctactgttttttgattttttgattatggccattcttgcaggggtaaggtggtattgcattgtggttttgatttgcgtttccctggtcattcatgatattgagcatttttcatatgcttgttggccatttgtatatcttcttttgaaaattgtctattcatgtccttagcccactttttgatgggattgtttgtttgtttttcttactgatttgtttgagttcattgcagattctggatattagtcctttgtcagatgtataaattatgaagatttttctcccagtctgtgggttgtctgtttattctgctgactgttccttttgccgtgcaaaggttcgttagtttaattaagtcccaactatttatctttgtttttattgcatttgcttttgggttcttggtcatgaaatccttgcctaagccaatgtctacagggtttttccaatgttatcttctagaatttttatagtttcaggccttagatttaagtctttgatccatcttgaattgatttttgtttaagatgagagatgagaatccagtttcattctccttcatgtgattagccaattatcccagcaccatttgttgaatggggtgtcctttcccccactttatgtttctgtttgctttgtcgaagatcggttggttgcattgcaagtatttgggtttatttctgtgttctcttttctgttccattggtctaggtgcctattttttataccagtaccatgctgttttggtgactatggccttatagtatagtttgaagtcgagtaatgtgatgtctccagaattgttctttttgcttagtcttgctttggctatgtggggtcttttttggttccatatgaattttagaattgttttttctaattctgtgaagaatgttggtggtattttgatagagattgcattgaatttgtagattgcttttcgcagtatggtcattttcacaatattgattctacccatccatgagcatgggatgtgtttccatttgtttgtgtcatctatgatttctttcagcagtgttttgtagttttccttgtagaggtctttcacctccttggttaggtatattactaagtatttaaattatttttgcagctattctaaaagggattgagttcttgatttgattctcagcttggttgctgttggtgtatagcaaggctactgatttgtgtacattaattttatatcctgaaactttgctgaattcatttaccagttctgggagctttttggatgagtctttagggttttctaggtatacgatcatatcatcagtaaacaacaaaagtttgacttcctctttaccaatttggatgcccttgatttttttcttttgtctcattgctctggctgggacttccggtactatgttagatagaagtggtgagagtgggcgtccttgtcttatgccagttctcagggagaatgctttcaacttttcccgtttcagtataacgttggctgtgggtttgtcatagattgcttttattacattgaggtatgtctcttgtatgccgattttgctgagagttttaataataaagggaagctgtattttgtcgaatgctttttcttcatctattgagatgactgtgtgtttttgtttttaattctgtttatgttgtgtatcacattttttgacttgcagatgttaaaccattcctgcacccctcggatgaaacccacttgatcatggcggactacctttttgatgtgctgttggatttggttagcaagtattttgttgaggatttttgcatctatattctacaaggatattggtctgtcgttttcttttttgattatgtctttccttggttttggtattagggtgatattggcttcatagaatgatttagggaggagtccctcttcattccatggaatagtgtcaataggatttgtaacaattcttctttgaatgtctgatagaattcagctatgaattcgtctggtcctggactctttttttgttggcaatttttaaattaccatttcaatcttattgcttcttatcggtctgtttagagtttctatatcttcctggtttaatctaggagggttgtatatttccaggaatttatccatctcctctacgttttctagtttgtgtggggaaaggtgttcgtagtagccttgaataaacttttgtacttctgtgttatcaatagtaatagttctcatttcatttctaattgagcttatttggatcttctctcttcttttctcgaaaattgtctattttcttggttaatctcgctaatgttctatcaattttatttatctttcaaagaaccaaccttttgtttcatttatcttttgtaatttttttggtttcagtttcacttaattctgctctgatcttttttatttatttttcttcttctgggtttgggtttggtttgttcttgtttgttcagttctgtgaggtgtgaccttagattgtttatttgtgctctttcagattttttgacataggtatttaatgctatgaactttcctcttagcaccgcttttgctgaatcccagaggttttgataggttgtgtcgctattatcagtcagtccaaataatttttaaattttcaccttgatttcattgttgacccaacaataattcaggagcaggttatttaatttgcatgtatttgcatggttttgacggctccttttggagttaatttccagttttattccactgtggtctgagagaatactcaatataatttcggttttcttaaatttactgacatttgttttgtgccttatcatatggtctttcttggagaattttccatgtggtgatgggtagtagcagatctttttgtaaatgtcctttataaaaggttaaaaatgttcccttgtaaccccagtttgcagataatttatatcaggaatggatgataatttttgccaaagttttaaattttcagtatctgttgagatggccagtttttaaaagtttgatattattatgaattaatttatttgcaaatcaacattagttgattttcaaatgttaagccagccttgtctaactaggctaaaccatacttggtcatgatgtcatttaatatgttgttgaattcaatttgctaaaattttgtttggaatatttgcattcatgttcataggggatattggtctgtagttttacttttgtgtaaaatctttttctgattttggtattagggcaatactagcttcatataatatgcagtgaaaaattcactcttctttcatttttggaggaatttgtgtagaatttgtataattcctccttaaattttttggtagaattcaccagtgaagctatttggttctgtagtttttttgtgggaaggttttaaaagtataatttcaatttctattaaacatttagggctttgcaggcaatttatttcttcttgagtgagctttgctaatttgtgtctttcaagaaatttatcaattttatctaaattgtcaaatgtatcagcataaagtagtttctaatgttttattatctttttagtagaacctgtagtatcacccctctcatttctggtattggtaatttgtgtcttctttttctttctaatcagtttggctagatgtttatcaattatattgatcttaaagaaccagcttttgatttcattgtttttttctactgtttttctatttttctattttacagctttttacttattttttgttatttattttcgtgagcttactttaggtttcattttctcttctctttctagtttcttaaggtaaaggctaaaattgagttgggaactatcttcttttctaatataagcattaagtgctataaattttcttctaagtactgatttaatggtcttttgacaaattctgatgggatatatttttattcagttaaaatactcataaatttttgttttgagcatttagtaccataaattttcttctaagtactgatttaatggtcttttgacaaattatgatataatatattgttatttttattcagttaaaatactcataaagttttgttttgatttttttggttcatgggatatttagaaatgtattatataatttccaaatatttggagaatattccaaaggtctttctgtcattgacagaggggcattcaaatctctgactacaactgggaatttatctatttctccttgatgttactgtagtgcctgctaatccatggttttactttctgtggtttcatttatccactatatagtacaataagatattgagaaagacagagagagagagagagagagagggtatactcacaaaactcttattacagaatgttgttataattgttctattttattattagttattgttaatctcttactgtgcttcatttacaaattaaactttatcgtaggtatatatacacaggaaaaatcatactacatatagtttggtactatctgtggttttaggcatccgctagggttcttagaatgtgttctccatggataaagagggactactgtctatcagtttggttgcatttgtttgtttgtttgttttgagatggggtctcactctgtcacccaggctagagtgcagtggcgtgatcttggctcactgcaacctctgcctcctgggctcaagcagttctcctgcctcagcctcctatgtacctgggacttcaggtgtgcaccaccatgcttggctaactttttgtagagacaagctttcgccatgttgcctaggctggtctcaaattcctggactcaaggaatctgcccaccttggcctcccaaagtactgggattacaggtgtaagccaccttgcccagcctgtatatatcatctatttttgattcatctattttgaagcaatctgttaatacatgcatattcatttagaatttttatgtacccttgatgaataaattctttattattatgaaatgacattcttcagtcctcataatattttttcctctgaaatctactttttctgatattcatataagccttttcagatttatttttattattgttagcatgatatctacatttccatcttttcattttttaacctgtttgtatttaaagtgtatatataaactcactttatatttatatatttataaatatatatacactttatatatatttataaacataaagtgtatatatatttttatatacactttatatatatttataaacttataaagtgtatatatatttttatatacactttatatataaatatatatacacatatatttatatatatgtgtatatataaatatatatattatatatatataaaatatatatatttgtatatataaaaatatatattgtatatataaaatatatatatttgtatatataaatatatataatttgtatatataaaatatatatatttatgtatatataaatatatatttgtatatatatttatatatatataaagtgtatatatatacactttatatttaaagtgtgttttctataggcagcatatagttgggcctggctttcatattcaatctgacaacctctgtgttttaattagtgtatttattcaatttacatttaatgggattatggtaaggttaggtatggctgtaacatcttcttatttgttttcagtttgctttatttattattctttttctttctccttttttcctgttttttttgttttagttaatttgtttctatgattcagttttttctccttgtgggttcttagttataactcattgttctagtatgtaatggttgctttattgtttatggtatacatctttaattatcacaaactaccttcaagtgatatatcacttcatgtatagtatactttcatttctctgcgcttggtctttatggtgttgttgtcatgtactttacttttatgtgttataaacccaataatacattgttatttctgtttaaacaagcacatatcttttaaggagacttaagtaataagaaaaaatttcttatatatttactcatgtagatatatttttggtggtcttcattcctttgtgtagatccagatttccatctggtatcatttttcttctgcccaaggatgttatttggcatttcttgtagtgcagacatttcttctggtggtggtaaattattctagcttttatatgtctaaaaatgtctccacttcaccttcatttataaaaaatattttttgctgggtactgaatactgagtgacagtcacctgccccccagtacttcaatgatgctgctccaatgtctcttgcttgcctgcaatctttggtgaaaaatctgatgtcagccttatctttgtttctctggatgtaatacgggtatattttctggctgtcagatttttctctttgtcattgttttttagtaacttatgctgtaatttggggtagttattttcatgtttatttttcttggtgttcattgagcttagatctgtaggtttatagcttcactaagtttggaaatttttcagccattatttctaaaaatatatttttcagtctttcttcttcagggactccagttactcatgtattaggccactgaaactatcccacatatcacttatgctttttcattttttggaattttattttctgcgtgttttattttgggtagttttcattgccacacttttaatttcactgatctcgcctttcttctacaatgtccaatctgcctttttcttcctccagtctatttttcacctcagacattatagttttcatatctagaagtttaggttaagccacggtggctcacgcctataatcccagcactttgggaggccgaggcaggtggatcacctgaggccaggagtttgataccagccgggccaacatggcaaaaccatgtctctactaaaaatacaaaaattggtcgggcgtggtggcgggcacctgtaatcccagctacacaggaggctgaggcaggagaatcacttgaacccgagaggcagaggttgcagtgagccgagatctcaccattgcactccagccttggacgacaagagtgaaactccgtctcaaaaaaaaaaagaagtttaattttaattttcatctttgtaatattcttgggccaggcacagtggctcatgcctgtaatttcagcattttgtgaggctgaagtgggaggattgtttgaggtcaggagttcaagatcagcctgaaaaacatagcaagaccctgtctctacaaaaatttttaaaaactaggtgggcatagtggtatgtgcctgtagtattagctactctggaggctaacagagaagagtcacttgagcccaggagtttgaggtaacagtgagctatgatcaggccagtgcactccagcctgggtgacagagtgagacactatttctaatatataattagatatctgtaatatctaatatatatatatatttataaacaaataatgtatatatatttcctcaatatttctacttaacttcagaggttaaacaatatggaaaacaattctaataatggctttaacatctactttgttaattctaattttatcagttctggattggttttgattgattaataaatgtcttcatttgggtcatattttcttgcctctttgaatgcctggtaatcttttattggatgccagacttgtaaattttgccttgttggtgctgggtgttttcgtatttctatacagcttgaactttgttctgtgatgtggttatgttccttaaaaacagtttgatccttttgggtcttacttttatgatgtgttaggtcagtccagtgcaatattcagtttacccttgtataaccgaggtaagacctctactcaatactctgtgaattatgattttgtttttactctggctagtgggaacacacactgttcctcatcctatgtgagcatgctgttccttcagatacttttgggtgagtttttccataacctcaactatttttcttagatgaatccgttgatctgcattctactgaaaaatccagatggaccatgtcactggcaactctcttttctcttgtcctctgtcctgtgaatttttgctgccttggtctctgtggaatcaaggacatggaacaggatggagaacttagagaagctgttggattccctgagtcctctttcttgtcacttatagccatactagtacattctttttttctccccagagacagggtctcactgtgtgcccaggctggagtgcaatgtcatgatcgtaactcactgcaacctcaaaatctcgggctcaagtgatcctcctgcctcagcctcctaacgtactggcatgaaccaccatgctcagccactagtacattcttataagagttttgttgccttgtttgcaatagcaaaaagacctttaaataatttatatagaaatcattagaatacactataatagattattgtacaactattacaagtaatgtgctgatatggaaaattctatattaaatgaaaaaagtaaagtattttatacttattatatacaattgtttgtattgttaattaaaaatcatctgtgtatgtgtatgtatatgtatatgcatatatgtgtgtataaatttgcatagacacaagaaatttaacagttatcttagcagacatccagtgttttgtgtgtgcagtttgtcttttcattgtttgaattttcttttggatatttttgttccacagtcatgtcatctgtgagtaatgatagttttatattttcttctctaatcctcatgccttttatttctttcacattgttgataacagtgtcttgttcccaatctcaaagggaaaatcttcagcatttgacctagaagtctggtgctttctgtagaattgttgtttatataaatacctttctcatattaagttagtttcattctatagtttttattttaattttaaaattgtttaagattttaaataattataaatgtaaatttgtaaatattagatattttaaattttaaattatgtaatttgttgattagattgacattagatttaattgggatctttttctgaatattttgaagtgatttgcatttttttcaccttttgtcctgtaaatgtagttattatactgattgatttaaattaactttgcattcctgggataaatctaattggtttgtccacgatgagataccatctcacgtcagtcagaacggtgattattaaaaagccaagaaacaacagatgcaggtgaggtcgtggagaaacaggaacacgtttacacagttggtgtgaatgtaaattagttcaaccattgtggaagacagcatggcgattcctcaaggatctagaaccagaaatatcacttgacccagcaatcccattactggatatatacccaaaggaatataaatcattctactatgaagacacatgcacatgtatgtttattgcagcactatttacaatagtaaagtcatggacccaacccaaatgcccatcaatgatagactggataaagaaaatgtagtacatatacaccacggagtactatgcagccataaaagggaatgagtcatgtcctttgcagggacttggatgctgctggaaaccatcatcctcagcaaactaacatgggaacagaaaaccaaacaccacatgttctcactcgtaagtgggagctgaacaatgagaccacatggacacagggaggggaacaacgcacactgggaccgtggggggtttgggggcgaggggagggaacttagaggacaggtcaataggtgcagcaaaccaccatgacacacgtagacctatgtaacaaacctacacgtcctgcacatgtgtcccggaacttaaagtaaaataaaatcaaagaaaaagaaaagaaaaaaagaaaaaaagaaaagaaaagcatatacatagcttgaaaaaaaaaaaaaaggaaagaaaatgtaatcccagcatttttggaggctaaggcgggcggatcacctaaggtcaggagttcgagaccagccttgccaacatggtgaaaccctgtctctactaaaaatacaaaaattagccaggcatggtggcaggtgcctgtaatcccagctacttgggaggctgaggcaggagaattgcttgaacccgggaggtggaggttgcagtgagctgagattgcaccattgcactccagcctggacaacaagagtgagactctgtctcaaaaagaaagaaagaaagaaagaaaagtaacatacttaaaaaaaaaagtcttaaaagttctccatcaggaactaggaatactaaaatatatttttattagttacaaacttagtaagatattaaaataagagggatagcattgaaagttgagagaaaagttgggtgtattttaatgccgtgctgtcctgaaatgtcagaactatgtactagcccttcctgtaagggtaagagtcctagcaaagaattcagagtaaggtttttgtttgtttgtttgtttgttttaccaaactgttccaatatagtcctagaatgctgtaaaagccatgttaaattaaaccaaaattgataaagttaaaaaaaaacaccaattggtttatgatatatatatatatatatatattgatagattctgtttgctaatatcttgcttaggatttttcatctgtgttcaggagtagattggtctgcactttccttttttatagtgtccttgtcagatttagaatcaaggttgttagcttctttttctattatctcaaaaggattgtgtgaaattgttatttttattttcagcctgtttcaatctactgttaatccatatgatgagttcttagtttcagttactgcatttttaagtcctagaatttttgcttgatacttttaaaacagtttctaattatctgataacattttctatcttgtttcttattttcaaataattagcatagtgattttaaagtctccaatctagagaatgttttcagtagtttttgttacttttttttttttttcttgagacaggatcctctgtatgttgcccaggctggtccaacttcaggcattgagataatttgaacctaagttccttcagtgtctataggccttccagtttaccctcattccagaggtgattcctttaaattcaaactcagtgcacagtaggagtgaggggcattcactaaggcctgatgggacctggattctaaaacttttccctctagacccatgagtccttcaaaactgcagctcagctcttcagcttctcagtctttctttctggaattggcaacattccctagggcagaaatgtcccagcgcaggactcaattccctggtcctccaactttcttggtttctgtcttggaaattcttcactattttagcactctgttgccttcaagtagaattgctatttccctcttaactagtttgcgcttactagaaatggacacagtaactaccttctttccaaaaccgggacttcaaatagaaagttctgctgttggtgaccagaagcttggccgccctgcctctgctgtccagggggaagcaggtggagagaggggccctccatgcctgttctttccgggaggcaggcctcttctaggtgaacatccttatatttgcttagctgacagtgggtatttctttaaatgggctgtttggttataggagacaattagattaaaaaaaattctgaaagctgctgcttgccaaattttattgatgatgagtgagctttgcagaaaatttccaaaataggttcattgttcaagtcacctgcctttctgcttttgaatcctcaactcacacctgagcagtggtccaccaagtctgagccccccaagcctgaggcctgacagaggcagagtggatgggataagagggtgagcgcggaggtcagcacttctgaggttcattcctgctctcagatgtgatgcttctgggtaacaggagccaggccgggagtcatgtctgctgggatttaaccatgctctgccattcactggctgtgccagaaagagaaaaagcatctaatctcattttaaaaacaagggattaagagattattagctgattccagatgtggctgctcattcaaagtacccaaagaggttgtgaaaaatacagatgcttgagtcataccccacactgtctctaccccaggacctgagctgctgaataaaacctggaatatatatgtgtgtgtgtgtgtgtgtgtgtgtgtgtgtgtgtgtgtgtgtgtgtgcctgcatatgagtggcataaaataatcattcattattattaccattatcgcctgtcacagttccaggggttgacggggcctagtgaggcagggcctgctctgggtctatcatgcagggcagtagcagaagactgaggctggagtcattctgaaagcatccacttactttctttcttgctttctttctgttttttgttttgttttgttttgtttctgtttttattttttttatttttttgagatggagttttgttcttgttgtccaggctagagtgcaatggcacgatctttgctcactgcaacctccacctcccaggttcaagcatttctcctgcctcagcctcccaagtagctaagattacaggcgtgcaccaccatgcctggctaatttttttgtatttttagtagaaatgggttttcaccatgtaggtcaggctggccttgaactcctgacctcaagtgatccacccacctcaacctcccaaagtgctgggattacaggtgtgatgaaggcattcactttcgagtgtctgagctgtgggtcagaatacctgcacttagcttctcccggtggcagggacagaatctacatttttaacaagcccccaagatgattatcagttggctaggcagtggtctctgacaacattttaggaattactggacaacatgaaacttttagtcccttaaagttgtacagttccagaattcaagtttttcttttgaagtaaaaaataacttctgttttaagagaatacaggtgtttctcaaagcaaaatgtcaagaccacttttcagacataggattatcagaaattctaacaaaaagctggtagaatactgcccaatagaactctgtttattcagttggatgtgctttaatcgagttctcactctgtgcaagttactgtttgggaaggtgtagacttgtattatttttatggctactaacaaagattacacataatccagagtagcagtacatttaaggtgagtctacatttccttgagactcaaactcctgctgttgtttgtggaaaatgagtatctggggcaaaagaggaagtgagagcccttaaagagagcagaccttcctgcgaagctgcccgctgtgcttggcttggggacagccttgtatattgggccaaaaatgtttgcctccaatattgtagggtagggtgcatgtgactgccacactggcttcttggtgttcatcaccagacaaacgtctgttttcctgccatgatgctaaccatgtttagcatttgtgtccacttggtatgataactggctagacattttgctcctttctcaaaaacaattttaactagttcataattaatatgccacaagacaaactatggttcagcattgggtcttctgggtgtttcaggcattaaaaagaaaatttatttcggggaatcatactagtcaattgttacttttcatcattacagtttccagaggtttattggtggcagatgttgcactcttttttaaaaaagaaaaactaaaaaacaaatggacatctccccgatggattcttagtgaaatgagtctttaaaaagagaaaccaggggctttctcatagtaagcagaaatagaccaacttaggttttaggccaagtgatgaataacgatatggggggacatcatgtaaacaaactactctgtcttttaatgattcttatttcctaatttaaaactgcaacaatatccaggaattctcactttctggtgaagagtgagaaatctttatgggctctcatgattcagttgaaagcaagaggaaatgtgcctcagacattttccttgaacattctccttctgggcaggaagtggaagtgggcagtgttcactgaagacgtggccgtcagatgggaggaaaagctgatggtgtgacaaaatatctacctccccttcttggtgtgtttccttcttccctagtatttctttgctttttttttttttttatatacaacagaaatttatttctcacagttcccacagaccttgaagtccacagtgaaggcagattgagtgtctggtgagggcttgcttatggctcctgagtgggaccttcttgttatgtcctcgcgtggaaaaggaacactctggttgcttcggacacttgtaagggctctaatgccattctttttttctttttcttttccctcttctgtgttggattttctgtttattattattattattattatactttaagttctagggtacatgtgcacaacgtgcaggtttgttacatatgtatacatgtgccatgttggtgctttcctggtatttctaacttagaaactaaaccaaagctcagtgacatgtaagtattgggagaaagccaatcagatgattactgaaagtgattagggagtaaacctgtgtgcacagagctaaactgagcccttcttactgagaggggagcatcaggaactgccttcctttgcgacgatgaaaggctgtcccatctataggagaaaaggttagagaagagtcaagctttgttgtttagttattgggtgcctttagataaatctcaatttctccacagaaatttctgtaatactaaagtgtcaaaatttgctggaaaattttttaaatgttcaaaaaaatattgtacaaatctaagacagtggtgctaaaacaatactagttaaaaatggactttattttatttggtaagaatgcccatatttacaaataactccgtataaatccaggtctctgaaagcaatacagtctctgagaggagctcgatttgagtgttatatgtgtatatctttgcattcttgagtctgtgttttttcataaatttcattttcttttactgttaaaatataactactaattaaataaataattattatttactaatgtgcaagcactatacagttctttgtatggtgcataaaaaatgataaaacactgtctcagtcctcacagaatttacactgctcacattatcttgaaaatatgcattttgagatcagactgatttgtggattttatacgtgtgcttcctgagatcattgggtgatgaacaaaattgatcatggcctgagtatcaacaagattttcaatgtaacagccttcatcagataacataatgtgtttcttagaaaggaagttcaaaaggaccaattctgttagattgctgaccttgacctcctgtggccaaaaatcctgtttccctatgttttgaaaggaaacacgtttgagaaaagctccccatcccagatttggtgattttccttaaaggctgtttggagagacaacaatggaattctgggagagatctgacatcagcaggttcatctgatctctctcaggagagagaagtgtttgtttactctgctcagagtgctatattcctatgcatgtgctattattagagtcctttgaagtagaagagtcatatgtcatagacctctttgtaattaaaaactgtaaggctgtttttctgatatgtatgtagagtagatggagaaggagaaacacttgtttgttgaaaatgaattctgaggaatttgggagcagagctttgcaagtttgggttttctgtacaatgtcacatttatttatcttaccttttcaaatgtttttggagagatggtactaaagagaaaaacatgattggacctttgcatctggacctcaagaaatttataggaaattgagtggtatccagaaactgtgctgggccgaagttaattgggagtaatacttgccctgagtacatacattgtgaatatcaaatgaaataagtcatatgaaatagcttccagaccatagctattgaaaactgaaacatttgttatttatttggctcagcataacttaaaattcaaaatttaagaaaatcacaatttaaaaaaatgatatgcaatttaattattgttactctatagcaatataccctagagttttttacatgtgtatctaattttttaagtggctgcatagtatcctcttgtatgaaagtaaaatacatattctgtgttgatagacatttaaataattttctgtttaactattttgaaaaagccacagtgggtacccaagttacacatacttttatacattctcaagcatttcttattgatggtaaaatgtgtgaaaagagaagaaacgcacaaaagatgatatgctgttgaagatgtggactaattatgtttatatttattaaggaatgaaattttgcatgaggcaattaagacaatagagtgtaagagtaaagccatttaaaaattgtaaaaaacgggccgggcacggtggctcacgcctgtaatcccagcactttgggaggctgaggtgggtggatcacttgaggtcaggagtttgagaccaacctggcaacatggtgaaaccgcatctctccaaaaaacaaaaattagctgggcgtggtggcacgtgcctgtaatcccagctactcaggaggctgaggcaggagaatcacttgaactcgggagtcggaggttacagtgaaccgagatcgcaccattacacttcagcctgggcaacagagtgagacttcgtctcaaaaacaacaacaacaacagcaacaacaaattgtaaaaaacaagccgtcttggctcctgcctccaggaagatgcaatagatatacttttctctattcctcttgctaactacagctaaaaactgtgggcattacacaaaaagtaaatatcagaagactttaaaagatgagaaacaaaaaggactggctagggatcatgggacctgggtttttgtgttgcctcaggtattctagattgggtattcgagaaacgtaatgtggaaatgccaaaggatttagactaaaaaagcccaaaggtgaatctgtttcccaaatgaccaagaaaagtgtacttgctatggtttaaatgatggcatctcctgcaaaatttatactgcaacttaattttcagttcaacaatattaagaggtatggtctttgggaggtgactaagtcatgaaggcttttccctcgtgaatgagattagcacccttatcaaagggctgtaggttgaaagaagtgctctcttgccctttctgtcccttccagcatgtgaagacacagtgtttctctcctccagagaatgcagctacaagatgctatcttggaagcagagagcagccgttaccaaacactaaataccaatgccttaatcttggacttcccagcttccataaccaaaataaataaatatctattgtttataaattacctggcctgtgatattttgttatagcaggacagactaagacaccaatctaatgagacaacttttagataatatctgctctattccatcaaaatatcacagaagctgacaatatcccaaatttggcaagagacataaacctgtagattcaaggagctgcggaaaccacaataggataaactcaaatatttctgtgtcaagacacttcataaccaaacttctaaaaaccaaagaccaagaaaaaagccttgaaagcagcaagcgagagattacttgtaacaattcaagtgatagtggagttttcatcagagacagtggaggctgaagacaaagtggcacatttttcaagtgcctaaagaaaagaacaattaacccagaattctatattcagagaaaatatcttccaggaatgaagggaaaatcaagaccttcttagtgagtcaggctgaatagttactctcctccaaatgctcatgccctaatccatagaatttgagaacatatcaccttccatggcaaaaggacttttcagatgtgatttggttcaagatcttgaggtggagaagttattctggactatctgggtgggtccaatgtaatcacagggtcattataagaggaaggcaggaaggtcagtgtcagagaaaagaaaatgatgatagaaacagaggggaggtagagagtggagagagagagtttgtgacagatttgaagatgctacctgttggctttgaagaagaaagggccacaagacaaagaatgtagaaaaggaaagaaacagatcctccctagaacctccagaaggaactagaactgctgacaccttaactttagtccagtgagactcattttggacttctgacctatataacggtgagataatacatttgtcttgttttaagctacttagtttgtggtaatttcttacagtaacaacaggaaactaatatactcagataaagaaaaactaagagaggtatgttaccagcagacatgccttaaagaaatggttaaagagattctcgaaatagaaaagaaattacatttaaaaaaagaatcttggaacattgggtataaagaaagaacatggcaagcaaaaatagaggtacatgcaataggttttccttctcttgacttttctaaattatgtttgacagttgaagcaaaaatacaacaccatctaagtggttctcaatgtatgcatagggaatatttaagaaaattatattataaatggaagagagtaaaaaatgtaacagtagataaagtttctgccttcatctgaactgctaaattgtcaacacccattgtattgtatacatataatggaatacctagagtaaccacttaaaaagctatacaaagcaatacgccccaaacacatagagaaatcaagtcagaattctttaaaatcttcaaataatacacaggatagcaagaagaagatataaactgaaaaataagcaggaaacagaaaatgaaataacatatttcagccttaacatatcaatatttgcaaggaactgtccacaagaaactaatttcaaatataataataaaaggaggttgaacgtaaaaggatggtatgacatttcattttataggtcagcttgactgggtcagatggtgtctggatatttggccaatcaatattctgggtgtgtctgtgagggtgtttctggatgagattcacctttgaatcagtagactgagtaaaatagatttactctaccttccctaatgtgggtgggccttatccaatcatttaaagaccccaatagaacaaaaaggctgtgtaagagggaacgccttctccctgactgagctgggacattggtccttctggcctttatctttaggttgaaacattgggtctcaagcctaatggctttcagactggagcttacacccttagctctcctggttttcaggcctgtagacttggactggaagtatatatcagctctcctgggtcttcagcttgctagctgaagatctttcaggacaatgtagaacttgttagcctccattattgcatatctttctatatctatatctatatctatatcatctatatctatatctaaatagatctatctcctagatatatagatataccacctgttagttgtgtttctctggagaactctgactaatataaatgggaaaatattaatatatactatgtaaacaattgaaagtgcaaataattgatagaacacttgatagaaaatcagcaaggatacaggagaacttagtaacattatcatccaacagaatttagtggacttttacaaattattccacacaataagagcaaaatacccatccttttttcaactgcccatgggctatttaccagtatagaccatacgctggggataaaataagcttcaataaatttttaaaaatggaaattattcagagtatattctctgacttacaaaggtttcaaactagaaatcaatattggaaatataataggaaaaatctccaaacacttggaaactgaacaagacatttgtaaataattcataggtcaaagagaaagtttcaagggaaatttaacaaatatattaaactgaattaaaatgaaaatacacatataaaactctgtgggacacaactaaagcaatactaggaaataacttcatagcattaacacttacattagaaaaccagaaaaatctcaaatcaataatctaagctcccatctcaaaaacctagaaaaagaagagtacaaacccaaagtaaggagaaggcatgaagctataaatgttaaatagaaaattaataaaattaaaattgaaaacagaaaattaatggagaaaggcaatggaaaaaaaagttggtcctttgcaaagatcaataatactgggaaaagtctatcatgacaaagagaagacacaacttactaatatcaggaatgagacaggagatagcactatcaactttgcagacatcaacagagttaacaaatcaagactatgaatacctgtacatacataaatttgacaacaagactgtgtgtggtgttggcagagggatagacataatgatcaatagatcattctcaatagagatacacccatccaatttatgagaggtgcaaaagccattcagtgaaggaaagaacacttttcaataaatgctgctggtgtaactggttatccataggcaaaaaaaaaatgaacctcaatttcaacttcattccttaaacaaaaataagctaaaatgaattatggatttaatgtaaaatctatgaatcaaatatagataaaatgtaaaggtgtaaaactgacaagttaacataagagaatatctttgggatctaatgcttgtgaagagttcttggacatgatactgaaggcataaatcataaaagaaaaatcaataagttggactttattaaagttaaaaaccttagctctgcaaaagaccctgttaagaggatgaggaacaacctacagggtgggagaaagtatttcacaccacatataaaataaaggattcataactagaatttataaataaacctcaaaactgaacagtaaaaaacaatctgattagaaaacgggtcaaagatcttgagacatttcatcaaagatatacagagattgcaaataagcacatggtgttcagcattactagctatcaaggatattactacacatctattagaatgcctaaaatttaaaaaaatagtgaaattatcaaatcctggcaaaggtgtataaaaacttcctctctcacacatggctggtgggagtgaaaaatggtactaaccactagaaaataacatggtagtattggtattattattatttttaaactagacatacactacctcatgacccagcaattccacggctgtgtatctatcccagagaaatgaaaatgtgtgttcacacaaaaacctgtatgcaattattgatagtggctttgctggtaatagccaaaaactagaatccaccaaaatatccctcattaggtacatgggaccggatgtgatggctcaatcctataatcccagcactgtgggagggtaaggcgagaggatagcttgagcccagtagttcaagaccagcctgggggagacctcatctctaaacaaacaaacaaatgtaaggtaaattgttaaacaaactggtgtatccataccacataataactacccaggaataaaaagaatgacctgttgatgcatgaatcaagttggatggatctcaagggcattacgctgactgaataaagccagtctctacagatcacgtactgtgtgattgtatttatatatcattatggaaatgacaaaaccatagacatagaaaacagattcatggttgccaggagttaggggtggtggagtggggcggaatgtgggcgtaactaaacggggtagtgtggggaaaatctttgcattgatgtacttattatgtctctttattgtggtagtggttacccaaatcaaaatatgtagatgtgtttctttgggaactaggaacagaaatgggctagatactcagaatggcaaggagaattttttaggaatcttatctattttttttctcatcaaagatattaatttgaccaacaagtatttattaaatgccagttaccgaaatagctgatggaatacagagataattaaaatatgttctttgccttcaaatggctgacaatctagtacatgtgtaatctccggtgcaatgtgatagatggatattaacaaaactattgttggagggctcaggtgggtctcctgatgccagtgagaccccacccctagctgatgtgagaaagaattcagggacgagtcagaatgaagtgcagggcaagaagcctccattgctaagtgaaagcacacccttacagaagaagtgtgtgtgtgctcgtgagaatgacttgtgcacaatggagtttgggtttctaatttatgggtgtttaactaatgggtggaataatcattaggtattctggaaaaggaggggattgcagggagctgcctggttatcatcccctttctcccttgtttgggtttgtctggaagagtcatgaacatgtcaccctgactggcgttttggccattttctcccttattttgggttttctgttatcctgtgatttctttgcctagttcctgtttttgctgttgtttgggtttttccatcctcctgcgaccacccagtgctattcctatctcaaaaactggcgagaatgaggcattgaaaaggtgttgctatttctgatctgggaggaacctgcagagcctgctgctgtgaggatgaggaagttgtctcagtttggcacaaatgcctccatcctcttatctgttgtccaccactgatttatcacgtccctttctctgtgcacatggtcttgacctcagaatccttctgaaacacattctaggcagccagtaccaagcaagcagagtggcttcttgacatagaagaaaagtttcagttgagtaatcttagattgtaataatcactccccctacgagctttaaggttaacactcagggtgagcaatctccaaattaacagccttcaacatgtggtctgtgtttttttcatgtttgtgattctatttagatgtaaggtgtttaaaacattttaaattttattggttgtaaatatcatgaactattttatggataacaataaaattgtatgacatacagaccttctcacgatttctaaatgtggaattacacataggcaaccacaagctgtcatgagagttttttaaccatcttggtactctcacttcagtgatgctttaaacacacaggactcctttgcatgcagctcactccttgttctcaagtcctgcaggattcccagccttcatggcctccttacaagtctcagccctgctccagtctccaagaccaatcctgatttctgccgaaggcatttaggcaactttagcatatgctgagcctcagtatctggtcacctgcagcttttatctgagattttacaaccaagcttctacttagatcctatttgaaattgaaactcagaattagatattgctattaaagagttaatatttgtatcctccaaaatccgtatgttgaaacctgatccctaatgtgatgatatttagaggtagagctttgaaaggtggttacatcatgagggtgaggtcctcatgaaagggattagtgcccttatgaaagaggtcccagggaaatctctttcccttttttgtcaggacacagagaaaagcaaacaaaaagacagcagtgtatgaagcagtttcccaccagacactgaacctactgatgccttgatcttggactttccagcctccaggatgatgagaaataaatttctgctgtttataagccatcccatctatggtattctgttagcagcctgaacagattaagtcaagtataccgggcctggcccctaaatctctttttataagctttaagtaaactaggaatacaagaaaatgacattggaagaaaagaaacacatttatcagttgtagatgacatgacaatatacctaaaaatataataaattcaacaggacaggtgaggtacctcacgtctgtaatcccagcactttgggaggccgagtcaggcaggtcacttgagctgagaagtttgagaccagcctggccaacatggcaaaaccctgtctctactaaaaatacaaaaattagccggatgcgatgacaagtgcctgtagtcccagctacttgggaggctgaggcaggagaatcacttgaacttgggaggtgcagattgttgtaagctgagatcaaagccactgcactccagcctgggcgacagagcgggactccgtctcaacaataacaacaaccacaacaacaacaaatttacagactgttagactattaaatttttaaaaatggctttatataagatggaatacagaaaaaagtattactttcttttactagcattgaacaattagaaattaaaatgggaaaaatcacattcaagataatgtcaaattagtttgtaaagcatctaagaataacttaataagagcactatatatatttttattaaaggacataaaataggactaaaataaatgagacatagtaataattcctcacgggaggaagactaaatgacatacagatgctgttccttcccaagtaaatttacaaagataatgcaaatctgattaggatcccagtgaattgttttgggaaatagacaagttggttttaaaatttgtttgtaacaatgaagttagcatttgaaaagaagaatcagaaggggaaatttgctccctaagataacacataattacttagataaaaatggttgggtaatggtatagagatagagaaatagatcagtggtacataagacagaatgtagaaacagacacattgatatatgtgggtttatgtagtgaatcttataattttatgttgcctgaacatgcattttgaacatttaactttctcttatcagtagcagagttagtctgtcttgacagtctccagttttatgctccccccactcccacacccagttgctcagtgttgttgattcagctatctgccttatataactgcctcctggtaaccccctccctatgggacagctggatacaacttacctgactggccctgctgatccccatatcctacatggacagtgcagatgtgctacagtgaccacctctcagtcacggtgtgacctggaatttgtgcctgctgctttgaacctactaactaaaactcctcttgggaaatctgtttgaataatgtcctggactccaataaagggactggcccacggatccctctcccaacacactccctgacctgtgtgtgtgtgtgtgtgtatgcaatgtgtgtgtgtgtggcctccaggcatgctgtgcaccccatgaacctgtaagtagtcaaatatttatttccatcttatatctcatctatctaatcattgaaggagtggtctccatccaaaaaaaaaagagaagattctaagtaaaaacagtttaatattacgataatgacagtattttgaaaaaacaaacttactctcacattgcatgatgtaaatataaattgtaggtgaattaaacttctaaatgtagagaaaaaacattgctaggttaactatgctgcaatatcaaaaatatcttaagatcacagtagcttaacataggaaagtttctttttttttcttttttttgagactgagtctcactcttatcacctaggctggagtgcaggggcatgatctctgctcactgcaacctccgcctcctgtgttcaagcaattcttctgcctcagcctcctgtgtagctgggattacaggcacgtgccaccatgctcagctaattattgtatttttagtagagacagtgttttgctatgttggccaggctggtcttgaacttctgacctctggtgatctgtctgcctcgccctcccaaagtgttgggattacaagcatgagccaccacacccagccaggaaactttcttgattatgtgaagtctgaagtgagcctggagattcttccaaggaagcttccttccatgtggtgactcagggattaaggctgcttccattttgttcccacaaaatttgaaccatttggtttcaaggtgtactgctgaaatggaagagaaatctgaaggttcacacaggggtcttcacgatcggggtgaaaatgacatagaactgtctatgtcacctctgctaacatctcattggctagaatgagtcacatccatgtaacttaattccgaaaaaggttggaatatggtaacatacatggatattaagtcagcattaaatatctcaatcgtaaaaagtataattatcaagaatagatatacatttttataaacttggggttgaggaagcttccttaggattatttagaaaagaaaaagcaataaaggaaaaactaaatttaacaatagaaaagcttaaaataattaaacagtgaaggatgccaaaaacaaagttaaaaggcaagcaacagattgagagaatatatttgccacacatacgaattacaaatgttaaaatttctaaagtgcagagtttctataaagaaaaaataggccaggtgtggtggcttacacctgtattcccagcactttgggaggctgaggcaggaagattgcttgagctcaagagtttgagaccagactggacaacatagtgaaacctttgtctctacaagaaataaaaaaaatcagtcaggcatggtgatgtgtgcctgtagttccagctactcagtggggcagaagtgggaggatcacttaagcctgacgggttgacattgcaaggaactgtgattgtgccactgcactccagtctgggtgacagagtaagaccctgtctcaaaaaaaaaaaaaaaatatatatatatatatttatatagatggtcagtgatataaataatatatatattatatgaggcagtccattgtagtattgtggtaatggcataaaattgaacacaatttaattttcaataagagtctgactaaatcacttacagtatggctatacaacagaatatcacgtagtcattaaaaaagaacaatgtggatctctatacactgacatgaacaaatattcttgatgtataagtgaaaaaaatgagatgtagatcactacggacaatggtgattgtaatttgggaaaaaaattaatgatatataaataaatagataaataatataaaacaataaaagtattaaaatatgacaaaatagggaaggatatggataaaactttacattgttaatcgctaaaaagtaggaaggcattcactttgtaattcatagaattttcttttttttggctcaatcttttaatataaaaaattcactgctgtatacaaaaatgtgaaagtgtgacaatgacaactatgaaatcctgtgaatgaaagtcccctcaaatgcactctgtggtgcacatgcggccgcccacaaaaactctggcgtggaaacaaactcatgcaaaccagtgctgccaagaagcgccaacacgtgtgttctccattccaccaatcacagaccaatatctactccaaacatccagtaacaaaaaatgtggcatcttcccaggaacagcaaggcagacttcttactcacgatggaccagcacaaataaacccagcaaaaagagcacttcatacttatgtttaggatagtcattcatgaggctcgtcccaattccaatataaggaacaaatcccctggctctccccacgacatcttttttctctagccaatgttgatcttgtttatagaggcctctgtcatcaaccgcattattatctcctttggtcaaaaacttgatatgcccattttgcttttcatgaatcttcaagactcggtgaactataggaatctttcttccttctatccttagaacagcgatttctcccactcgtatgggatcttcaactcgatttgttagaaagagaagatatcctctatgaaatgcaggttccatgctgccactgagcaacacaattggactttcacttccagttattaccattaaccccttccagatcatgagtgctgatgagacaatcattccaaaatttaggacttgataatagagccgccacttgttcatccactgcacatcatccaaaaagactagagacagtatggtggggatggcgagcaggacaccggcaagggagagggtgcgaggaccagcgggcagaacgactggcctgtaattcagagttttctaagtgataacttttgtctttttgtgttctgggcatggtttaaatagaaaaccttcaataatattcactcattcatttatttatctacccatctatccaaccatccatccatcgttccatccattcattctatcatacctaagaaacattgattaaaagtctatttgtaggcattgtgtttgccatgcacattcaagtcacatttagtttggcacagcttggaataagaagaaaaatgcccatgtgttttttcctttttcttctagttgactattttaaaaccaatcaacaaaacgtaaagagtctggccctgggcttcttgcacacaacatctgttttggcttccctggcctctggcctttgtctgccctgtagatgacagattagtcggggacatccttcatagtaggaaatggaggtcaataaaatttgcaccaggcttttcaatttagtatcatcccagtcaggacatcccaaaataaaatttgttttaaaaatagatctaggaggagaaaaaagattgaaaacaaacaatcctcttatgtcactaattctgtgagaaaacctgattgaaaaacaaatcagtttcttgttcaggtgcaatgattttgcgggtagaaaaaaagcagaacaaaaatagtgtaaagagtccagtgtgataaaggatactatagagcaaaacaggaagttgtttaatggaagggagtaattgacctcagagcctgagacgtgaatagatccttggatgcagaggtttttgcatttgtaaagtgttgtatcgatgctttattgaccagatttgaattgtacaccatggattctttctttttttgagacagagtcttgctctgtcgcctaggctgaagtgcaacagcgcgatctcggctcattgcaacctccgcctcctgggttcaagcgattctcttacctcagcctcccgagtagctgggattacaggcatgtgccaccacacctggctaattttgtatttttagtagagatgggatttttccatgttggtcaggctagtctagaactcccgacctcaggtgatccacccatcttggcctcccaaagtgctgggattataggcttgagccaccgcgcctggctggacattgtaaattcttactctgataattcaagcaaaatttcttgaattaaagaggagtatgagggaggctgttgtgaggtaggtttaatttttatcttcattctgatcttacaggggaggaaatgaatgctcaaagagattctgtgattagtttgtgatagagccagtaaatagaagaacccatctcaaaccaggtgtaccaaccccagacactggcagaacgctctctttatgtaagacctcaaaatcttactggttggtgtctgctgacttgtttttctctgttatcttgcctgtctgcagtgacaaattcagtgcagctctaactcatgtggacagggaggaaatgattctaggattgaggacttaagggtgtctggaagagaagagaattgttttgttttgttttgttttgttagttgttgttttcctcagacaggaccttgtcaacgctttcaaatatgtaggctgtttgctgtttcctttatgttggtccctgagaaggatctgcccttctaccctgtttccctggggggtgtggacagagcctttgtctttggggaagggggtcatcttgggaaaaggagaacagggcatcctgaggacctgctccgtctaaggagagaaagccgaacagatggcagctgccacgcagagggcactttgtaggaactctggctggagcaggcttcctgcgctccaatgccaaatccttcccttccaaggcaatgcagaggaacctgatgatgtggcttggggccagtgggcttgtggccaaagagcactaaatcaaagcaaagaagaggtgacaccttaaaagcaaaagacatttcatgtttgtttgttttggaaggcagaaagaaataagttgtaattgcaaaagagtagaagatataaaacaacatggctgtaaaatattttaatgttatttgtttgtaaaaggcttttctttaatgaatatgctctattcttattaagcaactttcccatttcactaaatgaggatggtgagtttgtaatttctggttttacctgaaaaccggtgacctggtgttagggaggctcttatccctttaaaataaacataatgcactagtttgtaatctctgcaggtatattaaaatgtttgcagtgataaacatttctagctttaaaacttttatctcttatccgaattcaagatctatgtctttaatgaactctttcaactggacattcaaacatggaaaatgtttctagattctcatctcccataatcagctgagaatggctgtgaattcccagaggaagacctgcggaagacagggctgagcttctggaggcaatattatgggagcatagatcttggggtacgtttcctcagaacccaggggactcctaggcactcactcatttatcatgatcatacgtttaatcttttttacttatgtttcaggaatataagaaaatgtatgttttaaaagcatgaacactcatacttactgaatacaatgcctgactaagaaacaaggctttataccttattaataaggagaaaatgccaagctaccaaagcatacattggaaagcaatatgacagagtagaaataatgctagctttattgttcctttacatttattagtaacctttaatgagcttctgtttgtgtcaggaactgaagttgcagagatgaaactctgaaattacaggtgcccatcaccatgcccagctaatttttgtgtttttagtagagacggggtttcgccatgttggccaggctgttctcgaactcctggtttcacgtgatccacccaccttggcctcccaaagtgctgggattacaggagtaatgcagatgatgaaagataccctttcctgactcagatgtgatgagagacttgtaagacacacacacacacacacacacacatacacacacaccctatactatacttcaggaagtgctgtggcagatgaaagctctgggaactaagagatcagcagtaaagggaatctaacccaaagtgggagcagggttaagccagacaactccggaaagaaggatgcagcaggcaggaggaacagcatctgctaaactctgtggtggggcagagcacttgcacacaggcagctgccatgaatatgattggctggtgtaggctgtgctgttggtggtggagaggaattgtggggggcctgggtatccacaccaaagagctgaggctttcagcaggggacccaaaagttcacatctgtttactcagagactaaggtggagatttttgcctggaggggtctgaggagcacattagaagctatgcaaacctgtcgaaattgtgtgcaatatgttaggagtatgtgagggtgggtaggtgtgtgtgatgtgtgcgttttcccctgggaaggtttggttatgttcttccatcttaaaatgtgtcataactctcagaaagggtgaggagctcaactaggacagaagagggtgatcagattggatggttattgcaatacttcagatgactaataatgaagtcttgggctgataaagttgtcctcgggatggatgggccaggacaatttcagagaaaataaagatatggtgctgacaggatgtgttatctgattagatctgcagggggaaggggagagggaggaagctgcccagtgcaaggcctcttgaattgtgacctgcccatgagctacctggggctcctgctcgagtgtagattctgactagaaggcctggggaggacccagagattccacatggctaacaagttctctggtgatgtccatgccatgccattggtgctgagtagcattttaagtcacaaaagtggaggtagcatactctaggtccaattctcaaccttggctgtcgacgctttctctgtttaatgattatggggcttggcattgtgagcatggtaggtggttggacagcatcactgacctctggccatgagatgacagtagcactcttgggagtgctgaggagacaaacaaccaaaaacttctccaggtattaccaaatatgcaagggcgggagtgggggcgaggcactgatctagaggttaaccactctggcttcacgttaaaatcatctgaggagttttaggagctatcagtgcctggcctcgcccagactgattatattctaatctctgcttgggggttggggagggtgcccacccagctttcgggaagtccagtgtgcaaccatctccgtggttgatggggcagcccggctgataaaacccaggactacacctgaacgcaggaagaggagcagtgtgggtggggaggtggcctgaggagtgaagataagacttcagatttacatgttgatacgagggaaatgcctggggctcatttagatggagatgctcactttgattttcttggttagtgacaagctctgtggcctcgtatctatgaaatatattttcaggtttttattttactcgtcaattctgatagtatctactctatgaatagagcagattgatgaaaaggtaaaataaatgaatggatgtgaaagaaagtaatagctgtcttacactattgcacacacacatgctcaagagttcttcagaattttatttgaaaaatcgtattttgaaagttttggaaaacacagaacaacattctataatatcagggcaagaactgatttctagaaaaaagaacaacaaacaaaaagcacaaatcataattgatgcattcaagtaaattaaaaagcaccatcaggaaagttaaaagacaaagactgaatgaaggtatttgcatagcatataattgacaaagctttagcataaagaatatgcaataaacccctaaaaatcagttacagaaagttgaacaacccaagagaaaatagacataagatatcaataagaaagctacagaagaggaaacagaaatagccaatatacataatactacaagatgctcaacctccacaatgatccggcaaatggcagctggagctgcaatgtatactatttcttacctaccagataggcaaaattttacaagtctgatacaatgaaatgttgctgaaatggcaaggaagaggaaactcatgctgctggtagggatacaaattagtactacgattctgtgagcaatttggcaatattaaaaattaaaatgtctaataacctgtgacaccgtaattccattcgtaggtaagttgtttacgtgcagagatgattgctgcagcattatttccaaaagtgaaaaattgtaaatgccctaaaggtctatcagtaagagaatggctaaataaattacattccttttaacataatggaatttgtgtatttttatgaatataaataaattagagctgtagatattaacatagataaatatcaaaggtgactgaaaaaatggtaagttacagaagctgtaattagtgtatcctgtttatttaaaatgtaaaaaatacaaaacaagactatattttatttacattggcatacattcttactttaaaaagaatcaagtgcatgcacggcaatgttgaaaaccaaattcaggatattggttctttgtaggggagagagaaatgagattggggagagtgacacagggtggagaagttaaatagtttgccctggtgtcaatagcttagagaacaggagagcctggattatacctcagcctccggccccagaacctgaactcttatgctctgtggttcatcctgaatttaaactctatctccatattgaaaaaaagtttcctggatgagctgttgtgctcaatctgctcatgataatttaattggagaaattattggttattgataaataatcttaaattttgtgattcaatcttaaaatatttctagcacagcatttcagtactagcaagtatcatagtataattgtgtgactacctgtattaccttttttaaacctacatttgatgtataatacattgactaaaataaaattcctcatcattgaaagtcaaagattcagtacaataatgattttttataaatcagctttctattcctttttaaatctgttttctactctcaaaagttctaaattttctactaaaaaaattctagtttgataagattttgtgaactttataaaaacatctctttatactgagaaggaaggagtccataaatcttgagtttgagcccatgatatggttgtttggctcctagaagtgtctgaaataggacccaacatgtacacggagctttcctaatttaaaagttccttcatgtacatgctcaatctttgtcttcgagctcagattgctgtaaccaagtcccatggacccagtgacttacaaacaggaatttatttctcatagttctggaggctggaagtccacaatcaggatgccagcacggttgagttctggtgagggcctcttccaagttgtagagtgctgacttcctgtgtatcctcacgtggcagaaagacagccagcaatctctttggcttcttttcataggggcactaatctcagtcacgagggtcccagcctcatgactttatcacctcccacaggtcccacctccaaacatcatcacattgggattacagtttcagcatatggatttttggggggacacagacattcagtccattgtacccttgaacccaaggattctgtggggtgggtagatgctatttgttacactcatcaatttgcaattgataccaaagagcagtagtttaagtgatttgctctgagacccagtgaccctgtggggattggagccagaattgcaatgtaaagcccttggtgttatcacttgtgtttggttcacttggacctgctcgttatcatgcacagaaccattgctcactgatttgacccctttctcttcactggagcagctctccagaccaccatggccttccctgcacatcctccttctgtccagagcagcaacaattcttggctcagttcatcacttcccccttgaaatgctctctggcttctgggacctcctctcttgctctttctcagtcactttgcaatctccacacttctaaatattggaggtctcaggactatgaagttctcttgtatctacatgcatttgttattttttaaaatttaaaatatcataaagacatacataaatcaacagagaagtaaactctaggaaagaccttggcttttgatctatgtacctgatcactactcttagagtgagaattaaactattttcagagaacagttattggctgatttttattacactttggatgatgttaataccagaagtgtcagtataagagctaggcttacacagcaaaggcttcggaaaaccatttcccccccatcctcaagttatgaggcagattaggagctagaaggataatgggcagtgttcatagcaatgggaatttagcaattttatcggcaaattaagaggaggagagatggtgagtattaaatgtggccatttcaaaatccttgggatactgtgttaaccctcaagagaagcagcagataaggaaccagaaatacatttggcaccgagaggctggggacacatagccaacaaaacaggtgaagttggaagagacatgatgaagtagtgaagtaaatttattgtatatcagttgatgatatgtgctaagaaaaagaaataattagtgggatagagagtgatggtgtgaaagtgccattttttacataatgctcagggaagtgctaaagataatatttgactaaaggcttgattgaaaagaggtcaagctagctttggagtttctagtaggcagtttgagatgtacaatgattggtaaggggtgggatgtgagctggagtccagattcaggacttgttggcacatagcgggtattgaaaaccatggggcaagatgaggtcatctagtcaatgtttaatggccatgaaaagagcaaggcccccaagagatgtgggatatctcaaaggaagtgtaccaaagctgactgggatggatggtctaagcagggaggtggataacccaggtggggtgatatggtttggctgtgtccccacccaaatctcatcttgagttataactcccacaattcccacatgtcgtgggaggaactggtgggaggtaattgaatcatgggggtgggtctttcctgtgctgatcttgtgatggtgaataagtctcatgagatctgatggttttataaaggggagtttctctgcacaagctctctcttttgcctgctgccatgtcagaagtccctttgcccttccttcatcttctgccatgtttgtgagacctgcccaaccatgtggaactgtgagtcaattaaacctctttttcttcccagtctcaggtatgtctttagtttccacagtgtgaaaacagactaatacatgggttgtcatggaatgcaaaataaaagtctttcaagaaagggggtgggtgttagtatgtcttttgctgctatgaagtcaagtaaagaaaggattgtgaagttgctattatggtagatcctcttcaaagatggccccaccaattccttcttctccgtatgatacacatgcctatggggtgatagctgaagctggatctagaggaaaaaggaatttttttctttttaaagataggaaattctagagcatatttgaaacaagacagaaggagaaatagatgatataggttgtaaatggaattccgaagtgaaaaagcataaggcctttgataggacatttcattgctagcagtagaatggggtgcacagtatgggaaaagaagcaagtggattgttctttggtggatggaagatgaagggcctcctagtgatagttcctagcttcttcgaaaggcaatgctaacatctgatggggccaggggtgtgtatttttatgagaggtttgagccaagaggaacaaacaaaagggagaaaaaaaaaccctctgcccctcctattttgttttcactatatgagctgcccaggttcataaactattagtgactatttttatattaagcacaaaatattagaatttaagtcagaattgaattttttcttacaatttcactaaactacgttttaaagtttacttctctgtttgtaagacccatttatcttcaaattttatgttcaatataaacatgtaaatgtaatttattaagaaattattaaatggaaatacttatcatttatgtttagtaattagaatctgtctttaccactcttttttaggaagaaaagtgaaaaccatcttgataggttttagaatgagattttcatgagagccaatgcaatgtccatgcttgtttatgacatatttgaagtgcttaaaggaaatatccatggattatcaggattttaaaaagtcatttgtgttgtcaaactctctaatgcacaatattggagtgccaccacaaagtcagctaaaatatgctaaaggtaattaaatatgtcttagagttgttttttctcttttggggggtttgagttttagagctttgtttgattgtttgtaagggttagtcagagaataaaagtgtcatgctaagtaaggaaatgttcatgaaatagtgcactcatccttacaacttttttttttttttttgctacagataagcctgttgttagtgataaggaatttaacatgctttatcttagaaaaagaaaaaatagaacaaatgtatcttagatttcaatgagttaatttatagcaagggagacttttctgtttgtaatgacacaggatggtcaccaaataattgacccaatggagggctggggctctgtctgagcctagagcctggtcccagtggcatcctgttgttgtttttcttcattcagggatatccacatggaggaggtttgaggaaatcagattggacacaagttctgaacagtttttactgctagaagctgtaaatattctaagacttgttttgcttttcctggagttaatatttcttgggcaatgggatagcatcctagttttgatctgtatgggatgttgcataagctacttggtaaaatgagggggcagaagtagtctccagtgtctcttccagttctgtgtttctgattccatataaattaaatttcacacaacactgaactgtaagaagtaacttgcaacatgattctgcatttgccaatctgacttttaaaaagtcacactaatatattaaaacccaaaatgtgttaagtgaataaagtatttgaaatttaaaaagtgatacctggaatgaaaggaaaggatgccttgaccagttttactacggtagccccactgttccaacgtttgagggtatgaaagagtataaaatgatgtctcattaacacctcctcacactattttgaattaatcaaaataaacatagagcccattttctgacagcctgtgagcccaaacgtggcatcctatagttgttctttgagagaagtcaaggactcaaaggcccagctctcaccagactgttcagaatgtaaattttaccaactccaaaacctgaggaagacactgataattatatttctttccccttctcaatattactattagaaggatttcctagtatgttacttaattgtgccccagttttctcacctgaaaagtcagaataatggtacctacttcatagggctattttgaggattaagtgaataattttatacaataggtaaagttttttagtattaatataatttgttattgtcccatctccaatactatttccttcctctttaaagttatatgcatcattgcaccattcttgtgtgggtttttgtgctaccataacaaaattatgtacatgctttaaaaatttgtatagctgctaattcttttttcttttctttttttttttttttatgatacgaagtcttgttctgtcaccaggctggagcgcagtggcacgatcttggctcactgcaacctctgcctcctgggttcaagcgattctcctgcctcagcctcccgagtagctgggactacaggcgtgcaccaccacacccagctaatttttgtatttttagtagagacggggtttcaccatgttggccaggatggtcttgatctcttgacctcgtgatccacctgcctcaacctcccaaagagctgggattacaggcgtgagccaccatgcccagcctctatagttgctattatacatattcttctataatgtgttttcagtctgcaaaatgtttttgatatttgtttgatatatgtttatctagcttactgatttttactgatatataacttggagtttacttactcattgcaatattaatgacatttagacacttcattttttaaaaacagagacaaagtctcactctgttgcccaagctggagtgcaatggtgcaatctcagctcactgcaacctctgcctcctgggttcaagcgattctcctgtctcagcctcccgagtaggtgggactacaggcacacaccaccatgcctggctaatttttatatttttagtagagacagggtttcactacattggccaggctggtcttgaactcctaaccttgtgatcctcctgcctccacctcccaaagtgctgggattacaccgcacctggccattttattattcttttcaataccaatgtttatcctatacatattttacctggctccgtaaggtgttatctagaagtggatttgctgggtcatacaaactgtgcattttcagccataatagggattgccacattgctatccaaagtagtcaaagttacagtttcaacaacagtgcatgtataagtgttctgtcctctctgtctccttgtcaacatttacaattgtgtctttgccaatttgacaggtgtgaaaagacatactatagttttagtttacattttcctgatgaacaaataaggtgagcaactttttatatttattggctcttcagatttcttctcctgagtcttgtctgtttgtatgctttgctattttctatcaagttgtttgtcttttccttttgatttgtagaacttcatagactcatgaatgtacagttgattctcattctcagtagttacattctataaagtcacagggaacactgaattagtgaatactgaaccgttgctcccaggggaaatacagggctaggttccagggagccttccttcactacattttcttcacctgatccatacataaacttgttttatgtatgtttctgcttaaagacacatgtttaatatatattgttgattcattaacattgagttcatggccaatagcactgtaactcctacctgaaggaagcttatgtaacacaagtattttctttttttttaattttaattttaattttaagttccgggtacatgtgcaggatgtgcaggtttgttacataggtaagcgacatatgtattttctctacaaggcaatcacaacctcttgtgcttaggaacattagacagcacttcagtgatatgctttggggccattttaaatagggaagtcactaccaaaaagcacaaaaatgcaaaaatgtggcactaaatacaccttgaataggacatttgtttacagtatgagagctgaaacaagaaggcagaatgctgccttgtttggcttcagctgggaatgtgcgtttcaggtagctcaaatttttcactgctctgtgcatggctgtgaatgactgtgaaagtaccatcagtattgattttgaagttacaaataaattttagcgagtaggtgaattcacatataaggaatctacaaatagtgaggactgactttaatttgttcattgtacacaattcaaatatttttctccactctgtttttaaacaatgtttatgtgtcttttgtcatacagaacattttatttaaactttttcaattttactaagctttccttatatggtttacgggttccattttgttttaggcatctttccctatcctgatatcagataaatattcttacatgttatcgtataaacgttttatagttttgcctttcccgtgtagattttttgttttttttttttgagacaggttcttacttccatcacccatgttggagtgcagtggcatgatcatggctcattgtagcctcaacttcctgggctcaggtgaacttcccacctcagcctcctgagtaggggggactacaggtatgcactaccatgcccagctaattttttgtgtgttttcagtagagacggggttttcccatgttgcctaggctggtctcaaactcctgggctcaagcaatccgcccgccttggcctctcaaagtgctgggattacaggtgtgagccagcatgcccagcctcccatgtagattgttaatctattacgattattttttgagtaaaagatgtgataggaattgaataaaaattctccaaacttattaactagagcttttgctttgattcatagtatagcttctgttatatatcaagttcccatatataatggtctgtttctaggctattcttttccaagtttgtgtattctttaagaaagtccatactttaacaaactattatagctttatgctaagtctttctatttggaaaggaatactccttctcccttcttccaccttattcttcttcaaaattgtatcttactttccccaaatgagttacaagacttgtcaacttctttgaaaaatgtggttagttgcatgattagaatagcactcgatttacaggtcttttgggggaaaattatcattgttatatgacattgggtttttccatttataaatcatagtatttttctcctttatccttttaaaaagtagttataatttttctcaatgcagatcttgtatatcccttgttctatttattcctaggtaccttgtagtttggttgcactttgaatgagattttaaaaaggcatcattcctaacagatttttgcaggtgtgtagtaaaccattaacttttatctagcaatcttgctaaagaacttattagttttaatgatttgtctatagatactcttggatttttaatgtaggtaattatatcatctatgaaaacatataattttgtctgttcttcaaagtattatttctttttcttgtgcagttgtgttggccagtgtttttgtcttgatgcagctgtgtacttgcaacaaatcagctctgtgttttcaaatgaccagttggaatcaggtgttttctctgtttatagtctgcagtagcctgactgttacagaactctggaagatggcctaggtcctgggcacattatttaactacctatgacttagtatcctaatttataaaatagagataataatagaaccttcttgatcagggctgttttgatgactgaattaatatttataaaagccttaaaactgtgtctgacatgtataaagagctcaacagatcctatcaatcactactactactgctagtactgctacataagaatgacattggctttgggaggccgaggcgggtggatcataaggtcaggagaccaagaccatcctggccaacatggtgaaacccccgtctctactgaaatacagaaaattagttgggtgcggtggcacatgcctgtaatcccagctacatgggaggctgaggcagggtaatcacttgaacccagaaggcagaggttgcagtgagccaagattgcaccactttactccagcctggtgacagagcaagactccatctcacacacacacacacacacacaaaaaaaaaaaaaaaagaatgacattggctaacaagcacgtagtaggtatacacatttatggggtacatgtattttgatagaggcaggcaatgcatagtaatcacaacatagaaaatggggtatccatcccctcaagcatttatcctttgtgttacaatctattatactcttttagttatttaaaatgtgcaattaaattattttttactatagtcaccctgttgtgctagtaaatactaggcctttctcatactttttaactatttttttgtacccatctatccacttttgatattaagattttgcaaccttcataaaatgagttctttagttttcattctctttctattcttttaagtgtgttaatgtaaaaataggaataatctgttttttaaaattttggcaaaactcacatttgtaaccggttaagcctggagattttctgacattgatggctgatttaattatttaatgcttgatgtccattcatattttaaaatgtcttttggagttaattttggtaattcccattttctagttgtcaaatttattggcataaaattgttcatagtatcttttttgatgtcttaaagctttactatacctgttatgaccaattctctcatagaaagagtaaaatctgttctgttagtttatttctttttatttatttatttttgagacggagtctctctctgtcaccaggctggagtgcagtggcacaatcccggctcactgcaacctctgactccctggttcaagtgattctcttgcctcagcctcccaagtacctaggattacaggcatacgccaccacgtccagctaatttttgtatttttagtagagccggggtttcaccatgttggccaggatggtctcgatctcctgacctcgtgattcgcccacctcggcctcccaaaatgctaggaatgcaggcgtgagccacagcgcccggccctgctagtttatttcaaagatttagcttttgctttcatttctctaatttcttcttaatttcatcatttttcattattgccttttactttctttgggttaactgtgctgtattactaaatcctagagtcatatgcttagctcattaatttccatttcttcctaatgcatacacttaagcatatacattccctttaaatactgattttgtggcatcccatggagtactacatgtttggtttaaagagtcaccaaggattataataaaagagtcacttcccttcttaacatccttaccctaatcttactccacagagacgactatttttaaaacatttttagctatttcttttggagcctattgctttatttctaattaacatgatataatttcatttctatttatttatttctccaccacatgagctattttcatttcttgatattggagtttaaatatgatctactgacttcctactacggaagatgggatttgtccccacagctttccccttcctccatctgttaatagagccttgtctccattttgcagtaaatcaatattcagagtttgcattattatatagatatataggtataattcacagaagagctatgtagtatgctgtgattacatttcctgttttgccacctttttcctttcaaaagttaataatgggcttttattttttttttagttttccattttcttatcactctttcatccctaaggccgcctctataattcaaatcttctcccactgtggtcatacacattttgtattcgattgcttgtaactctttcccagaggtaaccctcctagcatcctctgtccgatccttccaaatcctttcaatctggacttgtgctttacgcctgctgtgcagctcccgtcttgggatttcccttcactgtcatgctggggagtccatctgcctttttttttgttgttgttgttgagagggagtctcactctgttgcccaggctggagctcactgcaacctccacctcctgggttcaaacgattctcctgcctcagcctcccaagtagctgggactacaggtgcctgccaccacgcccggctaatttttgtatttttagtagagatggggtttcaccatgttggccaggctggtctcgaaatcctgaccttgtgacccacccgtcttggcctcccaaagtgctgggattacaggtgtgagccactgcgcccagcccatctgcctttcttcagggttcatgtcactgattttttggtgcctgcacctcccccgttgttaatgctgttattttggtggagcacattctgcagtagctttctgagaatgggtgcataatattttggatcactttatgtaattcttaaacatttctgaaatattttggcatttttactcatctgtattattctggagatttgtcataatgtgctttggtgtgggtccttttcctttattgtcctgggaacttcgtaagtccttccaatttggaaactcatattgttacagagtagggaaatttctataattctatgataatactctcacttttctttctcctttaggtgtttatggaaaaactaggatgagatgttggatctcctgaatttatcctctgcatctcttcgcctttctctcttattttccatcatctctgtgtgtgtttatgtatctttcatctttaagtctaaatataatttttcttatgatttcttctttgatccatgagttatttagaagaatcttttatcatttctaaagtatatgtgtgcatgtttgggtaagttattggaaatctttctatcattgatttttaattttattgcattttgatcagataatgtggtcaatatataattttaaaaatacttgttgaattttcttttgacttaattttcctttttttgggggggttgggggagggagatgaagcctcactctgttgtacaggctagagtgcaattgcatgatctcagctcactgcaatctctgcctcctgggttcaagtgattctctcgcctcagcctcctgggtagctggggctacaggagcacaccaccatacgtggctaatttttaaatttttctgtagagacaggggtcttactgggtttcccagtctggtctcaaactcctgaactcaagtgatcctcccaactcagcctcccaaagtgttgggattacaagtgtgagccaccatgtccaaccactgatccgtctgtatagttttgcctcttccagaacatgatgtaaatggagtcacatgatatgacatctcctgggtctggcttctttcacttagaaaaaagcactttagatgagacacatggacatgtagaggggaacacacagtggggcctattggagggtgaagggtgagaggagggacaggatgaggaaaaataactaggattaatacctgggtgatgaaataatctgtgcaacagacccaagtttgcctatataacaaatctgcatatgtacccctgaacttaaaataaaagttaaaaaaagaaaaatgcatttaagatttacccatgttgttgcatgaatcaatactgttttcctttttattgctgagtagcattctattgtgtggacatgccacagattgttgatccagtcaccttttgaagcatatctaggttgtttccagtttggggatattatgaataaagttgttataaacttttgcgtagaagtttttaggcaaacatatgtttgcatttcacttgggtaaatacctaaaaattgtatttctgggtcatatggcaagtgtatgtttaattttataagcgactgttaaattgttttccaaaatggccatacgatctgcattcccacccgcaaaaagcaggggttcccatcgctctgtattctccccagtcttggcattgttagttttttaaaaaaattttagccattctagatatgtggtggtaactctttgtggttgtattttacttttcttagtgactactgatgttggatttttttttctaaaatttgttatctgtttatctttggagaagtatgttttcatttaaaaagtgtggattatttctaattgctgagctttaagagttctttatatatatattatcatcagatgaagcttcttaatgggaaaaatcctccacactttactaatttgtttccatcttgatcttatcattttgatctatatgtgtgtgtgtgtgtgtgtgtgtatgtgtgtgtgtatatatatataatatatattctaactttaattttaagttctggtgtacatgtgcaggtttgttacacaggtaaatgtgtgccatggtggtttgctgcacctatcaacatatcacttaagtattaagccatttatgcctagtgttccattattggaacacaagcttgttggagttgtttatatcctactgctcatggtcatcaccgaggtctgatttttcacacaaaaaatctgcaacctctggcataaatgggttaagccctgaatgcattagctgtttttcctaatgctcttcctcccccgaccccactccctgacaggctccagtgtgtgttgttcccttctctgtgcccatgtgttctcattgttcagctcccacttacaagtgataagatacggcatttagttttttgttccttaattactttgctaaggatcatggcttccagctccacccatgtccctgcaaaggacataatcttgttcctttttatggctgcatagtatttcatggtgtatacacaccacattttctttatccagtctatcattgataggcattttggttgattccatgtctttgctattgtgaatagtgctgcaatgaacatacacattcgtgtatctttgtaacataatgatctgtaatcttttgggtatatacccagtaatgggattgctgggtcaaatgttatttctggttctagatctttgaggattgccacaccgtcttcctcaatggttgaactaatttacattcccaccaacagcgtaaaagcattcccatttctccacaacctcaacagcatctgctgtttcttgactttttaacaactgccattctaactggcgtaagaagctatctctttgtgtttttggtttgcatttttctaatgatcagcaacgttgagctttttttcatatgtttattgtctgcatgaatgtttgttcatgtcctttgcccactttttaatgaggttgtttttttcttataaatttatttaagttccttgtagattctggatattagacctttgtcagatggatagattgcaaaatttttctcccactctgtaggttgcctgtttgctctgaggatagtttctttatgtattttaacacaagtcttgtatcagatatgggatttataaatatctttctccaagtctgtagcttatcttttcattctcttaacactgtgtttgacagagcaatgttttcagtttttaaaaagtccattttataaacttttcttttgtgggtcaagcttttagtttcacatctaaaaacttgttaccaaacccaaggtaacacagatttttctcctacatctcttctagaagttttaaggttttaaattttgaattaggttaatgatctattttgagttaatttttgtataaggcatgagtttttttacacatggctgaccaactgttctagcaacatttgttgaaaagataaaactttcttcattgacttgagtttgtacctttgccaaaaatcaattgactatatttgtgtctatttccaagatttttattctgtttcattttcatatgtatctatcctttagccaatatcatatggttagataactgtagctttataatgaattttgaaatcaggtagagtccttcaactttgttctttttccaaagaactttgttttggcttttctagttcctttgcttttccatatacgttttagaattagtttgtctatatttacaaagaagcttgctggaattttgattttgatgtactgaatctgtacatcaactggataaaatagataccttaacaatattgagtctttcagtccataaatatagcatatctctctgtttacttaaatcttctttaattctttcattagtgttttatacttttctgtatacagaccctgtacatattttgttagatttaagtatttgcatatttaaggacatatttaagtgtttcaattttggtgctattacacttggttgtactgtttttcgcattttaaatttcagttggtcattgctgtatgtaggaagacaattggctcttctatattggccacgtatcctgtgaccttgttaaactcactttttagttctgagagatgtttttgtagattcttgggattgtctttttaaacaatcatgtcaattgagaataggggcaattttatttcttccctttctctttgtgtgacttttatttctttttctttacttactgaaaaggacaggaattccagtatggtatcaaacaaatgtggtgagagaagatagcctgtccttgttctcatcttatggagaaagcattccattttctaccactgaggttagttgcaggttttatagttttatgtatatatgtatatagtatgtagtgtctttcataagattaaggacattcctttctaattctagtttgctgagactttttactatgaagtaatgctaaattttgtcaaatgctggctttagaatcaattgagatgattgtaagggttttcttccttagtttcttaatatcatgaattatattacttgattttcaaatattgaagcagcctcacattcctgggataaattctgctagattaggatgtgtaatcctttttctattaatatattgctgggctcaatctgttgaagaaatttatatctaaggtttgatataataatggtttgcaattttcttttactgtcttttgtttcaaattagattagttctggcctcacaaaatgacttggaatgttttcccttcttttatttgctggagaagactgatagatttgttcttatttcttccctaaatattggtagatttcaccaaggaaatcatctatgcctggagtttcctgtgtgggaaggttttcagttacaattcaatttctttaatagacatagtgttattcaagttctctatttcttctcagtgagttttggtggtttatgtcctttagaaaattggcctatttcatctaagatgttgaatttatggagggtatacagctgttaattgtattctcttattattcctttgatgtcagtgaggcaaaaaatgaagttctactcttttattcttggtattgttatttatatctgctctcttttcttcttagactcactagaggcttatcaattttattgagaatcagcttttggtttcattggttttctctattgttttcctgttttcaatttcattgatttctgttctcatccttattatttcatttctctgcttgctttgggtttaacttactattctttttctaattccttaagataaaaacttagggtactgactttagatctttgttctttcctaacataaacattcattgctgtaaattctctttgagcactatttcagctgcactcgcaaattttgtttttatttgcattcagttcaaagtactttccaattttgcttgggatttcctcttagacctagtattatttaaaagtatgttgtttaatttccatatattttgaggttcccctaatttctttctgttattgatttttagtttaattctgttatggtctgagaacatactttacatgatttctattctttaacatttatcagggtttcttttatggctcagaatatggtccatctcagtgactgttccatgtgctgctgctgtgaagaacatgtactctgctgctgatgttgttgttgggttgcatgtttcctaaatgtcattaggttgggtgggttgataggtttgttcaggttacctatacacttaataattttctttctatttgttttaccaattactaagacagaagtcttgacttgtccaagtataattgtggatttgtttattctgcttttaaatatatcaagttttacctcttttattttgaagctctgttgttaattctaccttcaaatatatcaacttttgtctattttattttgaaggtctgttgttgttaatatgttgtaaacatatttaggattgtttttcttctgggaaaacttgcttggaaaattgatagctttatcattagttactttcctgcttatttttgataatatttcttgtgctgtagtgtaatttgcctgaaattagtatagttactccagctttcttttggttagtgtttgcatgatatatatttctccatattttttacttctatctatgtcttcattttaaagttggtttcttgtagacaacatatggttgggtcttgatttttttcttctggcccagtatgacaaatccttttctttaaactggcttatttagattagtcatgtttagagtgattgttaataaggttagaataaaatttactatttaccatcttgctatctgttttatttgttccatttattctgtattttttcctttttaaatgctttctctgtgtttattggaaaatcttttattattccattttacctttatttgatgttatttatacctcttaattttttttctaagttgtggccctagggcccacatgtaatttttaagtaatcatttgcatttaaaaacaatctgagtcttctctcaatagtacaccattgacatattgtgtaaggaacttattatagcatatccttaattcctctctaccattctttgtgctattgctgtcatctattttacttttacatagctatgaatagagactatattgttactattttctttaaacataaaaagtaactacagtaagaaaataataaattcgatcttaattctatattttctatgtatatgctcttcatttatttgtgtagattcaagtttctgacctctattatattcccacagtgaagatcttctcagcctttgttgtagagttgaactgctgcaatcctcctctgtctgcagccccagggacttccaactctggttttatctccacactgggccttcagcaattcatcaaaaatttctagctgaatcttcttattggcttatatggcacctgatggcatctacatctgttccaggtaagcaagaatttgggtcctgtttctccccacagacaaatcttctctgaagatttctggttatttgtttgctcttgtgacctcagctctccaatggaaaagtcattcatatggctattattaaaaagtaaaaaaataacagatgctggtgaggttgtggagaaaacggaatgcttatatacggttggtaggagtgtaaattagtttaaccactgtggaaagcagtgtaccaattactcaaagacataaagacagaaataccatttgacccaacaatcccataactgggtatatacctaaagtaatataaataattctattataaagacacatgcacgtgtatgttcactgaagcaccattcacaatagcaaagacataaaatcaacctaaatgcccattgatgatagactggataaagaaaatgtggtacatatacaccatggaatactatgtagccataaaaaggaatgagatcatgtcctttgcaggaacatgaatggagctagagaccattatccttagcaaactaatgcaggaacagaaaaccaaatgccacatgttctcacttacaagtgggagctaaatgaagaacacatggacacagggagaggaacagcacacagtgtggcctatcagagggtggagggtgagaggagagagaggatgaggaaaaataactaatgggtactaggattagtacctgggtgatgaaataatctgtacaacaaacccccatgacacatatttacctatgtaacaaacctgcacatatacccctgaacttaaaagttaaaaataaagaataaataataaaataaaataaattattcatttgttattgtccagcatttttcttgttgtaagggtgtgtgtgacactctttccagccctctatacctccacaatgaatctggaaatccaatgaatccggttttggttttattttgttttgttttgagacagagtcttgctctgtcacccaggatggagtgcagtggcttgatcttgggtcattgcaacgtccgccccctgggttcaaattctcctgcctcagcctcccgagtagctgggattacagacaactgccactgcgcctgtctaatttttgtatttttagtagagacggggtttcatcgtgttagccaggatagtcttgatttcctgacctcgtgatctgcctgcctcagcctcccaaagttttgggattacaggcgtgagtcaccgcgcctggccaaatcttttttttaatttctgtgtttcacgtttttcttccccaaatatcctcaagctttaaaatactgtcttgtattttattattgtttatattttttcttttacctgtaaaataagcttaaactatctttttaatggtggctttcagatttttctatttcctctcatttctttttttcttttcttttttttttttgatggagtctccctgtctcacataggctggaatgcagtggcgtgatctgggctctgtgtaacctccccttcccaggttcaaatgattctcctgcctcagcctcccaaatagctgggattacagctgcccgccatcacacctggctaatttttgtatttttagtagagatggggtttcaccatgttggccaggctggtcttaaactcctgacctcaagtgatccgcccgcctcggcctcccaaagtgctgggattacaggcgtgagccaccgctcccagcctcctctcactcttgagcactaattcttttttatttatttatttatttatttatttatttatttatttatttatttttttgagacggagtctcgctctgtcacccaggctggagtgcagtggcaggatctccgctcactgtaagctccgcctcccgggttcacgccattctcctgcctcagtctcccgagtagctgggactacaggcgcccgccaccaagcccggctaattttttttgtatttttagtagagacagggtttcaccatgttcgccaggatggtctcgatctcctgacctcgtgatccccccgcctcggcctcccaaagtgctgggattacaggcgtgagccaccgcgcctggcctcttgagcactaattctacctgtgttaattcttgcccatctctgtgtcacgatggttcctcatgcagttttgatggtgcttgcatgtgtagttttgactatgtaattttgaattctgatttattgtcagtaagagctatgccttctatggtgatctatacatcctgggttgtgcactaagggaagttttttgtttgcttctgccagggtttcaggattctactgccctggctcaatctttctgtttaattctcaggtacctgtaggcattataactcacatctctacatggtgtattctgaggttttgatttcttgcaagtaattatttttctttttaatacaaagcacctgtagactagaagtttacgtttcagtttggctagcccttaacacattcggacagtgactcggttccaattcccttcttccttcatctcctgtcctcccctgggcattaaaaccccagttttcaggccaagtctgaaatccctgttgatcacatggcaacagctcctgcacattgttgtgagtctcattgctggaacctagggatttccattggtcaagcacaatgtcaacaaaacgtgacctacaattctacttgcttgtttctgggtgggggagtccctccccatcccctgatccactccctctgatgcctggatcagctgggagaggactgagcacaagttttatgtgatgcgaattctgttcatgaccaaaatgcaaagtgtctccctctgtttctttaaaagagagagattcaggtcaaggccaattcaaactccaccctccttagtaacttgaattaaaaatacagaatttagtgatatttttcttatcttctttcccactttatgagttgtaaatacaatggttattgtctacatgacagcaagaaggcaaggtattttgatatatatccagggagtttatattatagccttagtttatttgaatgtgacgtttaagtataggggattaaatttcttggtatttcgctaattactaacatactgactatacttttttttttttaactttaattattttcctccagtaaagagtagacctcctattggaggaagcagcctgtctttcacccataaactgttgtttgccacccttaattctgtattactctggccctcaaagcagtctcaccccgagatgagcctggacatgagtgtcatagccagcgatgtaacaagtagagaggctgtgtatgaagacactccatcttatctgccaatgtttttctgatctgtacaattaaggtgctctattaaatcagctctaaggttgtttcaaggttaagaaaaaattaaaatcataaatcaaaatttcagaggcattggaggattgagatgctacaattttggagtttataaattgatagtaaagagaattgacagaaaatgacctctgtcctgagaggaagcaaccccagggaagtcttgccagacctcacctccacctgctcttctttcagagactgcacaagaagggtgttaaggacacttatttccaaatctgtctccctccccacagcacactgctgggcaggattcaggcctcactgttttcttgattcttagaacctgtcactgatgcatgtgtgttgaccaaataaataacgctactgtttttcttacacttgccctttctgatcatgagttctaagttagtatcctgagtgactactgcttcccacttgccttattttcatcatctttcaactttctcctttcccttcctcaacaccaacaagccctacatctgcacgcctgattcctgcactgcaactcagagttttaagtcatgactatttaaactcacattgaaaacttgtgcctggttgtgtgctagaaatgtctccttggctctagctgtcttgcatcccagaaggaataaaaatctacatagctgcagaaggcaacatagccccacctgaaggaggtgagatcccggtgtgggagaagcaggcctgagtgacaggacatcggtatcggtcctttaagatgatgaggaagctgccttgccggcccagcattgcctccattttagctgcccatttaaagtgaaggaattcttaaagataatttccagattattactggaagaatagggaatttttatttcaaatttagaatgatgaatggtggagaaaatcttttaaaaattctctttacccatgtagctcatttaaaaaatgttttttttctggaccattaatgaagcaggtgtagtgttttatttattcgcagtgatgaacaaagtgaataaagccagtctgattttacctggaaacattatggaaaaaaaaaaagactcgccttccagatcaaggtagctctgccaatgctccctcagtgcctctgcatgagtgcggtcctcccagagctcgcctcttccctctgcagtcccgagctgcactgatgctcatgcgccacaagatggagccttcaaagcgggtcatttcctagtgcttcctctccatttccccctgtgaaaagtcaatgtctgggtttgtgagggtttaggaaagagaggcaaacacaataaggacgaggtgagcagccactgaggggagccacaggattgtcctaaaggaagcagacctgatcttggctttctcttgatgaacactgctatcagcgtctccatgaaggcacagaagacacgctcagcaggtgtgcaggtgacataaagccagaagggatagttggtgcatttggatgatatcgtaaagattctaaaaactttcagcaggatgaaactgaccaggtgaaagtgagcgggagcacatgcataggtgtgtcttcgatggagtagtaaaaacagatttggatggtgaaagaggagacctgaatctgtcccaaaccatactaacaataatcatggtgcctgtgatggttattacaatgtcatctcacacagcgctccgcagagtatggttcatggacagtgagctggcaaactgcttgttgcttggcctcaacaagatatggagctctggttagagtttcaatggacattatgacaaacttcatcacattttttagtacagccgaataagcaaaactttcccgaaggaagcagggcatcaatctaccttctggcttgaattcctcaacttgcagaggatctgccctgagaatggtgctaaaatttgaaggctcccctgtgtccgtactaagtacttagtactgattgtgttaagtacttcaaatgcatctttgtatttgtagagacatgatgtactttgagctggtgtagtggaatggttaagtacatacatctggaccagactgcctcggttccttcatttgatggataacaatacacagggttgttgtagtgaaggtcagaagtatagtgcgtttgaagacaccatgtttcttggcacatcgcatgtgctcagtaaaaggaagtgagtaataacgtgtttctcctcaataactctttgaggaaagtgccgttgatacctgattttattgatgaggaactgatctgagtttcaatgaagcaaaataaattgctgcggtcacgcagttcttaaaggcgagatccaagaccataaaccagggattttctgactctaaatttcaaacaaatgcttatccattatagaacactgccatttcctgattgaactggatcagtggcatttaagttttttgaccaaaactcaattatggttataatctatacacacacatacttgtgtatctaaatctgaaacataagttttattgataatacttgtctttcatatgtgcaatgtactctgatactttctactgcatcttattcagtttttaaagaaagctgggggtgaccgtcttagtccgttcaggctgctataataaacataccatagactggggtggcttaaacaacaaacatttatttctcacagctccagaggttgggaaatccaagatcaaggcaccagaagatacagtgtctagtgagggtctgcttcctggttgaaatatagcactttctcactgagtcctcccatggtggaagaggcaagggagctctctggggtctctttcatatgggcactaacaccattcatgagggttctaccctcatgacccaatcacctcccaaagaccccatgtcttaatgccatcatgtcgggggattacgacctcagtatgtgaatttggaagttgggggacacaagcatttggctcataacagtgacctacttaaattgatttcatggcccatgaatgagctatataacccatgacttgaaaatatgtaccagcaatttctacggactctttcattctaatgttctctgactctcctaaaaaacaaaaatacaaaaaaaactttcaaacccaattcccttcgtccagaacagaagactctgacttgggagcagtgcatgtgaaaaagaagtaagtattttatcgcaggtcgatatgtgaaaaccctgcaatgtggggacaaaaaactcacctgtaaggctccatcagggatcctgcatttcctcctgggaatcatattttaagagaaattaacaacctagactgtgttcagagaaggacagtgaaggtggggaagtttctgaaattatttaggaaactgagaatgtttaatatgactttaaggaagaagtgtctctaaatagtttatatgtatatgtatatgtgtatacatatgtatatatgtgtgcttgtatgtatatattatgataataggtctctgagttagtagaataatttttcagcattaaataggtcttggtccatctgacatggtattttgtgtaaaacttatgtttctcgtgtttttagattttgatgtctacagtgagaatcctgtaaaatgattatgactgcacctccctcctgtgagaggctgtgaaatgcaggcaggaaacagcccctcccaggttaagcggaggagctctgaagcttggcgttggcaagatttttgcccagcttcaaagggatttgaagggtggtgacaggctccagcccagactgcgcctcggaatgcagacgcttctctgcctagaacctggcccggccctatgggaaagccccggttctcggcggcactgaactggtaaaaagcagttgctgtgggttccctccctttctccccgactccctggccatgggattcaggaaaacaggcagtgaaaggcttcaacagttcctttccagttttccacgggggccccaaggaacgcctgcggctggaattccccgggagacagggagctgtaacaatagaggtctgcactgtggttgccgagggagggagggcttcttgttggagtgggtctccgcagatttgttggtggcttattaaattcaggaaggaaaggggagagagaagttgaatgtgactcaaagcttacttggttgggaaacctgggagcaaaacggggccaccaaaacaaagtggaaaaattgcagttgcataagttgtagggagaaaggataaatacttttgatagtactatgtttgtggctttgagttggggctgtgtctgggaaggttcgaaatgaagctggagtagttaaaatatattaatcttgtccgggcacggtggctcacgcctgtaatcccagcactttgggaggccgaggcgggcggatcacgaggtcaggagatcgagaccatcctggcgaacatggtgaaacctcgtctctactaaaaatacaaaaaagttagccgggcgtggtggcggtcacctgtagtcccagctactcgggaggctgaggcaggagaatggcgtgaacccgggaggctgagcttgaagtgagccgagatcgcgccactggactccagcctgggcgacagagcgagactccgtctcaaaaaaaaaaattatatatatatatatatatttatatatattatttttatatatatttatatatatatttatatatatatttatatatattaatatatatatttatatatattaatatatatatttatatatatttatatatttatatatattatatatatatttatatatataaatatatattaatatataaaaatatatatatatatatataaatcttgctgctcaaccttctgctacccaatgttaaatccagacacttgggtaacctttgatcatatttgagactgaagtggctttagagatactgaaacttcactgtagtcccggctagcatattcattcattcgctagctgttggcacctcatactgaggttaactcttagaacagaattatcatatttatttttggtagttatttcaagttctttcagtaggcttaaacaggttagtgagttttgcttttttaagcgcctaacacagtatctggcacatagcaggtacacacacacaaatatatacatacatatatatatatataattttttttgagatggagtctcactctgttgcccaggctagagggcagtggtgtgatcttggctcactgcaacctccatttcctaggtagcaattctcctgcctcagcctcccgagtagctggtgttacaggtgcgtgccactatgcccggctaatttttgtatatttttagtagagatggggtttcaccatgttggccaggctagtctcaagctcctgacctgaagggtacacaaaaatactgagtgaaagaaaatgctagatgcaggaaagcccatccaacccacccagctccttactttgcagataagttaaccgtagccaagggaggtgaaaagacttccagctggaatgggatcagactcagatttccagatggtcagccatatattttcccactgcaccatcctgccccctgctgcttgacttgtcaagaaacagtaggtgtttcaaaaggcaggggttcttcgagaacttcttgttctctatagttgacgttctaagatcagatttgaaggaaatttactttttgtgtgttccgcttcacaaagaagatattttctgcattgaggagaaagccaaacagattgcattctgctctaaacattaaaaccaagagatcacaatttgattgcctaaaaccaaatatcctgatttaaaaaaggattcaaacagacatttcttaaagaagacatacagatgggcaacaggtacattgtaagatgctcaacatcactgaccctcaaagaaatgcagatcgaaaccaaaatgagatgtcatttcacacatgctgggatggctgttttaaaaaaacagaagacagcaagtgttggtggagatgtggggaaactggaatccttgtatattgttggtgggaatgtgaaatggtgcagcagctatggaaaacagtgcagagattcctcaaagaattaaaaatacaaaacatctcgtgtatcctataaatatatacacctctgtacccacaaaaattaaaaattaaaaacagaactagcaagcctattacacagcatatacccaaaggaattgaaattagggtcttgaagaaatatctgtactctcatgttcatagcaacattattcacaatagccaggaagtgaaaacaacctaagtgtccataaatggacgaatggataaagaaaatgtgatctgtctatctgtctatctatctatctatctatctatctatctatctatctatctatctataaaatacatgactactattcagcctttaaaaagaaggaaatcatgctcttgcaataacatggatgaacctggagaacattacattaagcgaaataaaccagacacagagggaagaatactgcatgattccacttatgtgagggcttctaaagtagtcaaactcatagaagctgagagcagaatggtgattgccaggtgatgagaggaggggaaatggggagatgttgttcaaagtgtatcaagtttcaattatgcaacatgagtatgttctagagatctgctgtgtgacacagtggctatagttaacaatatggaattttgtactctaaaatttattaagaaggtagatctcatgttaagtgttcttaccatgaaaacaaacaaaacagcaaagacacacaggagactttgggaggtgttgggtatgtctattaccttgattgtggcaatagtttatgggtgtatgcatatgacatcatcaaattataaatatttacggttccttatacagcagatcctctaataatgttgtttcgttataatgttgatgaggaaaaaataatgtattctcagccagggccactgtctgtgtggaatctgcatgttccccccgtatctgtgggggttttctctgggtcctccggtttcctctcacaacccaaagctgtgcacattaggtgaacttgcatgtctacatggtcccagtgcatgagtgtgggtgtgtgagtgtgccctgccataggatggtatcctgtgcaagcgtgggtcctgccttgtgccctgagctgctggatatgctcagccacctgcgaccctgaactggtacaagcaggttggaaaatgaatgaatgaatgaatgaatgaatgaaggaaagttatgggttggaaaacgagtgaatgaataaaagttacaggttggaaaatgaatgaatgaatacaagttgattggaaaaaaaattcgtaagatctgtgataatcatacaaatgcacgacaataaacaaagaagtgttttgggagcctgttgtatttgtaatggttttcaaactgcgaggtgggaggaggtgctcctgacaattttcgctttgcaaacatttattccttgatttaacccactgccattacgaccactgtgacttgctgatttatcaaaaattggataaatatgttacttgtttttattaatctttctcaagtgtatatttcacatttatttcaatggctaatattaggagtgttgtagtgtttatttagaagtttggtgatgtttttatgaccaaatatatgctgtaggaacttgactcttgtttatatccatcaacttatgggaaaattggttttgttatacgttgctttgcttgaagttgcagtttccaagaaattatcaacaatattaagtgaggacttactatatatccattatgcctcaataaaactgtttttttgttttttttaatttgagacctttacccggggtcctggtgaccaaaattaaggccatgaggacattgagtgatttgatacatgtatcaccctcccaggcccctgtctccctgggcggcctgcactgcgcagtgcccagtgaccagctgtgcttggcctaaataagtgtttgtgtggttgttgaaataatgaataaaaagtagaaagaatacatgcttactgatggttgtcactgtacaaaagataactgacttgtgaattcttggaagtcattttttgttttgtttctttgtttcaggttcatattctaaagagagcaggcactgagcaaatgtttgttgaactgaaccaatctgctagttatggggacatgacctccacttcatggtgttgaactaaacaaacacatacttctccagacaaatattaaaactggtgaacttcaaaataacgtgaaaagctcctatgtttccatgcctcattatatgccacaaaaaatcaaatgataacgagaacaaagtaggttattttgtttgctatttaacttgtgtgcaggtcttcacagaatgagaggcataccaacactcatgaccccaggctagttctgttctttgccagtgtgtggtttgggagttctgtgaagtgtttgcagtcgctactaataatccaggtgacacggcaaacattgcagttcctaggtccagcacaattagaggagggttcactcgtaggcagcatctgagcaacaggctcaccagacttcagcctcttcactccgactcttccacgctccagctctcttcattaagatattctagaagcaactgaggagtttctacaaacattttggaaattacaggtaaaatatatgtgttttcttttctccttgcctgttttatagggaatgataacgaacatttaagtttttataattaggctttttaaaagggaggagatgtttaacttttatttaaatgtgaaaggttgcttaatggtatggaaaatatgccaaagatggtaaagcaagcagtggaaggcctgagctaaataactgtgtcttggttgctgtggggatggtgagtgaaccatttttcctgtgaggcatttttgcagatatttgtaaggtattgtagttttgagagggagtttggacagatatcctcacggcctgtacacgtgggccatgtatacgacttgtgatttgatctttaaggcctggggaaacccctggagggtgatgaacagaacaacagcatgatccgtcttaggttttccggaggagagtgggtcacgttcgggcaggactggctggaggcacaaagaccagttaggaggctatggagacagtatgataaaggatgactattagagactgagaaaggccacagcaaagaatgtaaaaagagtatggacaagatgagatggggtggggacatatttagggactcagtccccaactgggagaaggagaagtttaatatgactctgtggtttctaacttggatgatattaatttttcatattgttgagactgtaatttttcatgttgaattagtaactgttaagccacaaacatatttgcagccggcagaatgtagctcgagaggagaagcttcagggcatcatggcaggagcttgggctgtggaggctggggtgggtctgcgtttgaacccagctcctcctgggggagtgactgcagccaagtgcctcggaattcctcttgatgtgagggttgggacctccatcccccaggagttttggggatggggaagttgggtgagatattctaagtgaacgcactctgaatgtcagctatcacttttttctcagcaggtcaagtggaagtttgttttcatttcagttaaggtacgagttgttctgactgctgtgcagacattcacacgcccgctgctagaaagctggagctggaaggagcattggggcccgctgagtcctcctttctcatgtatggatgcggatgtggaggcaggccctaagtcttagtgtaggtgccgatggtgcaggtgagaagccccctggtaactcacttagtgctctatctgctcttccacactctccaacatgacgtcaccggtttataagtgagaagcaggtcacaggtccctaaggtttctgcgagggaggcaagcgttgcgcagtggttcagaacacctgctgcacgggttcatcccgtgcaccttctctcacctaagtttctgtttctatatctgtaggttgggaataatgctgtggctgtgtaaggccacaacacacagtgcttagcacattgtgagcactcaacgtagaaacagatcttatttgctctaggtctgacaggcctagagcttgtcatccaagcaggagacccacatggcctgcagcacatttagggccatctctatgtcaatagcatccaatggctttaggtggggcctggactggagcctccatgttgggggtgcaggcagggggcatgttctctcactcccctcggcattggagacaggtgccactttgcaggctcagggggtgtgacacaggatctggatgctagggagaccacagccgatggggaaagaccacacagtgtaaatgggtggaagtgggggatatactgggggggtggccactggatgagccaccctgggagattggttcctcagaagggtatctctcagtctgaccctatacactgaaaaagcaagtccatcaaaagcttctactattagagcttcttaactaaatccctagtaaacctctttacttcatttggtaaattcaaaattaatggcataatacttccacaaaaatataccatgaaatcattttccttcttctttttggccagagtttacacgttttaaattttaaactcagattccgagtaaacaaagtggttgtttaaattacttgtcatcgactccacagcaataggtgtttagtttctgtttatatttattttacttagtatcttagaaccatttaatagcaacataacagagcaaaaacagcacccttagaaacttgtatacacaatcaagacctgggcattaccatggttgaaggattccttcagtacaaggaaatactagagaagtttggcaggcatgacttaactggccaagtcatagagaaagtgaacatcacagatggtcagcttgtaaaaaagtgagatgtggcttttcagatgattaactggcagaaatgtgcaaacttttgccgttggattcttttacactaggttgactcacttaaagaagaatttgaatcattatctaacagaaaaagatcaataacaagcattattgctggaacattctatggatagactgctttctatacatgattggtgaatattgtatttcaattaattatatatcctgataatatatgaattaatactgtgatatcctgcatacaataacaataatcaatggaaatatagtaaaacagaaatgaaaataattttgcttttccttgagaaggtatttcaaatttttgtagtatttcagggacattaacataaatgccacttatcacaacaaagtaccttagctacagaaggtatatgaaattgactgtcaaatgaatggatggtcctcaaacttgtctagagaaatatgagatcctgacagttaaaattaagtaatttaaagtgaatcaacctttaaaaactcagcagctttgctattactcaaatgataaaaactccgaatttaaaatttcatgtcatagctatgctcacatgtaaaactagtgaatatgaatatgggagcaacatttttcattaaaaaaggaaagactgatcaattattgcttttattaaattgcatgattcacatctgaagctatttaacatttcagagaacgcatgcctgaggctgtaataacatttggtatataaaccagtctgtagaataagttaaaagaaatattttaagtaggctgggtgtggtggctcacgcctgtaatcccagcactttggggagctgaggtgggtggatcacctaaggtcagcctggccaacaggatgaaaccctgttgctactaaaaatacaaaaattagcagggtgtggtggcaggcacctgtaatcccagctactcaggaggccgaagcagaagaatcgattgaacccgggaggcagaggttgcagtgaaccgagatggtgccatggcactctagcctgggtgacaagagggaaactccgtctcaaaaaaaaaaaaatcttttaagtaatattaggataggtgaagtattagtataagttgataattttcacattagatttcaacattaattgatcaaaaatcatttttctagcaggtgctagacagatagatggcatcttctttcacatagaagagcaaagcagttttccaaaggtctttgaaattccccagggagttctgtgcaaagaccacggagacaggtgaatgccttctatttctacaggctttagcctgaatggataatgcagttgctggtcaaccaggcaggccatatggagtcaccctttactgaggcccctggtaggcccagtcctacagcagtcaaagatgtcccagtaatgactgtagactcttactcttaactttacatcctatcatctgttcctcaagcctaaatcagctcttcagagagagagagagaggaaaacataatttgtttccccccacacctcagagcagaagagtcagccctcagggctggcttcctggtctcaggctccactctggctgctggtggcttcctaaggagatctgagattgggaacaggctgagagggaggagggcctcttgttcccttgaccacacaggaaattcctcagggacacgctcactctgttatgggctcctcagagcctctctcagaaggaaagactggcagtgagtggagggcagcgagtcagggaccatctcatcttctcggctcagttacctccccgggtacccatgtccacatatgtgatgtagataaaatatctcccttgcagaggtgcttgatatttaagagtccagcacattttgaatggcttacaagtgtcagctattattactatttgtgtgtgtgtgtgtgtggtttttttgtttgtttgtttgtttgcgatggggtcttgttcctcccaggctggaatgcagtggcgagatcatagctcactacagccttgaattcctcggctcaagtgatcctcctccctcagcctcctgagtagctgggattacagttgtaccccactgtgcctgactaatttattttttattttttgtagagatgagatcttactatgtagcttagggtggtctcaaactgctgggctcaagtgactctcctgcctctgcctcccaaagtgttgggattatagacatgagccaccacgcccggcctactatttgtttttgacaaccaaaatcttcacaccttggccctaaatctcaatacatttgtctagcaaatggaaatagcaacaaaggactaatccgtgtcagcagaaatgttggctatttcattagaaatgtgagtaaactcatcccaggagctatttcaagttatgctggtgtgagagaccgctgcggagttgttgcccaactcagatctcctctgggtggcacttggcagcctccatctctgtcctggtattcatgatcccggaattgtcgggactggtcagcacagtggacagatgccattacagtggtggtcttcagtctctggagggctttcttaatgtaagcttttttactaggaggctttccctctttggtcattgcagggtctgaggatgccactaaaaagaatgtcaccaattatgggtgcctaccgggtgcaggtactgagctcatttgctgcagaggggtggggtgaggactctggagccagggcttgggctggaaacctagatccagcacttcacagtgcaagtgtgggcgagtgaccaagctctgtaaaatgaagtttcctctggataaaacacagaatggaagtactgagctcagagggttgttgtgacaataaaaggtgttcagtaagtgttcgctgttgacactgtctcatggcaccttcatgatgtcttggtgattgtttcagtcccgtttcacagatgacaaaaacaggctcatagaagcggtggactctgtgacacacactgaataagcagagaggctgtgctttggggttagagaagaattgcagctgtttccactccgaaccttagaattctgtttctccctagttaccaatacactttgagcaagccaattttattggacttagagacccagcacacctgattgattccttgtggtgggagatgtgaatttcctagtccagtctctttgaggattgaaagagctcagtgagaagccagcagagttggcaaggttgttgatttcagtaacctgtgggcacacatctgcaggaattacaggtgcaccccactgtgcccaactaatttattttttattttttattttttgtagagatgagatcttactatgtagcctaggctggtctcaaactgctgggctcaagtgattcttctgcctctgcctcccaaagtgttgggattataggcgcgagccaccatgcctggcacagaagctgagaaccacagcttctcagagagaaggtgtgaacagacaggagtgtgtcagttgcctgggatttacaggcagcagagacagagagtttctgtggggcatgtgctcttaggaatgtcctggagagaagtatgctacctgtgatctgctcagtgtgcaaggtccaggaagacagatgggccagccatggaggtgaacagcaagtagcaaaaccttagctggggctgggtgtggtggctcatgcctgtaatcccagcactttgggaggccaaggtgggcagatcaactgaggtcaggagttcgagaccagcctggccaacagggcgaaactccgcctctactaaaaatacaaaaattagcctggtgtggtgtcatgcgcctgtaatcccatgtactcaggaggcgaaggcaggagaatcgcttgaacccaggaggtggaggttgcaaaaaccaaaaaccttagctggcccaaagccctttatactggtccatttgctcttacagatccacccagacaccaggattgcctcaccctgccatagaggggcatgatgagagaaaatccacaaagttcatcaatagcccacatgtggttagggtatgtgagaaacaaggccctcactgttactctctgggggtggagagcggggattggggggatctgggttctgactggcctggtctctcatcagacttacttcctacattagacttttagggatgctggaacaaagcaccacagactgtgcggcttgaaaaacagacaatgactgtctcacagtctggaggctggatggctgagatgaaggtgtcagcagggttggctcctcctgaggctctgggggagacactgtccagtcttctccccagctctgcgggtgtgctggccatctttgacattccttgcttgggggagcatcactcctgtctctgccttcatcttcacactggtgttctccctgtgtctgtgtccaaatttcctcttttataaggacacagcccagctggattcggggcccaaccccactccaggatgactccgtcttagccaatcacatctgcaaagactctatttttcaaatatggtcacattctgaggagctgagggttggacttcaacatatgaatctggagtggagctcagggaagtggggcacagttcaacccttaacatcttcctttttcttaagaataatcttcaacttctctccaccccaaacttaatcagtgtcgtcctgataagagagggagacgggaagactcaaaagcctgcttcagaaggcagtgagctgaccccaagctattctagaggttggtgaaagttaaagtttaatgataagccttctgtgttgactccttccaaatcactcaaagggcagctcacgtttttggggctgtgtcatctgagaagagtgaaggacctcacagggtaaagccccgcccctcccatttccttctcccccaggaaggagtggctagaggaatgggccaggcaggtcaaagccatcagattttagaatctctacctggtggctctctccttccagctgcttctctgagggttgtcttagtgggttagttctttttctctggcattagctgtggttttgtaacctgaggctggccaaggagagctatagatggtggctcccagctgagctcagcgccactgctaccaccagaccctgagcctccaccccagtcatttgaaagtgaaagaaaggtaaaagatatttaatgcttacagattattcacaaagggctcaaaccaacaactagtaacccagagacaaaactactttaaagtgtgctaagttagacatcactaaaatgtcggatggtaccgaggcccaaggtgcgctgtgtggagccagctgaggcaggcagtgaggtgagccacgaactctgaacctccctggtggcagggagcccggtgtgaggtctggaaaatagagccaatcaattcacttgcaagtcctggctgcagttctgggctcaccctgaaccctgggtgttccctgatgttcctatagctgatttcaatactcaagtcacggtagttcaaagggcaatttgacttttgcttgtccaaagaaaacttttaaaagaaaaactcttcaatataggcaactattttgtctcttttcacccaaatgcctatttgacatgtttgtcagtctctcagtcgcggaatgtgcactgttaccatcagctaagggctttcattatattctggtaaatgggccagtttaacctggacatcagtatctaggcatcttttttacagtctcagagcctaatacctttcaggaaactacaaaaggctttatttttaaagcataattcaaagcttatcaaagtcacaggaatttcacttattattatgagacttcctgaggaaaagtaaagtaaaaatataggtaagcaggcttctagaactttattttttagcaggtgggatggagaagaaaaaaatactactactggttttgaggtcattattttttcagtgtaatggactttaaaagcaataagcaatgggaagctggacctcactttgtaggttcagggaaaaaaaaaatcacccttcttttgtgtggtagaaaacctcttgtaaatgcatagatttgagaccatgtaacaaaattcttgggtcctctgaagcatttctgtaaaatttatggaagaaatgcttgtgattggtgtgatctgtgattacttcattagatcaggctttgcctatacatccaaatgatttattttcttgtttatgtgtgtgttgtggttaggggaggtagagggggatttgtctgtagcctaatgcttggcacacagtagaagcttctctcagataattttggcttcaaacaaaagcagcatgaaaagcagacacatatatttctttctcattaaaaaatgtgaaatatatagtccagggctggtatggtggacctacagtgctaaaaccagactctatttttccattctgctgtgattggctaccattcccatggtcaccttatggtccatgaaggctgctagagctccagctattcaaccattctagaacaagaaggaggaaaaggggagaaaaaggggacccctctttattcatgagtcttgctgaaggtaccacataacactactgtttccagctcagtgattggaacagtgacatggtgacaggtggctgcgacagagattgggaaatatgcatggattagggaaaaaagtcagaatctttttattaaaaagaagggaagaatacattttgagagacagctagcaatccctgctacactgcccaaaataatgtttgttgaattgaattggatcaattggccagaactggtggtagtgttcctgagttattttgttcttgagttattttgttcttgagatatttggagatatgttgttgaagatattttatcttcctccttgaaaaatggagtaggatgtttctgtacctttagtgtgataagtgtgggacttgggagacagaatgctgacataagtacttcttcagctgacaccaacttactctgggcaaggacattaagacgcttgtgctcttttatcttaaggaagttgggtgtgaacaagaatggtgtgagacacatgctttcaagttccctagtatgtgccaggcacattgtaaggtgaaaatgaagtgctctggtgatgaatgagaacaatctgaggatcttatctctccagtttcctccacatagtcaccacaggggacaaaatctggagaagcctccagttccctcatgaatttggaaatcactggcattataaatggttccaccacttgtttttttgtatgaccaaccaacaataagttatttaacattgctaagcctcagtttcctcatcattaaaatgagagtaataaaaatccctatgttctggggttgctgtgaggatttttaaaaatgcatgtaaagagctttgctccatgcctggcacatactaaatactcaataaatattagctgttcttattaataatgcaaaaaagagcagaagaaaaatgcccaaagttacgttcccaggagagcaagtcctggttggatgattaagtaattataggaagattatgtgtcagtcagaagtggggagcagtcatggagggcctaggaaggcacacagcacacaaagaccaggccacctgtctgcccactctgaccgagaggccttctcagtgaattggtttggattcttggggtcccaagggaaaggctttctcaattgtagataaaagtacacatggctatattagcatgatgccattttgcatttgattttggttcctcattcactatataatcttgtgattgtaatttgccttgccttgtagatctatgtacggggaaagaatgaatgggccatattggcttgagtattcagctgtgattcccattgtaagatgaacaaagtggcattctgatattatacattattctctttgaggttggttaatgtgagtctgccacccaaatgaaaaaacattcactgtctctgcccaccatgtgcttcataggcatcttcttttggaactttttcccagaagtttttacaccaagtaatgaatataggaagctgtcaccacagattcactgagggcccagtggttgtcaggcactgtattaaggactggggaatatggcagtgaacaaaagggacactatccccaccttgtggagattacagtccagtaggacagagagttggtaaactattactacatcatcacagacgacgtaccgcatgatgtcagaaagaagcccagtcataggagcagtaagacagggaggtggacacagacaggctggtgtaggaaaggttccctctcagtctccacctgagacctggaggacgagtgggagtatggagagagcacataccccacactggagtctgcgtgctcctcttccaccttccttgtcatgggtgttgggtggggacacgggaagctacatcacgagccctgtccccttgaatctggacctgtccactctgcgtgttcctttgaacgtccccacgcttgtaccctgtgtggcagctgctgcagcccgatgttgcagcctcccctaagatgtggaaaacccaactgcccagaaggaagcctgtgctcctggaatgtcatgagggagggagaaggaaagacagcatcacaatattcatcctggctggatgctgtctccattcttcagaaaccaactgaatgggtgttcagtattctgtgaatctttgcttttatgtacttttttttttttttgagacagagtctcgttctgtctcccaggctggagtgcagtggtgtgatctcggctcactgcaacctccaccttctgggttgtagtgattcaccagcctcagcctcctgagtagctgggattacaggaatgcgccaccatgcccagctaatttttatatttttagtagagatggggtttcaccatcttggccaggctgtctcgaactcctgacctctggtgatctgcccaccttggcctcccaaagtgctagaattacaggtgtgagccaccgcaccagacctaggtaaactttttttttttttttaatcaaactattctttgttttcaaacaaacacacggaacacattctcacagaaacctaacaaccaaaaagtgtcggaaaggaaaactggctttgtgtttcacattaaataatacaatacttgttcataatttatcttttcagcctgctagactccatttttaagtagaaaacagaaagacagccatcaggcccaagagaagtcttaaatatatctttgaagtttggaagtgactcatgccgtgagtctggaagtgtaggtttcttttgaaacatgcactgctgccgcagctgtaatcactgcctcctcagcactggtggcctaggcaggcaggagggctcatgtcagctgtgactggccgtcatcacatcccacaggacactcttgctccttctgttgccagccctacattctcccccttctgcctgtctagacagccccttcccttagagaaaggggaggccctgtgagctctgcactggtcctgcctgcagcacacacactgtgccctccccctccttactctgttgggtgctaaatccttgcctccattccccatctctgtgtaaacctcattggcttatgaaagtctcccttggcccatagactgatttccccaggacagcctctgttccacagcacacatcacacttgcagtcacttttatagagctgatcttcctgggaaactctgggtcctccttggcagggactgtgtcttcctgctcatggctgtgtcctggtgcctaacatatcataggtgcttaatgaataggtttcttgtctgagagatgtggcccctccttcccatgaccacagtcaggtttctcagagtcaggagtgggctcagagcccctatgcaccccagtcctgtatggcagcatggatggttccacttagaccagctggaaggactggttaagatccatcagctcaagtcttccttttcagatgtggcaacaggattagtttgctaggactgtcaaacaaagcaccataaactgggttagttagacaacagaaatttattgtctgccagttctggaggctggaagtctgagatcaaggtatcagcagggttggttcctaagggcagtgagggaggatctgtccaggcctcttcctcagctcctggtggtttgctggccttttttttagcatttcttggcttgaggaagtatcatcaatcttgcactctctctgaaggtgtctatatccaaatttccctttttttgtaaggacaccagtgattggattagggcctaccctaatcacctcatcttaacttgatcatcttaagttaagtcatctatttgcagataaggtcacattcacaagtactggggggaaggacttcaatatattttaaggaacccaattcagcccaaaacagtgactcagtttataacacattatcctccctgctgaaagatgatcctactcacccataataaaggggtcatgctattttcccaggtgtagtcttatttgttgctctttgtgagcaggaactggaagacagaggaaaactctggttataaaataagaggtcatctgcctgggtgatggggctaattgctaagtctggaacatggtctgcacagggtgtttcagctgaccggcatcaggcccacttgactgaacatcccataagaaccccaatcacaggagttcagttaatcttctggatcaataaacaattatttagagaaagtgactttgtcaacaatttaattaaaatcacccaacctatgaaattagaagtaattcaagtttgagcacatattagctgtgtggcctaggcaagtcatttgtctggatagcaacatactctctgtaaagcactgggattaggtaacctctgaagaccctttcgactggaaccttccttggattatgtggttcttttcgtgttgaaagcagaaaagctctctaaggagttgggatatacaagtatgaaaagaaattaaatgaagtgcttttcctcttcattatcattgtagatatgaggtggttcttgcctctgcacggaagaaacatgctagatctctgtcttgatccacttttatgtactcaatgtctactccttgcaagagataaaccagcacacaggacatgggacctttgctgatagggtaccattcttggctcaccctgctggtcccaccctgctgggctggtggtgttagaatttgcatgggttgaatgtatcattttcatcttcaaaataaccaattttccaaagagttatttctgtaagtgtctaataacatatttaagaaccaaatcagagtgtcagttgtacaacctagtcttcaggctatagacactcactttttacaatcttggcataaaaaatcttactaataatagtgtcttgactataaatagagattttctaatgtcctctcctgctattgtattgctcattacaatgctcaatgtatcataatccctttttttggccataaaactgtgcctcttgattgtgagaaggatataaaatagacccagatgtcttaaccaagtttggataaatcagtcatcaccttctttttttccagtaagaatgaggcataacagcttgagtgatgcacagactttattttccatttggtctttccaaagcaaacagaaccaaggtgtaaagtctgctaatggcactgtgtcagccgtgtggcattcagttttaaggacgcgaacatcactattgtgaaaagagagggaagttaaattgttagtgtttagtctcatttaatattaagaccaaaaataaaaacctcaggagaaagacaaagagaatgactaatgaactcagttctagtttaatgcttgagaggggcatagactttgatatgaaactagggagacgagctctcaatacggtagcttttccctcaaatataagaattcttagatttaaatttaaatagtaaattattttagaattttccgttttgcaaaaaaaggtaataataaatacaagaagtcccactcaacaaggtcataatgaggcagagtggatctgcagtaacataacaatagtcagacaccagagcattttttatcccaacattttatagaatgtgttatgtgttggtcactagatgggtgttgaatatacatggcatttaaaacacaaagctacattacaggattggaacaactccaatgtttaaatgaagaaaacataacataaaggggttaatagtctgctcaggctcatccagttaggaaacatttaatactaaactcaggaatcaagaggggagcagggccatttgactcaagtcctgagctttcagaagacttgggttttcctatgaagaggacctgcatgtgtgcagatactgctctcatgctgctttccaggtgcgagaataagacgaacacaaagatctggttgtgataccaattctgatggcatcattaatctaagccaggcctataccatggagttagaaggaggattggaaaaagtcctggcaatgctgcccgtgacagtctgaggcactacagggcacacagagatgagggaaacacagttcctcagagcacttttaggaaggccctggtagtgtacatatcatgataacagggaggctccaggtgtcatgaaacaactgtgaaagaatgctattgggagccgaagcggggtgagaccctggtagcaaaggcctttctgaagcccattccacgcatggctattgctggtggtgactgcagcactaggagacaggagaggaaaggtctgttagaggaaggggagcatggcacgggcctcaaggatgggtaggttttgggtaagaagaaagggggtgggagatggcattccgagcagagggaataataagagagaggcataaaggggagcatcacttgggacaaatattgggagatgtagccctaaatttgtaagactggggcctgggagcattccattccagggattccaaacttggtctgaagattgtctaagaaatctgggaataggctttggttagtctatgaagttttatttgaaactaaatatatgtgcatgtttcacttatctatgttgttggattaaaaaaaaccactccagagttaacttaaaaatgaactgtcttaaaacaacaatttcttatttcttctagttctgtaatctgtgttgggttacctaggaacgaaaaaattgttccagaaccccagtctggtgtctggggccctgccacctattttcagccctccttcatgttcagtgcctaccctcctgctgagagtttgaagtaacagctaaccctatcaagggattcctcattaaaggccatctttggggatatttctatattttatattgaaacttccactgccgtcaagtacagaacttgtacaaaagagtgggtttcctgaaggccagttttgactcaacacaaataataacattattttatctagagctgttcaactatgaactttttcccaggtcaatgagtcctctaataatagatgatttgaagcagagggtggatactgtgactcagggtttctgtagatacaaatccttcaccccaagactctactgcaccagcagatgctcttatgatgatctggaagctgtgaagggtcctgatttagctgttccctaatgtaacaaggatactgagatggagaaaaaccaacagtgttaggaaacagcagtgcacttgataactggaagaacaaacaatgtctatttctttctttaagaaaaattattttttttttaatttttagtttttgtgggtacatgctaggtatatatatttatggggtacatatgttttgatataggcatgcaatgtgtgataatcacatcatggagaatggaatagccatcccctcacatttatattttgtgttataaacaatccagtttacacttttagatattataaaatgtacaattaagttattacgacaatcgtcacctcgtttgctatcaaatagtaggtctttttaacttttatttttattttagtttcaggggtatttaggttcatgtgctggtttgttatataggtaaacttgtgtcatggatttgtgcacagattattttgtcacccaggtactaagctcagtacccaatagttattttttctgttcctctccctcctctcgcactctatcctcaagtggggccccagtgtttgttgttccctactttgtgtccatgagttctcaaaaataatgtctatttctgtagcaccgttatcaataggtgagagtgttgttctttctcacgtgagtgtgtgagcagagagaaggcaggtgctactttcttaaacattctgtagttgctgcattaaaaggttcccacctgtgtgctatttatatatcctagggagaaaaagaaagaataaacctgtcagactctttttttttttttttgagacggagtctcactctgtcacccaggctggagtgcagtggcgcaatctcggctcactgcaagctccgcctcccaggttcacgccattctcccgcctcagcctcccgagtagctgggactacaggcgcgcgccaccacgcccggctaattttgttttagtatttttagtagagacagggtttcaccatgttagccaggatgagtctcgatctcctgacttcgtgatccgcccgcctcggcctcccaaagtgctgggattacaggcgtgagccaccgcgcccggccagaacatgtcagactcttaacactgattaatgctgtaatcagcctggcaacagctgctggcttaacaacttcatttgcagccacagaagtacgtgtttctactcttgcattacttaccggcaacctaatttatatcgagcctcttctcatgctttaaagatgttcttcaaagatatgttagatgtcagcaaagtcatcaccagtcatgtaacgtggatgatgccattgggattacaatgaagagatcctagcctgtgggttctcattttaattcggaatcatagtgtaattaattatccttattctagacatgtaacagatctggttacagtcaaaggcagggaaaatattagaagtctggaagtgaaaacactgggaagtgatttatcttcagggcaagagttaatctctttccactttgggtctggaaattcatgggttttgttttctagataagacttcctacaacactggccaaccagaatatgttggttggcaattctaggtgtggacggtgctttctgttgccccaggttaaatttgatagacatttctgaaaacttggtttgattaaactgattgatcaggatagttttaagtttctttgtaatgtatgctgttatttgtagttgctctatgtattattctaagaatgtatatatgaaatgaaaacttaattttctttttttttgagatggtgtttcacactgtcacccaggctggagtgcagtggcaatctcagctcactgcaacctctgcttcccgggttcaagtgattctcctgcctcagcctcctgagtagctgggattacaggcacaagccaccatacccagctaatttttgtatttttagtagagatggtgtttcatcaagttggtcaacctggtctcgaactcctgacctcaagtgacctgcccacctcagcctcccggagtgctgggattacaggcgtgagctgccgcacctggctgaaaactttaaatcagtgaaagctatctgaatagatgggaaacaactgcctatttttggtgtaaaaagtgtcaatcatttatttgtgatttatatgtaagagggaaaatgttgctgtcatatttactgaaagataaatgctaaaaaaagaatatgccttctatgtggtttttcatgtttacttgtgtactttttttgcttatgaaattttgagaatagtgtattattagattcacacccacttcttaagtcgtgtgttatgaagcagtcacatgtgttgtgaattacttatgaataataatgatagctaacatgatttcttactagatactatgctactttatctcatttaatcctcaagataatattgtaagatatatactgtgatatcctcctcatattgtagatgaggaaatggatgcttagatagtttaactacccctcacggagctggaaagcgtacaggaggggctcaaatccaggtgtgaccattgttcaactgcattgttaaactgcacttcactggcttttcacacggtgccttgataatttcagacttggataacttccaatgatgagaagcttggtagacattttcagagaggaggagatgaaagcatgacaaacattttcttttttttttattattatattttaagttttagggtacatgtgcacaatgtgcaggttagttacatatgtatacatgtgccatgctggtgtgctgcacccattaactcatcatttagcattaggtatatctcctaatgctatccctccctcctcccccgaccccacaacagtccctggagtgtgatgttcccctgacaaacattttctaattatagagcgagaaatgggagctcagaggaatcaactaatttttaactttttaatttttatttttttagggacagcgtctcattctgttgcccaggctggagtgcagtggtgcaatcatagcttattgcagccttgaactcctaggctcaagtgatcctcttgtctcagcctcctgaatatctgggactataggtgcaccatcatgcctggttaatttttattttattttttgtagagatggagtcttgctatgttgcctaagctggtcttgaactcttggcctcaagtgatcctccctcctcagcctcccaaagtgctaggattataggtgtgagccactgcacctgacctaattttttaagaatattagttgacaaaaattagttgaaattttccaaaagcagttctacatctcatgctatatttcatttcttttgcctctgaattttactctggaagtgaaatattttaaaatttctaatgaaggtcccaggatcatgtagtacctttcaaataaaaatatcctatatcatgtgtacataaaataagctgctgtgttcttttgtttagttaatcaaagaagggttttcaacatttattatgcactacacaccgggctaagcaaggtacttcatttaatcttcacaagcatggtgtaagctggtattactgtagctgaggaaacagtctcagggcagttaagttccttaacaaaagtcgtacatattgtaagccacagagctgggattacaacccatgcctgcctcatcccccttcttagaaacagatttactgtcccctgaagatgagggaaataaagccatttccccaaataagcaatttctatttttttagttaccttccaactctcttagttccaatgcttcacttgtaaggttggatgcttagtcaatatgagttctaattcaaaatctgcctcaaagtttcaaaagctgcgctggtgtgttgtttcaagaactccaatctaatcaccatagtctgtctaggaaacagacatcaggggcctgaagtgtccagatttccacttggtgttatctcagtagacacacagctgcaaatcagtagcaacagacagcctcgtttaatgattcttaacatttccctccaaatgagagagaaaactaagcaaaccgaggatgagactagtcagcatgttttatatccataaagactcaagaagctgaaatgcaggattaattctgaaggctgaagagctggaagtattaatgactcaccttcctaaggagaccaactcctctcttgtcacgttgagtgatgaagactctggtgtcttgtggcatttcccccccagtagatggggcatttgggattagtgagttgcctgtaggaatgagtcctaacattctcttacatcctgtgtcagggagaagttctgggtcagcatccttatgacacgtgatcctgtaagtctgttctgatcctgattcaaagctttgaatgggtccagcatctttgaaaccaccatgggatggtcggcaatctaaatgtggtcattgtgcatcaggctgctgttcctttgtcttgctcgcagttagagaagcagggacctctctatcccactctgtactctggtgtttccctggcctctgagcctaagttccttattccttcaagttaaatacatgtgccaatcccttcctcagaatcagcctgcacacgggtaactgcaatgttcaccaacttctctccaggactggtagaggcagcctgtctcctgggagtgcagtgctctgctccctcacattcctcctgggctaggagaggacctcctgtttggacttcgagagccctggaccaggtaccaacaaaccctgacaaaggtgctgtagtaatggcccagagcagcagaaaaagcaaggcttttttagacagatgacctaaatagtggctccaacacacattcaaccggcttgaagcccccaggaaatgctcagtttccttatctgtagaatgaagtaactgctgtgcaggtcagagtcaatgtatataaagcacttggtgtaatgcctggcatgtaatagccacttaataactggtagcatttattatgtctttcaatgaactttccagacagtgggaagctaaatgtatcgtagacttctttttttttttttttttttttttttgagacagagtctcactctgtcgccaggctggagtgcagtggtgtgatctcggctcactgcaatctctgcctcctgggttcaagtgattctcctgccccagcctccagagtagctgggactacaggcgtgcgccaccacgcccagctaatttttgtatttttagtagagatggggtttcaccacgttggcctggatggtctcaatctcttgacctcgtgatccacccctctcagcctcccaaagtgctgggattacaggcgtgagccactgtgcctggccaatgtagatattttatttatttatttatttttgagacggagtcttgctatgtcgcccaggctggagtgcagtggcacaatctttgctcactgcaacctctgcctcctgggttcaagtgattctcctgccccagcctccagagtagctgggactacaggcctgtgccaccatgcccagctaatttttgtatttttagtagagacggggtttctccatattggccaggctggtctcgaactcatgaccttgtgatctgcccacctcggcctcccaaagtgctgggagtacaggcatgagcaactgcgcctggcccaacatatacatttttaagcctttgggatagtttgtaatattggaaacaatgaaatcaggactcaaattctttttatttatttatctatttatttttttttattatactttaagttttaaggtatatgtgcacaacgtgcagttttgttacatatgtatacatatgccatgttggtgtgctgcacccattaactcttcatttagcattaggtatatctcctaatgctatccctccccccttcccccaccccacaacaggccccggtgtgtgatgttccccttcctgtgtccatgtattctcattgttcaattcccacctatgagtgagaagatgtggtgtttggttttctgcccttgcgatagtttgctgagaatgatggtttctagcttcatccatgtccctacgaaggacatgaactcatcattttttatggctgcatagtattccatggtgtatatgtgccacattttcttaatccagtctatccttgttggacatttgggttggttccaagtctttgctattgtgaatagtgccgcaataaacatacgtgtgcatgtgtctttatagcagcatgttttataatcctttgggtatatacccagcaatgggatggctgagtcaaatggtatttctagttctagatccctgaggaatcaccacactgacttccacaatggtggaactagtttacagtcccagtaacagtgtaaaactattcctatttctccacatcctctccagcacctgttgtttcctgactttttaatgattgccattctaactggtgtgagatggtatctcattgtgcttttgatttgcatttctctgatggccagtgataatgagcattttttcatgtgtcttttggctgcataaatgtcttcttttgagaagtgtctgttcatatcctttgcccacttgttgatggggttgtttttttcttgtacatttgtttgagttcattgtagattctggacattagccctttgtcagatgagtagattgcaaaaattgtctcccattctgtaggttgcctgttcactctgatggtagtttcttctgctgtgcagaagctctttagtttaattagatcccatttgtcaattttggcttttgttgccattgcttttgatgttttagacatgaagtgcttgcccatgcctatgtcctgaatggtattgcctaggttttcttctacggtttttatggttttaggtctaacatttacgtctttaatccatcttgaattaatttttgtataaggtgtaaggaagggatccagtttcagctttctacatatggctagccagttttcccagcaccatttattaaatagggaatcctttccccatttcttgtttttgtcaggtttgtcaaagatcagatggttgtagatatgcggcattatttctgagggctctgttctgttccattggtctacatctctgttttggtaccagtaccatgctgttttggttactgtagccttgtagtatagtttgaagtcaggtagtgtgatgcctccagctttgttcttttgccttaggattgacttggcaatgcgggctcttttttggttccatatgaacttaaaagtagttttttccaattctgtgaagaaagtcattggtagcttgatggggatggcattgaatctataaattaccttgagcagtgtggccattttcacgatattgattcttcctacccatgagcatggaatgttcttccatttgtttgtatcctcttttatttcattgagcagtggtttgtagttctccttgaagaagtccttcacataccttgtaagttggattcctaggtattttattctctttgaagcaattgtgaatgggagttcagtcatgacttggctctctgtctgttattggtgtataggaatgcttgtgatttttgcacattgattttgtatcctgagactttgctgaagttgcctatcagcttaaggagatttggggctgagaggatggggttttctagataggcaatcatgtcatctggaaacagggacaatttgacttcctcttttcctacttgaataccctttatttccttctcctgcctgattgccctggccagaacttccaacactatgttgaataggagtggtgagagagggcatccctgtcttgtgccagttttcaaagggaatgcttccagtttttgcccattcagtatgatattggctttgggtttgtcatagatagctcttattattttgagatacgtcctatcaatacctaatttattgagagtttttagcatgaagggttgttgaattttgttgaaggccttttctgcatctattgagatagtcatgtggtttttgtcgttggttctgtttatatgctggattacgtttattgatttgtgtatgttgaaccacccttgcatcccagggatgaagcccacttgattgtggtggataagctttttgatgtgctgctggattcagtttgccagtattttattgaggatttttgcattgatgttcatcaggaatattggtccaaaattctctttttttgttgtgtctctgccaggctttggtatcaggatgatgctggcctcataaaatgagttagggaggattccctctttttctattgattggaatagtttcagaaggaatggtaccagttcctccttgtacctctggtagaattcggctgtgaatccatctggtcctgtactttttttcattgataagctattaattattgcctcaatttcagagcctgttattgggctattcagagattcaacttcttcctggtttagtcttgggagggtgtatgtgttgaggaatttatccatttcttctagattttctagtttatttgtgtagaggtgtttatggtattctctgatggtagttagtatttctgtgggatcggtggtgatatcccctttatcattttttattacgtctatttgattcttctctcttttcttctttactagtcttgctagtggtctatcaattttgttgatcttttcaaaaaaccagctcctggattcattgattttttgaagggttttttgtgtctctatttccttcagttcttctctgatcttagttatttcttgccttctgctagcttttgaatgtgtttgctcttgcttctctagttcttttaattgtgatgttagggtgtcaattttagatcttgtcttctttctcttgtgggcatttagtgctataaatttccctctgcacactgctttgaatgtgtcccagagattctggtatgttgtgtctttgttctcattggtttcaaagaacatctttatttctgtcttcatttcgttatgtacccagtagtcattcaggagcagattgtccagtttccatgtagttgagcggttttgagtgagtttcttaatcctgagttctagtttgattgcactgtggtctgagagacagtttgttataatttctgttcttttgcatttgctcaggagtgctttacttccaactatgtggtcaattttggaataggtgtggtgtggtgctgaaaagaatgtatattctattgatttggggtggagagttctgcagatgtctattaggtccgcttggtgcagagctgagttcagttcctggatatccttgttaactttctgtctagttgatctgtctgatgttgacagtggggtgttaaagtctcccgttattattgtgtgggtgtctaagtctctttgtagctctctaaggacttgctttatgaatctgggtgctcctgtattgggtgcatatatatttaggatagttagcttttcttgttgaattgatcctttaccattatgtaatggccttctttgtctcttttgatctttgttggtttatagtctgttttatctgagactaagattgcaacccctgccttttttggttttccatttgcttggtagatcttcctccatccctttattttgagcctatgtgtgtctctgcacgtgagatgggtttcctgaatacagcaaactgatgagtcttgactctttatccaatttgccagtctgtgtcttttaattggagcatttagcccatttccatttaaggttaatattgttatgtgtgaatttgatcctgtcattaggatgttagctggttattttgctcgttagttgatgcagtttcttcctagccttgatggtctttacaatttggcgtgtttttgcagtggttggtaccggttgtttccatgttcagtgcttccttcaggagctcttttagggcaggcctggtcatgagaaaatctctcagcatttgcttgtctgtaaagtattctatttctccttcacttacgaagcttagtttggctggatatgaaattctgggttgaaaattcttttctttaagaatgttgaatattggcctcctgtctcttctggcttgtagagtttctgctgagagagcagctgttagcctgatgggcttccctttgtgggtgacccgacctttctctctggctgcccttaacattttttccttcatttcaactttggtgaatctgacaattatgtgtcttggagttgctcttctcgaagagtatctttgtggcgttctctgtatttcctgaatttgaatgttggcctgccttgctagattggggcagttctcctggataatatcctgcagagtgttttccaacttggttgcgttatccccgtcactttcgggtacaccaataagaggtagatttggtcttttcacatagtcctatatttcttggaggctttgtttatttctttttattcttttttctctaaacttctcttctcacttcatttcattcatttaatcttccatcacagatacgctttcttcctgttgatcgaatcggctactgaggcttgtgcattcatcacgtagttctcgtgccgtggttttcagctccatcaggtcctttaaggacttctctgcattggttattctagttagccattcgtctaatttatttttaaggtttttaacttctttgccatgggttcgaacttcctcctttagctcggagtagtttgatcgtctgaagccttcttctctcaactcgtcaaagtcattctccgtccagctttgttccgttgcaggtgaggagctgcgttcctttggaggaggagaggtgctctcatttttagagtttccagtttttctgctctgttttttccccatctttgtggttttatctaccttgggtctttgatgatggtgacaaacagatggggttttggtgtggatgtcctttctgtttgttagttttccttctaacagtcaggaccctcagctgcaggtctattggagtttcctggaggtccactccagaccctgtttgcctgggtatcagcagcagaggctgcagaacagtggatattggtgaacagcaaatgttactgcctgatccttcctctggaatttttgtctcagaggagtaccaggccgtgtgaggtgtcagtctgcccctactggggggtgcctcccagttaggctactcaggggtcagggacccacttgaggaggcagtctgtccattgtcagatctccagttgtgtgctgggagaaccactagtctcttcaaagctgtcagacagggacatttaagtctgcataggtttctcctgccttttgtttggctatgccctgcccccagaggtggagtctacagaggcaggcaggcctccttgaggtgctgtgggctccacccagtcgagcttcctggctgcttttttacctactcaagccttggcaatggttggcgcccctcccccagcctcgctgccaccttgcagtttgatctcagactgctgtgctagcaatgagcatggctccgtgggcataggaccctccaagccaggtgcgggatataatctcgtggtgtgccgtttgctaagaccattggaaaagcgcagtattaaggtgggagtgatccaattttccaggtgccgtctgtcacccctttatttgactaggaaagggaattccctgaccgcttgcgcttcctgggtgaggcaatgccttgccctgctttggctcatgctcggtgcactgcacccactgtcctgcacctactgtctgacactccccagtgagatgaacccagtacctcagttggaaatgcagaaatcacccatcttctgcgttgctcatgctgggagctatagactggagctgttcctattcggccatcttgtctccacccctcaggacttgaattcttatgcagcagtcccagtgatctttagagaatgcacatcttgcagaacacctgaggtgaggagtttgagaccggcctggccaacatggcgaaaccctgtcactactaaaaatacaaaagttagctggacatgatggtgggcacctgtaatcccagctactcaggaggctgagacaggagaattgcttgaactcggaagatggaggttgtagtgagccgagattgtgtcactgcactccagcctagctgacagagtgagaccctgtctcaaaaaaaaaaaaaaaaaagagagagagagcatgtccattttggctctgatggtctcaccttgcttaggcattttaaaagtacacctgacaaggaggtgaaaatcctccctctaatactgtatctgcagttacagctaagaaaggccaaggcaagcattggaacctactgggaagttgaaaatttaggctgaagagctgcaaggggtgaccatttctgaaggtttgttagacagcagaatacttttacaaataaaattcctgaagtcaagactcttgggtcatctaaaattagacgggacaaacccttgagaatgagctactgacagggacatgagcaaggtgaactgatgactttttctatttctaatttctgtgagtctatagaaaggtctatttctttcagtattttataatgcatgtttctcctttagccttctttacattttttcctctgatatttttatagattctacttacaaagcttaaaattacaacaaaaatgccatttcatacattattaagtttagaccatttaaaatcctgtcttgcaaatttctcttcctacagagcaatgctgtcccatcatgttgccttatgtctgctgctatttttgaattacagcacatttcatccacctttgataaggaacttaatatccattggcaggtcaacttgtgactttatgctgtgactataactgcaaattatggtgcatatttcattttaagttattccctgggataggaagctggtccaacggcagaactttgtgttataaagactgaagaaggaatcttacagaaacaatgtttccacggtgggcaatgcttacaggatagaatgtcagggaagattgcaataaaatatatggaagggagttgggtgcaaaagagcaaacacataactggagagcaacagagatcagtgtgggattgaggagtccagaaaaggttaagcatggagctgaggttcagagagggacccaaggtctgactggtgcaggaagctaggccttcatgttttgaagattagaataaacagctgcaatattaggatctcaccatagaaggaagctgggcccaggaaggagctggcacacaggctatggctttggcaaagggaaaggctgtggacactaaaccaacttttaagttgagctctgaagttctataatcatcgtgtcaggtcagaagctagtgttagtagcctgaaggcgcaggcatagggaaataagaatattggggaggaatatcatggagtgagatttagaggaagagagatggttactgactttacatctctagatgtacatgggcctcccttaattttaatattctttgcttttcggcttttgttcagatactgtatcctctatcttggaagtaaagtgaaagggaattaaacaaacatttctagaatatctaccatttaaaaggtacttggataagcacttaacatatgtactcattgagctgttccaggagagtgggttattgttatctccatttcacagacaatacacaagctcaaaggttaagtaactcaccctagtgtgcacaattaataaatgggggcctttagattcacttccaggtgtgtgtgtgtgtgattccagagtcctcactcctttcactctaccatactgcttcctagagatagatgtctaggatcagactccagggactgggcctggcacacagcaggccctctgtaaatcgttgacttcctctctccctccctgtcctccaccccttctaacctctttaaagtccactgctttattttcaggtttttagttgactctatagagttattgtgttaggttataaaatcacctgcatattctctttcttttcatgaaggaggataatatcctgaatttggaaattttggataattttttttgggggagagggtaaagcaaggattgatacattttttttcttattcttaaaagccagactctcagactcttggaatataatggtttttaagaaattcatgaaataaagggattttccaatttttcagagaaagtggaaaaaaagggctctatttcaacctacatgatttagctccttgggcccaatgacagcacaggtccacatgtctgaagctcactttcttgcatcattgttgtttctgctgctcagctcttcctgatcttattcctaatcatgtgactgttaagtctgcactttgctggccctcccacttgtcttccagccttgtatttttagatatctacaggacattgctaattggagctcaagatgtgaaaaactgacaactccataatttttcttcaattttccccaccaaatatgcatcttttctcaattctggaattctaatggtcttttggtcctcattggaataatttttgaccacttcctctaatttccactgccactggaatggacttaaaatgaatgatctcaagtaccaagtgggcatccaacatggcgctaaaatcctaatacagttccctagtaatttacttctttctttctgagatgattttatccttttttccttgaacctcctaagcttcctctatgttctcaataactcatccagatgacctgcatcaagtaccacatcatctgccttccttctgcttctatgaaagaagcgtgcctgctcctgccattccactgtgctcagggtcccattctctttcaccttcttaacatcttccattcagcattatcccttccctgtcttggaaaatctatttctttctctctgttgaatcattctgctaaacacaaaaatacaacttagtatcacgtatctcagagaacatcctcctttgatctcatagccctcctctggcattgtatcactcctctgctccccttcacagaaacattccagcaaagagccgcccacctctctcatcccttagtctttcctcaaccctccctaactggtctgtcttctaccactccactactgtggccattgtcaagctcaccaatgacctccctcttgcacaagcagtgatttatatacccaatcaggggtgctcacccagcctaaccgccacctttccttagagtgccccctcctcaaagctctcaggaccctttcctaccttgttttcctcttaccttgttggccacacatgatcagtttcttttggaagctctcctcctctacaagaccttgcttgaaaagcccaaggacgttatcttaggctctcttctctttcgtttttaaattctcttcctagaaaattatctccagttatgtagtccctcccccaccatatttatgtggtttaaagtgccatctgcaagcgtattactctcaaatttacatacagctccagatgtgatcaccagcctgagcttcagactcagatagccaactgtctacctgacaccaccattttgaaatccacaagtatctcaaacataacacagctgaaatataattacagatgtcagccttcatccactctcctcttctcaagccttccccgtatcagtaaatggtcctaccattcactcatacccaaacctaaaggttaaacttgaatcctttctttatcctataacctacaatagtaagtctcaacagttccattccatgaatataacccaaccaatccacttatcgttattttcctggctacacacctcatgtaagccaccataagttttcatcccaactagcagagcagcaaggctcctacctctactcctgctgttctaacacccatgctcctcatagcaaccacaatgatctctttaaaatgtataacatcaaaataccttaaaaaagtacaatctaaactccgaaccgcagtccagagggccctaaaaaatctggcctcttcctatttctctgatgaagtcttccttgactctccatcttgttactgtttttcagccacactggccttctttccgtcctttgagtatccccagtcctgactcaggggctttgtacttgctctgtcttctgtttggaatacatttcttctgtatctttgaatagtctttgaatagttttttctctttaaattagttttaccttaaatgtccccttctcagagaggacttccctgacaaactgagtggccttatcacctctacaaaattaacctacatgatctttttcacatcccttctgtacctgaaattatcttatttatcaacttgcttgtttttgctgtctgtagttgtatcagatttatggcataaaaaatcactccaaacttagtactaaaacaaacatttattgagctcacaatcctttgggtgggccaattggactgagctcaaatgggtggtatctggattaggctgggtttatcatgcgtcagcggccaggtgggtggctcttcttctgggggttggttggctgttggctggggtaactgggcactggggctaggtttctcttatcatccagcaggccagcccaggcttactcacagggtggataacaggattcctgagagaacagaaatgtaccagttctcttgaggtttcgttttggcactagcacaatgtcccttctgcctcattcttttggtcaaagcagcccaaacactagaagtgggggaaatagtctctactgcttaaggggaagagctacagattacattgtaaagggatgtggatatgg

SEQ ID NO: 2 - DNA, 720 bp, Artificial sequence
  EGFP coding sequence (with start ATG and stop TAA)
atggtgagcaagggcgaggagctgttcaccggggtggtgcccatcctggtcgagctggacggcgacgtaaacggccacaagttcagcgtgtccggcgagggcgagggcgatgccacctacggcaagctgaccctgaagttcatctgcaccaccggcaagctgcccgtgccctggcccaccctcgtgaccaccctgacctacggcgtgcagtgcttcagccgctaccccgaccacatgaagcagcacgacttcttcaagtccgccatgcccgaaggctacgtccaggagcgcaccatcttcttcaaggacgacggcaactacaagacccgcgccgaggtgaagttcgagggcgacaccctggtgaaccgcatcgagctgaagggcatcgacttcaaggaggacggcaacatcctggggcacaagctggagtacaactacaacagccacaacgtctatatcatggccgacaagcagaagaacggcatcaaggtgaacttcaagatccgccacaacatcgaggacggcagcgtgcagctcgccgaccactaccagcagaacacccccatcggcgacggccccgtgctgctgcccgacaaccactacctgagcacccagtccgccctgagcaaagaccccaacgagaagcgcgatcacatggtcctgctggagttcgtgaccgccgccgggatcactctcggcatggacgagctgtacaagtaa

SEQ ID NO: 3 - DNA, 795 bp, Artificial sequence
  neomycin resitsance gene coding sequence (with start ATG and stop TGA)
atgattgaacaagatggattgcacgcaggttctccggccgcttgggtggagaggctattcggctatgactgggcacaacagacaatcggctgctctgatgccgccgtgttccggctgtcagcgcaggggcgcccggttctttttgtcaagaccgacctgtccggtgccctgaatgaactgcaagacgaggcagcgcggctatcgtggctggccacgacgggcgttccttgcgcagctgtgctcgacgttgtcactgaagcgggaagggactggctgctattgggcgaagtgccggggcaggatctcctgtcatctcaccttgctcctgccgagaaagtatccatcatggctgatgcaatgcggcggctgcatacgcttgatccggctacctgcccattcgaccaccaagcgaaacatcgcatcgagcgagcacgtactcggatggaagccggtcttgtcgatcaggatgatctggacgaagagcatcaggggctcgcgccagccgaactgttcgccaggctcaaggcgagcatgcccgacggcgaggatctcgtcgtgacccatggcgatgcctgcttgccgaatatcatggtggaaaatggccgcttttctggattcatcgactgtggccggctgggtgtggcggaccgctatcaggacatagcgttggctacccgtgatattgctgaagagcttggcggcgaatgggctgaccgcttcctcgtgctttacggtatcgccgctcccgattcgcagcgcatcgccttctatcgccttcttgacgagttcttctga

SEQ ID NO: 4 - DNA, 34 bp, Artificial sequence
  loxP recombination site
ataacttcgtataatgtatgctatacgaagttat

SEQ ID NO: 5 - DNA, 149850 bp, Artificial sequence
  Sox17 GFP reporter BAC (RP11-47H10)
gcttgccaaataatattccatagtatgaaggtatcacattttatttatttattcatccattaatggctatttgggttgtttccactttttggctattatgaataatgctattaatatttctgtacaagtttttgtgtgaacacgtgcttcaattctttggggcatatacctaggagaggaattgctgggtcatataggaactctatgtttaaccttttgaggagctgctagagtgttttccaaagcagctgcatcattttatattcccactagcagtgtgtgaggattctggcttgtctatatcctcaccaacacctattattatcgactctagccatcctagtgggtgtgaaggggtatctcatgatgactttgatttgcatttccataatgactaatagtactgagtatctcttcacgtgcttgttggctagctgtatatctttcttggagaaatgtctgttcagatcctttgtccattttttaaatagaattacttgtctttttatttatatatattttttgatacggagttttgctctttttgcccagactggagtgcaatggcatgatctcagctcactgcaacctccacctcccaggttcaagcaattttcctcccttaccctcccaagtagctgggattacaggcatgcaccaccacgcccagctaattttgtatttttagtagagatggggtctctctatgttggtcaggctggtctggagctcccaacctcaggtgatctgcccacctcagcctcccaaagtgctgggattacaggtgtgagccaccacgccaggcctattatctttttatttttgaggtacaagaattcttaatgtattctagatatatgtcacttatcagatatatgatttgtaaatattttctctcattctgtgggctatattttcaattttttgatagtgctctttgctttatataagcttctaaggttactcttaaattaatacatttttagcattatccaagtagaaacatggaacatgaatacatcaatttgaaccattttcaacctctgcatagtacttaatactatgactatttagaattaatttattgattcattattctgtcagtggaaacttgggcttgtgccagtatttggctgtggcaaacaatgccaccatgagcattcttatccatgtctcttggggcacatttccaagtgtctgttgggcaaatacaaggcataccttagagatagtgtgggtttggttcgagaccactgcaataaagccaatagtacaataaagagagtcacataaatttttggattaccttgtgcatataaaagtcgtatttacaccatactgtagtttattaagtgtgtaataacattaggtctaaaaaaaaatgtatagaccttaacttcaaaatacttctttttttttttttgagacagggtcacctagtgacagacagactctgtcacctaggctggagtgcagtggtgcgatttgggatcattgcaacctctgtctttcggcttcaagtgattcttctgcctcagcctcctgagtactgggattataggcatgcaccaccatgcttggctagtttttgtgtttagaagagatgggtttttgccatgttggccaggctggtttcaaactcctggcttcaagtgatccaccagccttggccctccaaagtgctgggattacaggtgtgtgccgtggcgcctggcctaaaatactttatttctaaaaaatgttaacaatcatctgagccttcaacaagtcttaatctttttgctggtggaaggtcttgccttgaggttgatggctgctgactgatcagaatggtggttgctgaaggttgaggtggctgtggcaatttcttaaaataagacaataatgaaatttgccgcatcgactgactcttcctttcatgagagatttctctgaaacatgcaatactgtttggtagcattttaccaatagtagaacttctttcaaaattggagtcaatccgccaaaccctgccactgctttctcaactaggtttatgtaatattgtaaatactttgttgtcattttaataatgctcatagcatcttcatcaggagcagattccatctcaagaaaccactttctttggtcatccataagaagcaactcctcatccattaaaattttatcatgagattgcagcagttcaatcacatcttcaggattcactttaaatttcagttctcttgcaatttctaccatcagcagttatttcctcctctgaagtcttgaaaccctcaaagtcatccatgagggttgtagtaaaattctttcaaactccggttaatgttgatagtttgaccttctcccatgaatcataaatgttttaatggcatctagaatgctgaatcctttccagaaggttttcaatttactttgcccagatacatcagaagaatcactacctatggcagctatagatttaggaaatgtatttcttaaataataagacttgaaagttgaaattactccttgatccatgggctaccgaatggatattgtgttggcaggcaggaaaataacattaatctccttgtacatctccatcagagctcttgggtgaccaggtgcattgtcaatgaacagtaatattttgaaggaagtattttcttccgagaagtaggtctcagcagtaggcttgcaatattcagtatgccatgctgtaaacagctgtgctgtcatccaggctttgttgttccacctatgaagcacaggcagagaagatttagcggaccctaggattttggaatgtaaaatgagcattggcttcaacttgaagtcaccagctgccttaacccttaatgagagccagcctgtcctttgaagtcaggcattgatgtctcctgtctagctatgaaaatcctagatggcatcttcttccaataaaaggcttttttgtctacactgaaaatctgttgtttggtgtagctaccttcatcaatgatctttcctagatcttctggataacctgctgcagcttctccatcagtatgtgctgcttcactttgcacttttatgttacagagatggcttctgttcttaaatttcatgaagcaaactctgctagctttcaacttttcctctgcagcttcctcatctctcttagtattcaaggaattaaagagagctagggctttgctcttgagatgagggtttggattcagggaatgttgtagctggtttgatcttctatccaggccactaaaattttcttcatatgagcaataagtctgtttcactttcttatcattcatgtgttcactggagtagcatttttttttttttttgagatggagtctcactctgtcgctcaggctggagtgcagtggcgcgattgtagtagcactttttttttttttttgagacagagtctctctctgttgcccaggctggagtacaatggtgcaatctcggctcaccgcaacctccacctcccaggttcaagcaattctcctgcctcagcctcctgagtagctgggactacaggcacgcaccaccacgcccagctaatttttgcatttttagtagagatggggtttcaccatgttggtcaggctggtcttgaactcctgacctcgtgatctgcctgcctcagcctcccaaagtgctgggattacaggcgtgagccaccgcaccgggcctggagtaacacttttaatttccttcaataacatttcctttgcattcacaacttggctaactgcgcaatgcaagaagaccggcttttggcatttcttggcttttgacatgccttcctcactaagattcttaatttctagcttttgattgcagtgagagacatgcaactcttcctttcgcttgaacatgtagaagtcattgtagggttattaataggcctaatttcaatatcattgtgtctcagggaatgaggacgcccaaggaaagggaaagagataggggaatagatggtctgtggagcagtcagaacacacacacatttattaattaagtttgctgtcttatgtgggtgtggcttgtggtgcctcaaaacaatgacaacagtaaggtcaaagattcctgatcacagatcaccataacagtgataacaccataaaaacaaagaaaaagtttgaaatcttgtgtgaattaccaaaatgtgacacagagacacagagtgagcatatgctgttggacaaatggtgccaaaacccttgcttgatgcagggttgccacaaacattcaatatgttacaaatgcagcatctgtgaagcacaataaagcaaagcatagtaaaatgaggtgtgcctgtatctagaatacctggacttagagaatgtaggtcttcaggcttatttgatatggttacagtttttcttttttctttttttcctttttgtaccagcagtgtattggagatctcagtgtgggacgtctttgctaatacttggtattgtttgacatttaaattgtagctattcagatgggcatgaattggttctgattgctgtttttaagatgtggcctgactgtcaagccttcagagaacaggtaagctgctgggcctgttttgttatttgtaaagcagagtcatgaaattgtggccataatatgctcttgtgtattcagagttctggagacccacatagaaagagaacaatatgaagaactttatgagatacttgtatggttcctctgtacagtagtagttggctgtattacatcattgatgatttttattatactaagtatggaaaatattttaaaatctgtaatgtaaacttttcgcaactgaatagtataaagttctagaaatttattagtgtaagccatttgcaaattctttagcccctggaagtcctgtaaaagcaggatcattcccatttccattctttgtctccacccttcatttagtcttgctgttaataatgccaattccttcagcattttctcatatagttccactcaactctttaatcttgtaaaagttattgttttttttttgatactgcatacataatgcatgcaaactttgcataactttcaaaattaactcctcttccaagatgaagattaaataactgagaccactatggtgtttcttgtttgacatttttagcagagtggaatgttaccagatagcccgtttctagatttctcatcaaagttatacttaaatcaatatgttagtatttaggtaagaaagaaacttttcatggtaaatgaaggtttttctctcagactagagtctcatttggaagaagactaaggagaagcttcaatttgaattgtgaatagaccatgttgtgcattgtgaaatatgactagaacatgtttttcagtggagtttctcacatgggtgttgatctgttgcttttaatatttgtaggtagatcctgcagagtaaaacaagcaaacaataatctactaataagtgagaagctttctttttttttttcttgagacagagtctcactctgtcacccgggctggagtgcagtggcatgatctcggctcactgcaacctcccacttctgggttcaagcaattctcctgcctcagcctcccgagtggttgggattacaggcgcccaccaccaagcccagctaatttttgtatttttagtacagacggggtttcatcatgttgtccaggctggtctcgaactcctgacctccagtagtccacccgccctggcctcccaaagttctggtatcacaggcgtgagccaccatgcctggctaaagtgaggagatttctacacggagagctttataaatgttgtgtcacttaatttacacaatgtgtttttttctaaaggtattttaacaaaatggttctcttacggaacgtttatgtgccactgtgttcagtttgcacatacattcattatatcattttctgctgaccagggtgtcactagacactacctcactcatcctggctttagctattttccagaatcttccacagatggtgatattaatttaggctctgaaaataaactaaatattatagtctttggatatttccctccagtaagttttcaaaagccaagaaagttcaagagtttgattaaaaatagttggccttcttggctatcaattgaagcattctccttcagagggaaaggtaaagtcaggaaatcctgagatgttctgtctaaatcctactttactgaagtgataaaagattaaaggtcagcttcaaagttatttttattgaaaactgggcagacttcagtttgcaccagattttcttggcccgactctttctttttctttttctttttttttgtgagacagagtcttgctctgtcgcccaggctagagtgcagtggcgtgatctcggctcattgcagcctgtgcctcccaggttccagtgattctcctgactcagactcctgggtagctgggattataggcacatgccaccatgcccagctaatttttgtatttttagtacagacggagtttcactatgttggccaggctggtcttgaactcctgaccttaggtgatccacctgcctcagcctcccaaagtgctggaattacagacatgagccattctgggtgaagcttgggactatctctgcagctggtgggaccttgcctatggaagtgcctcaaacgaagggatgtcgggtgcagagaggagaggttctgaccctgttcccaagcccgtgatcatccagtggtagcacaggctttgtatcaacatgactgtggatgtggtgttggccagacgtggaaacaacaccctgcatgggagcagatttgagttgatgaagaatgaaaatgtcccacttcacaggcactgcaggtgtctgacttctctgctggtggcatctgcctcttatgtggttatgaaattaaggagaaacctggattaggtctgctcagcagtttagctttgccacatattagctgcatgtcatttaacttctctgtgcgtcagtaccctcatctgtaaattggggatactaatagaacggtcccatagagctactgggaggattaaatgagattaaacatataaagtgcaggaatagtgcctggaaaagggaagatgctcagtaaatgttagataggatgattactgtactattagtaatatgtccaataaagtcaggggaaaataagttaatccttaatgaagccaaagagttgtctgaataaacctttagcagttttagagatcaatcatgtgcattcagtcatgtgcattcaattagaatcaatgtaggtcttctcaatgcatatacaaattgaacttaaaggagaagttggccaggcacagtgactcacacctgtaatcccagcactttgggaggccgaggcgggaggatcacttgaggccaggagttcaagaccagcctggccaacatggcaaaaccccatatctactaaaaatgcaaaaaaaaaaaaaaaattagccagatgtggtggcgcatgcctgtagacccagctactcagaaggctgaggcaggagaatcgcttgaatccgggagggggaggttgcagtcagcagagattgtgccactgcactccagcctgggccacagagccagactctgtccaggtctaaccctggggttttctcatgaagagcagagtgtaggaagcctggtgagacctgagtcttatccctagagagaacacctgtcagccgagaccatttgggaagcaggaaaaataaagagaagcacaaacagccacagactaatttcaggaaatagtagtaagggagagtcgctgagcttgtcaaaccttggtttgagtttggaggtgagatgaaaaagcaggaacgacccctcagtccttcataagagagacaccatactccaaaagtttccagagtgtgatgtttaaaactgggatttggttagttttttttttttttaacttttaatgtagaaaattgtacaagtcacaaatacgcaggttaatttttttaattgtgataaattatacataacacaaaatttattattttaatcattttgggggcacagttcagtggtatcaagtacattcacattgctgtgcaaacaccaccattcatctcaaaacgttttcatcttcccaggctgaagcttcattctcattaaacacagatcccccactcccctgtcccctggcccaggccctggcaatccccattgtaccttctgtctctacggattcgactactctgggtacctcatgtaatagaatcatacagatttggtcctgctgtgatgaactcatttcacttagtgtaatgccctcaaggtacagcttggtgaattttataaacttgaaccacctatgtaaccagtgctctgacagagaaacacggcattgctagccacacagacctccctgtgcccacctctggtgagtcccctctacccttgcaggaccccgagggcaaccttgtcctttgtctatgcagagaaggaggcagaagggggaagactaaggtttctgcctcttacctccccagtagggaagctgcacattttatctgtttcacacattaggctttagtgtctctgccaaagaaaatttggaaactttgacttgggcaatgtttatatttcactcccagattgtacagataaatgccttgttttatttagtctgcctttgttcaactaactcccatttttgcaactctgtttaggcagcctcttctgggggaagccttcaaccctgtgcatcccacaatctggagacactgttggctgactgtgacttaccaccagacaaatgcccaccagaggacagtctccttggcatctgtgtaacctcaaagcccagcacggtgtccaacactcagtggtttctacaatgcatgtttaactgagcagagctgaactagtgctcccagggaactgactgatggaagtctgtcttaaaagctgagctctataattttgcagctgtttgcccttggagacgtcatttaacttctctgtctgggactctggcaatataaggaaagtgccataatattaatctgaacaagtgcccaggcaactcttaagtttaacagcagtatcatatcgccatttagtgtgcacacttcattctcttatatacctgagagagattattttaaaatctctcatgttaatcaaaccacatttcctgatctagataaaaaaggtttcagagtttaattacacaaaaagtaggtaatgttgcatgaagatttacaaagaagccaagattttttttttctttttaaagtatgactaggtaataatagatataagcatatttttctcattcctaatacatgttttatttggatggtgtgctgtgatatttgaggatttgggacacactcttttagtgtaggttgcaagaaaactgtgaaacacagacgccaacagtaggtgaagtcagaagatcttctgtgttaatttctgaaatgtctagcagtgggccattctttgacggtagcctgatatctgataaagataacattctgccactggccatgtgaggagcaattcccagccaggggaaggactccaagtccccaaatctttcttaaaattttagattgagaattgacagaaaacatataaactcagataaataggcaaaggtattgaacagactattcataactgtacttatgaccacaataaaaatagaagcaatataaatttgggtaaaataattagatatgtatttggggcctatgaaatcacaaactacatctaaaatttaattagaatgataggtgatttttgttttcttatttgcatttgtcacattttaaaaaatactgcataggtattacttttataaccacccaatagtatttgagaatatgctctaaaacaaatgagcccagttcattttattcatgttcaggaagctaaagtcagccagtggaaacagtgcagtgaggtggctgtgactggttttatttgtacttgccacttactctgcagataccatggattggcaggcatagctcttattttatcagatagaagagaaatgggaaatgacacagaattcccacacatgggaagggggcattttttaattgagcagatactatatcctgtatgttatgctcagtactttacacctatatctcatgccatccttaaatgacacagagtggggccttccaactggaaagaatgctgcagtacgatggctgataagcagaaaacaacatacaacaaagcttggcattaaaattactttcagaagatatggtaaaactgctttttttgggtcttggattgttagtagagcctcaaagtttaataaccaagacccaggtgcctaatttgccccactgggtcctgtcactgactcactggatgaccttagtgaaatcgttttccatctgtgagtgtgtttccttgctgtgaagatgaaactaaaaataaatactgccttcatcatgggttatggtaaggactagctgagtaatgtttactaagaaattgcaactttttcaagcaaaagggggagaacaaaatgcctgtttcatcatataggaaacctgtttgggagttttgtgaccctaaagtgatataaataaaatagaggactttttttcaacctcctttgttagagtatgagacaaaactggctgaattccggtgttctttggtgctggctaagaacagcttggttgcccatgagcagcgtggtcagaggctggttcctggtggcagggtgcattctggagaaagcagtctcctccagcctgagctgtgctcccccacgggactgagtcactcaggccacccagtctctctctcccaaagcttccaaagctcactctcttccaggtgctaagtccaccatcaatttttctttgactagtctagttttgtaagtggcaggttttctgattttaaacagaaaaattctgcctcccttgcattattttttaaatataattttattcttctctttgatgtgagtgtccagttctcatagctaagaaggtccaggagtgcaactcagaagtgtagaaagaaaatgggcttcaaaggtaaggttttccctacttggtttccaactgtcttatgatggccttggacactaacctctttgagcttcagtctccaatgggaaatattaaccttatagggttgttgtaaggatcggagaccttttatttatttatgtttcatgtcatacaaaacacacattatgggcacgggcaccaagttccttacctcataatatggtggcaaaaaaagataagccctgccctgatagaacccgtgttgcagggggaagctaagtcctaagtatgaatctacaattcaggttctaacaggtgaacagtctatagcacagtgggcctctctgcgttgggtgctgatgagctcttcatttaccctccaaacatagaacaaaagaacacattgagggcttacgtggtctcatgttgctcccatttttcactacttgttcaaacaacagtgacagaacacctggttcccatgggcagggagttctgctgggcactaggaacactgagatcaaagggaccctgcgttgtcctgaaggggctgacagtcagagtaggggaggcagacacctaaacgggtgttacacttcagagcactgagcaccacagggctcttagagaatgctccaagctgggactaggaactgagtcctgaggatcaagggacatttgtgatgcagggtggcagtgatatggtggggaagaaggtggagttggtgcttcagacagagaggacagaggaaaaggctgtggggggacacagcatttttggtttctggcatgtcacagaacagttcaattcagtgtgaggagcttggagggagcaggggacaggcagttaagaggtgagaataaaaactggaagtgtgaaggggttggcctgtgcgtggtgctgaccttggaaaagggaagacaggtggaagactgggagtgagaggggctgggggcctggaggaggtgccaggaccagaaacagtcaggggtcagtgtcccaggaagggtggacaagacttagtgagtggctggtgtgggcattgcggggagaaggagacgctgaggacaggaccaatgtcccctgcagggaggatgtggtgacattaactaggggaggctgacagcgccacctttgatgccaaatcccacctccagctcttccctgtggctctgggaaaattgcttaattatctgtgtctcagactcttcacctataaatgaggatgacaataacagaacctcatagattggggctttattgtgtagattaagtaaaatgaccacatgtagatatcagaacagtgtctggcacatctgaagtcctcagtaaggactggttgttattctcggggaacacggggagacagagaatcttggaggagaaagattagggtggtccagttctgattacatgacaaaaagctgcctcaagactctgaggccattatggccatctttgtcaaaagaaggtgaactgccccgtggagtgttagctcggaagtctccagctgtggaaacccagagcaactcttgtgagatttcctatcaaccagaggcaggtggagctgtggaccctacatttatttcagggctggggcaagaaaaatgtgaatgaaagtgttaaacctagtcccttgggttgtttagtctgcaatgctggagaccacactggctcctggtgagactgtgaaatgggtgtagtttgttttggcctgcctcccaacttctctaatgtttctctaaagatctattcctcctaaatcttctttttaaagacttaatttttctagggcagttttaggctcacagcaaaattgagcagaaggcacagagatttcccatgttcccctgcccatcacccctgcagagccttccccatcgtcaacaccctgcacctgagtggtccatcagccacagccgaggaagccactcacccgttgttatcacccaggctccatgctgtacagtacggttcactatctcttcatggcaacaataaataacacagttttagttgatgatttttaaaggctatgcaccctactgggagcatagggtaactacccttgcctgacaaccaaggcatttcaaaaccagcctgctccatctcctgtctctcaccaaacaataaagctcccaatgctggaatgactgagggtctcaccaaggcctgcctggacactcaccactgtttgtgaaactttggaactgcattctttctcttcatcctcacatttgcttttattcttgacacatccgactctgtgacctcttagctccttgacccagtgaccttgctttccagtgggccatggcttccctttctcacggtgcagaatgtgagtctgaaccatgttatctcttgcagctgctccacctccagcatcacagattcaaacatcctcctcgctgcccgcaaaccctgccctgcagcttcctgctcgagtattccctgtacagcctcctttacttctgggtgaccttccctgacccccactttttccctattcacggcctgccactgttaacttgtctgacatccatgctggattctgtcccatcatgtcaactgtgccctctttctgttgcacgtgctggcaaacttgaaatctgatgaacccactaccttcactacactcactgtctggtctctctcaggtagctgaggactgagaaacaccccagccaggcaggttggggtcactataaattcacagtcaccaaccacacatggtgctctgtttggctggccatctcattatacctgtctgacttgcttactgtcctgccctccgaaaaagcttttcaaacactatctccttctgcctcaaatgtatcacctccccctcaatgactttgcttcatatgtgacacaaagaaatgttaataccagccaagaccttcctcaacttccggccagcaaatctggaacacaagctgcatctgtcctggtttgcctcttctctcttctcgttacagtagagtagccattcctcttctaaaaaacactgatctcccatcctgctctggacattaaagtactgagaagtggttttgtgttcccagcaatatgggagtcattggtgaccttaataaaagccacattgaagtgaaatgagaaggaattagaaggtgaagacagaaacaagacagttacagacaactcatttaagcaatttcattatgaagggaggccattgctactatctccgaaaccttaagctatcagttattccttttgctctttcttcctctctgcccattcccttcagcccttaaacagacaaaggtctgagccctctaaacagtagcagaaactgcatacacaggaaacagaaaccctgctccagccttacatccctcacctattggcctattcattgctgcccttcatagtcagatttctcagtggagttgtcttgtaactttttttttcatcttctagtcctttcacatctcatttcaatattattttcttaaggtcaccaatgactttgagatgaccagaactgcccccactcccccgccgccaaaaaaaaaacaaaaaacaaaaaacaaaacacttttcagcctcctaaggtgcttttcacaggtggtccttgatggaagagtcttgcaggtttggggaagtgacttcccgaagaaggttacatcatcagttcaacaaatcaatggcacgtgcgcagactgcatactctggaggcactgggccctgtccagagaatgcacagcagcgtgagatccagctctgttctctaggccctgtggactggcctgtggggggcaatgatggtacgtggtgggtgccacacgcagcagcagccaccaaggaagatgggccccagagcacaaaggaaggagtggggagccgccttcgctggagtggttggaaaaggctttgcaggagaggtggtgcccaggctggagtttgagaagtgaaatgcaggggctgagaggctggggaagtgcactccaggcagtgaaatcaacaggtgcgacatgcagggagactcgtgtcacgtgggaccgtgaaagcccagggtggaagtgaggtgagtgtggggcgcggggtacggtgtggagatggcatatggagctggattcatggtgaaatctgaccaggaatgcctgggtgctcaaatcctggcctctggtctgtctctccaatcccaatgacatcagaatcactatatttagcctaagtatggtcctaggtgctagcaggtacagaataaatgaaaaatggttgaatgactattttagttcatgaaattctaccacattatttgtgctatttaagttaaaagtactaggagtagagttaggcacagagtacaagaggcagtgaaacataatggttagggcatcatctatgggactagatacctaagtactataaccttcccgaagaaggttacatcatcagttcagcaaaccaacggcacatgtgcagactgcatactctgctcagtagaccagatactggcttcaccacttactgtgattttggacaagttacttaatctctttgagccatctatacactgggaattccgagagtgcctaactcataaggttaaaagagtttataggtataaagcacttaacccaatgccttgtaacaattcataataattgtttgtaattaccattaataataaatcacaaacaggttgggtatggtggctcatgcctgtaatcccagcaatttgggagcctgaggtgggagaattgcttcagcctagaagtttgagaccagcctgagtaacattgcgagacctcatctctatcaacaattaaaaaagtagccaggcatggtggcgcacacatgtagtcccagctacttgggaggctgaggtgggaggatcacatgagcccaggacttcgaggctgcagtgagctatgatcatgccactgagctcatgccatgccatgtcacccagcctgggtgacagagtgagaccctgtctctaaataaataaataataatactataagccacaaacatttattactaaaatttaaattatgattatttattgaccattatgattgaatcctcctagagctccaattcttaatgccctctctcccacgccaattgcaatcttttcctgatgtatctttttttcatttgagattcagatcactcagcaagtgtatttgttagctggtagaacataagttacatgataagtacctgcaaggagaattggaacaatcattcattgacctaaacatgatgctattccaaagccgagatagcccttcttcctcatttaaagtgcaattggattattgatgtgtaaaccagtatatctgtctggaattacgttctacagggctaaagaaatgatgatctgacctaggtgtgcactctggaagattcccatgaaaatctctccatgttttttgtttattggcacgtcagcttttcagaggcactgttcagccaaagggcatgtgtttttatgttctgaaaaattgtattaaccaacagtgtaaaacaacagaaaccggttgcaaagctttcacttttaaagagtttccaagcaccctgcccttttcctaaaggactcttttcccttttatggatgagcaccaggctccaagacagtgtaaatagagtttcctgttccagggaagtgctggctcctgcaggagcccaggggtcctttgggaaaagttgataggaactatgagctgtatgtgccctgaggcttaggagccagctgagccaggagggagggaaacacatttaacagcccctttgtgcagacttcagtcccagaagcacttctgggaaaataagtccagtgccatacacacagtccttgcaaagaatggcagggaagctggccgggctggagagagccattcccagattagaggcctaaatctttgacctggccactttgaggaacccagagatgtctgtaattcccacaattcagggatcctgtgcttcagatgagtgaggtttcaagaagcagaagaaaaccgattagatgttaactttggcccaatggcaaatatttttcagtgtggttagtgtttatgcactgaggacatgaaaattaatatctattcttctctcttggattttatcatcttcctgtgtttttaaatgataataataaaaagcattatttttgtggttgagttgatgggccgttcactttgataattttcttttgacttttgtgtgctttagaatctcatcagtggtggcaaggaaacaaaccagaaaagtacaatgaatacttttggacttattcattatgatattatgacaattatattattttgatgatagttaacatttactgaacacttgctatgtgctcagcagtgagttaagtcaatagtctccatccgtaaacaatcttgcatgaacttacaaattgtcagctaaattaatacaaagtatgtaaacgtacaaccatgctattatgttgtgtacatttatagagcataaacaaaaataaaaactaaaggagtgacataaataaacataaatatcagttcttatattttcttcttgcataagagcagattgtctactactggagtctcggcacccctgtttgaagaccactctgcaaatactgtccaaactattattaattccttgcccaagaccatgggttatctttgtgtgtctaccctgtaaccttactgacttctgtagcttttccatcagcacttccaggaagccacactatcatattagtgtattcctatttctgctgcttcttaatctaaatattagatgcacgtatttaaacagtgtgtccaaattttttacagacttatcatctaagatccttaaaacagtttgagtcaaatttgtagctttatcttctgatcagacataagaatctcagaatgagatttcctcctctgaagcttctttcttaatccagaaatgaagtctaagtatcagtcttgttttgggtatgggtaagattaagctcacaaacacagataaaattaagaaaatggttccatttagaatagcagcaaaagaaaaataaaatatttaggaataataaaagtggtgcaaaacatgtactcaactacaaaacactgttgaaagaattttttttttttttttgagatggagtcttgctctgtcacccaggctggagtgcagtgacgtaatcttggctcactgtaacctctatctcccaggttcaagtgattctcctgcctcagcctcccacgtagctgggattatagatgtgcgcaaccatgcccggctaatttttgtatttttagtagagacggggtttcaccatcttggccaggctggtctcgaactcctgacctcaaacgatccacctgcctcagcctcccaaagtgctgggattacaggcatgagccaccacacccggcctgaaagaaattttaaaagttctaaataaatgaaaattcatcccatgttcatggattggaagagttaatagtgttaagatgggaatactcttcaaattgatctacacatttaactcaattcctatcaaagtcccagctgacttatttccagaaactcacaaactgatcctaaaattcatgtggaaattcaaagaacagagaacagccaaaacaatcttagaaagaagagcaaagttggaggactcatactttctaattcccaaacataatataaagcaacagtaatcaagacagtatggtggtggcataaggatagacatatagatcaacaaacagagttgagagttcagaaataagctctaacatttatagtcagttgattttcaacaagtgtaccaggacaattcaatgggaaaagaatagtattttcaataaatgatgttggggaaactggatatccacatgccaatgaatgatgttgggacattacaatcatgccatataaaaaaattcaaaagtggccaggtgtggtggctcacatctgtaatctcagccctttgggaggctgaggtgggtggatcacctcaggtcgggagtttgagaccagcctgaccaacatggtgaaaccctgtctccactaaaaatacaaaattagccaggcatagtggcgcatgcctgtaatcccagacactcgggaagttgtggcaggagaactgcttgatcccaggaggcagaggctgtggtgagccgacatcacaccattgcactccagcctgggcaacaagagaggaactccatcaaaaaaaaaaaaaaatcaaaattgatcaaagatttaagggtaagggctaaaattaaaaagcacttagaagaaaatataacattataatcttggaataagcaataattcttttttatggcactaaaagcataagcagccaataagaaaaacaaataaattgaacttcatcaaaattaaaatattttgtacttcaaaggatactattaagatagtttactctcttaataataaataataataattattatttttatttagatggagttttgctcttgctgcccaggctggagtgcaatggcccaatttcggctcaccacaacctctgcctcccaggttcaagtgattctcctgcctcagcctcccaagtagctgagattacaggcacatgccaccgtgcctggctaattttgtatttttagtagagatggggtttctccatgttggtgaggctggtcttgaactcctgatcccaggtgatccacccgccttgtcctcccaaagtgctgggattacaggcgtgagccactgcatccagcccaataattaataattattattaattaataagtatgtgagccaattcacagaatgggaagaaatttgggcaaatcatatataatgtatttgtatctagaatatataaagaactattacaattaattttttaaaaggcaactcaattaaaaaaaacccacaaataccacaattaaaaaataggcaaaggattagaatagacatttctctgaagaaaatatacaagtgactaatacacacatgaaaagatgcttaacatcactagtaatcaggaaatgcaaatcaaaacaaaaatgagataccaactcacatccattaggatggatatcataaaaacaaaacaaaataaaaaacactaaataaggctgggcacagtggctcttgcctgtaatcccagcactttgggaggccgaggtgggtggatcatctgagaatgggagttcgagaaaagcctggccgacatggagaaaccctgtctctactaaaaatacaaaattagctaggcatggtggcacgcacctgtaatcccagctactcaggaggctgaggcaggagaatcgctcgaacccaggaggtggaggttgcggtgagccgagattgtgccattgcactccagcctgggcaacaagagcgaaactgtctcaaaaaaaaaaaaaaaaaaaaaagaaaaaaagaaagaaaataaccagtataggcgaggatgtggaaaaattggaacctttacgcattgctggtagaaatgtaaaatgatacaaccattgtataaaatagtatgatacttattgaaaaaataaacatagaattaccatatgatccagcaattccacttctgagaatatacctaaaagaagggaaagcagggatccagacaaatatctatacatccatggctgcattatctacaatagccaaacagtggaaggaatccaagtatctgcccattgatgggtgaatcaataaataaaatgaaaaggggtatatacgtataatggaatgttctccagccttaaaaagaaatgaaagtctgacacattctacaacatggatgaaccttgaagatgtgaaataattcagttatgaaagggcaaatattatatacttccacttatatgaaagtagtcacattcatagagacaaaatagaaaggtggttgcctggggctcggtagagaaaataataaagaattattgcttaacgggtgcagagtttcagcttgagaagatgcaaaaattttggagatggatggtggtgatggttgcacatcatcaggaatgtaagtaatgccacagaactgtagacttaaagatgattaaaatagtaaattttatgttatgtatattttactacaataaaggaatatattaaaatataataaaaagcaaattacccaatttaaaaacaaaggatctgaatagacatatctccagagaagatatacaagtggcctatatgtacatgaaaaattgctcactgttattagtcatcaggaaatgaacatcaatactgtcacgagatacctctttacatgcaccaggatggctgtgatcaagaagacagataaatgttaacgaggatgtggagaaattggaaacttcataccctactggtgggaatgtaaaatggtgcagccattttatttatttatttagttagttagttagctagttaattattttagagacagagtctcactctgtcactcaggatagagtgcactggtgcaatcatagctcactccagccttgaactcctaggctcaagcaatcctcctgcctcagccttccaagtagctgggactacaggcaacaccaccatgccgggctgatttttattttttatagaaacaaggtctcactatgttgcccaggctggtcttgaattcttgggctcaagcaatcctcccaccttatcctcccaaagtgctgagatttcaggaatcagtaaccatgcccggcccatgcagccgttttagaaaagagtctggaagttcctcaaatggttacatatagagttaccacaagatccactagttccactcctaggcatattctcaagaacagtaaaaacacatatccacacaaacttgcacataagtgctcatagcagcactgtaacagacaaaatggaaacaacccaaatggtcaccaactgatgaataaataaataaaacgtggtatacaaacagtgggatatttgcaataaagagaagtaaaatactgatacacactgaaacacggaggaaactttgatagcattatggtaagggaaagaagccagtcagaaaggactacatattgtatttttatatgaaatgtctagaataagcaaatctatagagacagaaagccgagtagtggttgcctagggctgggagagttggggaaactggtgtgacatcagggtttctttgggggttaataaaaatattctaaaacagattgtgataatatgtatgcaactctgtgagtagactagagaccacggaactgtccactctaaatggatgaattgtgtggtgtgtggattttaaaatagttttagaagaaagtaagcacaaaatgtttaatatatatttgtgggatgactaaagtacaaagatataaatatttatagaataatttcagaaaaattaattattgactctcatacccctctcatatatgtgaatataaacatgaaattggggctattctccttgatgttaaaagttggcctttggtagaagagagatcagctatcttcctctgtggaaaaaaatgatgacataggatttcactattcttttccttctcttttttaaaaacaaatttattgagttatgatttacacaccatacaatccatccattttaagtatacaattcaatgattttttgcaaatgtatacagttgcccaaatatcactacaattcagtgatagaacatttcatcaccccaaaacgttccctggggcccatttgcagtcagctcttgctcctaccctatacccatttagctgctttccgtctctgtacttcctctcttccttttttttagttcatacaaatgttatacaatatgcagtattttatgtctggcttctttcacttagcttaatgtttatgagattcatccatgctgttgcatgaattaacaggtctttcattttattgctgagtaatatttgtttttgtttctgtttttgtttttttgagacagtttcgctcttgtcacctaggctggagtgcagtggcactatcttggctcactgcaacctctgcttcccgggttcaaatgattctcctgcctcagcctcccatgtagctgggattacaggtgcctgccaccacacctggctaatttttgtatttttattagagatggggtttcaacatgttggccaggctgttcttgaactcctgacctcaggtgatccacctgcctcgacctcccaaagtgctgggattacaggcatgagccaccatgcccagccattgctgagtaatatttcatgggatggatatacacatttcatttactgattctagtagatggacatttggtgtgttttggactattatgactgaagctgcaatgaacatttatgtacaagcctgggtggatgtatgtttctcatttcttctgggctgagtttctgcattatacaggtatgtgtgagtttaactttcaaagaaactgtcaactgtttcccaaagtggctgcaccactttgtattttcaccaggtgtgtatgaggattgcagtttctccacatccttgtcaacactttgcactatcggtctgtttacctttagccatccatcccagtagatggatgctgatctaatcttttttttttttttttttttgagacagggtctcattctgttgcccaggctggagtgcagtggcacagtcatcactcactgcagccttgacctcccaggttcaagtgatcctcccacctcagcctcctgagtaactgggaatacaggcgtgcaccaccatgctcggctttttttgtatttttgtagagacagggtcttgttatattgcacaagctggtctcgaactcctgggctcaagtgatctgcccacctcagccttccaaagtgctgggattacaagcatgagccactgcctgatctagacttttaaacccaaatataaattacttctggattttgctgttgaatgggaaatgctgagtctcagagagggccacaggatgtgttgggtgttgccacgttcccggagcaccttgtactgagtgtgctctgggtggaggaggggagggagagctggggactctccaacatctcttctcctattttcagggaaaaaaagaaagccaaccttgagaagaagggcagtaagacactccgtaatgaatttaagaagaagcactgtaatactttttcattaaaaagcaatggaggccggctgcgatgcctcacgcctgtaatcccagcactttgggagcccgaggcaggtggatcacctgaggtcaggagtttgagaccagcttgcccaacatggagaaaccccatctctactaaaaatacaaaaaattagatggctgtggtgataagtgcctgtaatcccagctactcgggaggctgaggcaggagaatcccttgaacccgggaggcagaagttgcagtgagccaagattgtgccactatactccagcccaggtgagagtgagactccatctcaaaaaaagaaaaaagcactggaaatagtttgtagccttaaattctagttgcagctaagtccctaaatagcccaataagcatttttatcactcttgggcctcaggtatcttatgtgcagagacagattttcaaatatcatacttaagcatccttctaattccatacttaagcaaccttctaattctacttagaaagttcaagaatgtggctgatgtttctaagataagaggcagcatatgcagtgatattagactgttgaaaatgaatgtattttatttttatcttactattgatattgtagtcagaagatgcaagctgatatcttgctgatatgattaggggaaagggcatttacatgagtttcctaaattctatcacttggtgacacatttgttagtagtctttactcatccacgtggcatatgctatcatctatagcagtataacctgtgatattatgaaaggaataaaaatgcttatttaaaatattttcttatctgtgagatgaagatggattgcgataagtgggccaggcgcgatggctcacacctgtaattccagcactttgggaggccaaggcaggtggatcatctgaagtcaggagttcgagaccagcctggacacatgctgaaaacctgtctctactaaaaatacaaaaattagccatgtgtagtggtgggtgtctgtaatctcagcaactcgggagactgaggcaggataatctcttgaacctgggaggtggaggttgcagtgagccgatatcgtgccactgcactccagcctgggtgacagagcaagaatctatctcaaaaaaaaaaaaaaaaaaaagatacctaagtgggctgcttaaattttgtaccaggagatcaccaagtcaatcctaagccaaaagaacaaagctggaggcatcatgctacctgacttcaaactatactacaaggctacagtaaccaaaacagcatggtactggtaccaaaacagagatatagatcaatgaaacagaacagagccctcagaaataacgccgcatacctacaactatctgatctttgacaaacctgagaaaaacaagcaatggggaaaggattccctatttaataaatggtgctgggaaaactggctagccatatgtagaaagctgaaactggatcccttctttacaccttatacaaaaattaattcaagatggattaaagacttaaatgttagacctaaaaccataaaaaccctagaagaaaacctaggcattaccattcaggacacaggcatgggcaaggacttcatgtctaaaacaccaaaagcaatggcaacaaaagccaaaattgacaaatgggatctaattaaactaaagagcttctgcacagcaaaagaaactaccatcagagtgaacaggcaacctacaaaatgggagaaaattttcgcaacctactcatctgacaaagggataatatccagaatctacaatgaactcaaacaaatttacaagaaaaaaacaaacaaccccatcaaaaagtgggtgaaggacatgaacagacacttctcaaaagaagacatttatgcagccaaaaaacacatgaaaaaatgctcaccatcactggccataagagaaatgcaaatcaaaagcacaatgagataccatctcacaccagttagaatggcaatcattaaaaagtcaggaaacaacaggtgctggagaggatgtggagaaataggaacacttttacactgttggtgggactgtaaactagttcaaccattgtggaaatcagtgtggcgattcctcagggatctagaactagaaataccatttgacccagccatcccattactgggtatatacccaaaggactataaatcatgctgctataaagacacacgcacacgtatgtttattgttgcactattcacaatagcaaagacttggaaccaacccaaatgtccaacaatgatagactggattaagaaaatgtggcacatatacaccatggaatactatgcagccataaaaaatgatgagttcatgtcctttgtagggacatggatgaaattggaaatcatcattctcagtaaactatcgcaaggacaaaaaaccaaacaccgcatgttctcactcataggtgggaattgaacaatgagaacacatggacacaggaaggggaatatcacactctggggactgttgtagggtcggggggggtaagggatagcattaggagatatacctaatgctaaatgacgagttaatgggtgcagcacaccagcatggcacatgtatacatatgtaactaaactgcacattgtgcacatgtaccctaaaacttaaagtatagtaataataaaataaaataaaaatttcgtaccaggagaaaggtcagtccacaattacctgtcggttagcaatatgctttatgaattgggtatggagcatctaaaatagaattttgttttagaaaatagttatttttcacaactgcatattatttgtgttggctataatagatttgttattttaaatggataaataacagtacttaaaagtgttcaattttaatttctaatatgcttactatcgatagatgtgacccacataaacaaaagcatttgggtttctctgtaatttttagggtataaagagttctcagggccaagaggcttgaggcctgctggtctacatccccatcatctggacttcctcatctcccacacatttctcagccctttgctaatattgctgcttcttcttctactgctttcctgaagctctttgtggtaagattacctataaatgccaaatttcaaaatccaattcacatttttgtttcttaccttgtttgaacatctttaagcctcttacactgttgtctacacccttcataaaaatgtttctcccctgatgttgggacactagcactggcaccatctcctcctgcctccccactctccaatcctctttggctttctccttgcccttatatgctggttgtttctcagggttccaacctagattttctcctgttactgatctacgtattttccttggtgtgtctcattcaaatcattggcttcagttgcttccaatataccaatgatttccaaatctgcatttctttcctgggcttcatatccttatttcaaatatgtattcctgccaaagaagcatctcaaaaagagcatgtccaactgaaactcatgagctttttcttcctgaactcacatttacttgcatgctgcgtaggtcaataatattattattcatttatttggaaacaacaaaaaagaaaatcaaaaacaatagcttaaaaattttgtaaagctgttttttactcctcctgctccttgccccctgcccgtgccatgtagtaaatctccaactccaattctagctccaaaatatcttgtatgtacttcttgtttttcctcctgtctctgttgctcacactatcttttccctgagtgatcgcaactgtcctattgatcagcctcctgcacaccttctccccacccctcgtcagggtgatctttccagcatgcatatggcattgtcacttctggcagtcaacattcttccatgcttcctcctcacctgcaggatgaaattcatgctccttaagcaggcaaaggcacaggagtccttcattatttgatcctatggagtttcccactgagtgtcttgccattcctagtttctaccctgtttcccagccgtgctttatgatgggaccgtgcctgtgctcaggtggttttctctgtccaggatgtccataccctccattctgtgtgccccctcttagaggtcatctcctctttgagagcttccttctctctcagcccccaggcatttatttgctttatctagcaaattcccaaatcagttagaatcaggccttatcatatctccctgtactgtagatacatttacatctctaattccccacaaggctgtgtctcctctgtgctccacacactgtccaagcccactgacaggtgtgcaaatggattagtcagaactaacggggaggtcagaacagggatcttttactttctctttgaagcagctgcagagattaatttcttttcattgttaaatcaagatagaaatattaaattgcttcatcacggaaaaaaacgggttcaaaataaaaaatttggggatgtagatgaaatgaattttccctcacagagcgatcaagattgttccctgcagtctcgtcgttggcttcttcccatggattagcaatgtgggccaagatttagagaaaataagatatgctggaatgaaggcatttgggggaaaaaaaggaaaaccaggtaggttacttggaaagaaaagtaccaaaggagatgagggagatagaacaagaaaaggaaaaaaagattgtgggaaagaatgcacagaaacagtactaaagaatagtccatttgctgccaataaggggctacagggaaaaagaaatacaggaatgagaggaaaccctgacaggatgcagcttcacaattcttttcagagctcaagctcaggcagacttcttgatattgtctctaaagtgtgtgttcaccctgacgctcatgtccatgtagtttctctctctgaggcattccagggtcaaaaggtcagagctccagcattagaataggaaactgtcttttctggacggagtgccatcttagaaataaacctagccaatgcttcaatcatttgatgaaatagctccaataattatgagtttggtttaagacattgatgagatgtttattgaccccaattgttatatttaatttcttctatcttgtatagtatataggattttaataaaatctatgccaaatcttaacattcttcaatatcaaaagtcataaataactcttactcaaaaccatataagagatctaggctatagctagcaattgcttcagttaaagagtgatacagctataaatttaatcctaattttaaaattgcagcaaaacataaggattgaatttacaaatccctcattttttgcaaagatttctccagaattggaacttttgtttgtttagtcataaactacatgttgaatgaaattatccaaaatttcataagagtgttatgtggtaacactttataagtaaaatatgctttcttatttaacctcctggtaatgtttgcctggtattgaaagacaacaccatatctaattattttaaagtcagcagagtattaaaaaaactaaatattttgcaaagatagaacttataataaccttcattttcatttattatttttttttgtgtgtgagaaatagtcccactgttgcccaggctggagtgcagtggcacagtcttggctcactgcaacctccacctcctgggttcaagcaattcttgtgtctcagcctcccaagtagctgagattacaggcgtgcaacaccatgcccggctaatttttgtatttttagtagagatggggattaccatgttggtcagactggtctccaactcctgacctcaagtgatccacccacctgagcctcccaaagttctgggattacaggcttgagccactgcgcccagctataaccttcacgttcaaagcactctcccatctattattaaggcctctgagaaaatctcctttttatatatattctcaagtcagaattattagtctccatctttcatcttagtcttcttcaaataccaaactctttactaagcagttagacacaagtagtttcaccagttctatcactcaaatacggtttcataagttctgcctagtgattgcccatcagaggggatatggatttgtgggcaggaaatagaatagaaacctaactctaactcttctgtgaaatgtagtgtttaggttaatattcttccttaactgccatctgcttttttttgtttgtttaacactttgtccaaatctctcaaaccttacaccgcagaatcatggagtgttcaagcctgaagggaatggagagattgggccagctcctcttggatgcatcctgaaatcgaggaccagtcagaggcagggagtcgcccactatcaatcccgatcactaggaggagggctgaagaagagtggaactcgggtttcccagctcaagcccctccccatcggggcacatcacaccacctcttcccatgccacttaaaacagcgtgctgctgcatcccccaaagtccggaacacatttcagattcatcagccaatccagtttaagagaattggtgttggctccccttgttagaacagacagaacagaccactcgagaatcttttgtatttgttgacaaatataaatagagataaaagagaggaaagaggggagatgaacttgaagctgtacggcttaacattgaagccatgtggcgtaagcagttaaacacagggaccccgtctcacactgcctggttccctcctccagctgtgttgtctgctaatgactgtgtggccgcgggccagctgcttggtctctctagcctcagcttagggtttctgtgatggctatatgagctcaaggatttacaaggagtcctgttacatggtgagcacacaggtgttaactgttagggaaagagctcctttttattcagaggagcccgacataacttcacaggacttgaaggtgtcttatatagtcactcatctgcaaagacatgtggtcttttcagcacttctttctctctctaatgtggttctactaagctacccacatttaagatcccagccaggtcactcgggtgctgctaaattgtgtaattcagtgtgaccctaagagacccatataggaatggagctatgatttttttgttgttgttgttgagacggagtttcactcgttgcccaggctggagtgcaatggcacgatctcggcacaccacaacctccacctcccaggttcaagtgattctcctgcctcagcctccctagtagctgggattatagtcacgtgccaccacaaccagctaattttgtattttcagtagagacagggtttctccatgttggtcaggctggtctcaaactcccgacctcaggtgatctgccgcctcggcctcccaaagtgctgggattacaggcgtgagccatcgcacctggccagctatgatttgttttagggctgtccagagccaactcatctaccccacacagactgtcttgagaggaagacacatctgctccctaaaagcctaggggtaggagtatctcattcccgtcagcgttccacacatcccttagctgaacccaagaggttgattccaaccttcatgtcaatttcagacagacggacccaaggtcaagaaggaaaacactgaaattatccaaggatcttcgctttctctccatcccctgggagaacatttcaggtttattagacagtttgtctgttaacattattcacttgaaacaaaaccctgggtgtgtgccttttggagaactatgtaaatcaacaaagctatacatagaacagagcgattcgctcagcagccaagttccccacagatagcaggtggacagatcacgccgaggaaaggaagcgcagcctttccttatttttctagcattctaggcttagcagtcaatgcacatcctctatgctgttgttggctattcaaataaatattgacaaaaggtgactaattattacaaggtgttagtttgtatgatcacactgtaagtaatggtggagctcatttctgaaacattagtattatgtgtatttattattttggtcttaattttagaggtaatttagaaatggcatatcaaaaagtaatcaaatatttaaattcatagctagcaaaactaaaatatcatttatgtatactttgaaaaactctacattaccactgtggtttaattcaactcagagacatttaaaagcggagatgaacaggcatttgtgccatgctaatatctttctcacattttcttaatgctgttgcaattacctacggaaacacagaaagccatgtcccatctgcccagcacacgtcgcctcctgtttttcgtttctttacagtgacattcagcacttctctggttttccagacagttttcagttctgaagtaaaagttgtttcttaatttcttctcaggttgtgtgagggagtatctcataaatcctaggctgacccctttttggagatcaaaaacaaaacaagattgctatgaagacctggggtgaaattaagcctccagggttgtggctgttgtagtgtttcccccttttctaactccctctcccaaacctctccttccaggatgcgccacacagagtcttgatgcaggcccagtgtcttgtctactgccaaccaggggccagcttttgcatttgctttgatggtctattccagaatctttttttctttactttttttttttaatttaagaggcagagttggccagccgcggtagctcacatcggtaatcctaacactttgggaggccgaggcaggtggatcacctgaggtcaggagttcgagaccagcctggccaacatggtgaaaccccatctctactaaaaatataaaatcagccaggcctggtggtgcatgcctgtgatcccagctactagggaggctgaggcaggagaatcacttgaactgaggaggcggaggttgcagtgagccgagatcgtgccattgcactccagcctgggcaacaagagcaaaactccatctcaaaaaaaaaaaaaaaagagtcttgctctgtcatgcaggctggagtacagtggtgcgatctcagatcacttcagcctcgatctcctggattcaagcaatcttcccacttcagcctcccgagtagctagggctacaggcgtgtgtctccaggcccagctaatttttaatttttttgtggagacacagtcttgctttgttgcgcagcagtccttttgccttggcctcccaaagtgttggggttataagcgctagccaccgtgcccatcttttcctgaatcttcaggtgaaaatctgaagggaggaagtagggcaggcttcagactagcttcagtggtgacttgctcttcagggtctttggtcagatgaacctttccatgcagtgatgctcggggacctatacttgaagtgaggcagagcattttctggctctttaagcagaactgataaggacatgacttataaggacatggcattcccgaagccaaagatgtcccagctgcaacctgtgtcccagctgcagtccacttggctgcctggcaaatccatcttccttcatggctggccctgtctccacctccttatgagagagccccgctgctggctgtggttatttttacagatagtccactttcttagggaagacaaaggtttcctgataacgttttgatttagcaagtggatgtattctcactctctgaacatcctgaagtgtgtgcctgtcactcaccctgcaagactctaccaccaggcttcatcatgagaaaagcccctcctggccctgagggagccctagagcagggcagggcagggtctcttattgtgtacccacacactagcgatgtcactgcctgtcacttgtgtacacaaccttcatcccacgtgacttacgagctctcgagagtgggacatatgtctcctttgccatcctatcttctggcttagcagggtcccattcaaaatgcatgtgtgcccagcaacagggccataccctcaggtcctttccccagcttccgactgggagctgcagctacctgctcattagctgcattcagacatcaaacaggtagtgttaaaatcactggattctcctcccctccccagagctgctcctgctccggcgtccctagtcaacagtcattattcacatgattacctgagccttagacctggagtcacacttagctcctccatctccccagacactcccccctccacaatacagcttccacctttaatcagttacctaagtcctgccagcttcttatcattcaaatttatcaactgctctttatttgccttgacactcccttcatttcagcaatggtaatatgtcacctgaattaatataacagctcccaaatcagtgttcttgtccccactgcaactgcccttcatcataagaactgtttcttgcacatacattggtagcttcactgcttgctggaagttgctcagcagccttagtgtggtttcatgggccactgctgttttaccctgtctatcatccactcctcctacctctggtcacagtgcctgattttcacaagggcaactcccctttccacatcctccctccttttgctttgatccccgcccattcctctctacctctgataagccagctccaaggcagaaagagggatcatccccctggtgcagtgactgattcagggttggccattcatctccaccagccccacagaaaatcagtcttgggaactactggtcagcaagagttccttctgctgggtttgcaaaatgggagaatccgagcctggagctgctggtggccatctggacatgagggacttggcctgcaagagatgggccaacagcagagactgagcacagacttctgacatgtccaagcacttggatccaggcttgctcaaaccactgcacccccagtcttcagtttctgtttggatttatatttttaaacttgccaacaaaagagacttgactgctccagatacaagacccttggtgaccaggactctccctgtcttttggagggtccatgctttctcttaccgcccaactatggctcaagttacctccttttctgggatttccttttcttttctttgtttgaatatctcctattcatccttcaaatatttgctaacacttcaccacctctgagaagccttttctgacccccaccagactccttgatcattttaccttctcatagcacgtaacatattacatcctaatcacctctttatgtggggggactttctctagactacagcctccttaagactagtattatgttttatcattgttgtacctccaaaatcatatgtattcactcacatgtatgaaataagaaaattaacgctcaaaaagagacaaaagagaaattattaccttgatttgattaaaatacatttgtatgtacttggccatctgcacctgtggattcaaccaatcagggctcaaaaacattaggaaaaaaacaataaaaataacaatacaataaaaaatcaaacaaataaaaaacaatataagataaccactatttccatagtattgacattgtattaggtattataagtaatctagagatgatttaaagtatacaggagggtgtgcataggttatatggaaatagtacaccactttatatcagggacttgagcatccatggattttggtatccatgggggtcctggaaccaatccccaagggtacagagaagcaacaaaccatattttaaaatatcacttccttggctaaatcatagagaatggactggcgcaaggacaagtttggaagcctggagagtagttgcagtgatttaggcaagagacgatggcattatgaaccatggtagcgtgagtgggaatgaagagcaagggacagattcaagacactcaaaagagctaaaggtcaaatatcagggaaatgaggactacagagaaggaagaagtccaaatacctcataaggtgtcttcagatagggaaacacacaaggaggaagagttttggagtcagggaactttaaatctgattttttttttttcaatttaaaattgagatatggccaggcatggtggcatgtacctatggtcccagctacttcggaggctgaagcaggaggatcatttgagtccaggagttctgggctgtaatgcattgtgctaatcaggtgtccacactaagtttggcatcaatatggtgaccttctgggagcaggggatcaccaagttacctaagaggggtgaactggcccaggtcagaaatggagcaggtcaaaactcctgtgctgcagcctggtcaacatggtgaaactctgtctctactaaaaatacaaaaattagctgggcgtggtggcgggcacctgtaatcccagctacttgggagactgaggcaggagaaccgcttgaacccagaaggtggaggttgcagtgagaaaaggttgtgccattgcactccagcctgggcaacaagagtgaaactccgtttcaaaagaaaaaaaaacaaaagcaaacaaacaaaactcctgtgctaaacaatagtgggattgcacttgtgagtagccactgcactccagcctcagcaacatagtgagaccctgtctctaaaaataaataaataaataaataaaataaaacagaggtataatccacgtgtcataatattcacccttttaaaatatacaattcagtagtttttagtgtactcacaaggttttctaaccatcgccattatctaattccataacatttcatcacttttcaaaaagagacccaaactagccaggtacagtggctcatgcgtgcaatcccagcattttgggaggccgaggcgggtggatcacctaaggttgggagtatgagaccagcctgaccaatatggagaaatcccgtctctactaaaaaatacaaaaaattagccgggcgtggtggcacatgcctgtaatcccagctattcaggaaggctgaggaaggagaatcgcttgaacccaggaggcggaggttgcagtgagcccagatcatgccgtcgcattccagccgaggcaacaagagtgaaactccatcccccccacccaaaaaaaaccaaaaacaccaaaacaaaaaacccaaatccattagcagttactcctcattgctccatcacccagccttgggcagtgactaatctactttctatcttcacagatttgcttactctgggcctttcatataaagagaaccatatgctattgggtggttgtgtctggcttctttcactcagcatgttttcaagatttactcatgttatagcgtgtaccggtatttcaccatgttttatgactgaatatgattcaatcatataaatataccacaatttatttactcattcattagctgatgaacacttacttggcttgtttctacctttgggctattgtgaatagtgtttacaccaatagtggtgtaaaagtgttcttttacaccagaacactggtataaaagctattgtgtagacatgtatttcctattgtcttgggtatatacctagaactcgaaagctggattatatggcaactctgtgtttaactttttgtggaactaccagactgttttccaacgtggtggcaacattttagatttctaccagcaatttatgagagttccaattttttgacaaactcatcaacatttgttattaatatcttgtgttgttttgatacagcaatcctagtgaatgtggactggcatcttattgtcattttggtttgtatttccccagtaaataatgatgttaagcatattttcatgtgctttttggccctttatgtatcttctttggagaaatgtctatttaagtcatatgcccattttttaagagtgaaaacaaaattttattctaaaaatagaactcagtaaaacgaaataacaaaagataataaaaaggaagagaaaaggcatttttagatatttaaaatatctaaaaatcagatttttgtttaagtgaatgaagaactgaagatgccatcctagaattgtttttggggccaagttaaaaaaaaagtcaaccttattaatggtatgtagacaaagaggcagaagaatgtggaagcctctatctctgtttcctcctgactttgttcatagctgacattccttctgccccacacagagggctggccccagcacagctgccctggtcttggctgtgattgatacggatgctccaaagtcaacaggtgtgttctgatgtcagagttttttgtgtttcctttggatgcattccaagcctggatagagacgtgtctgcctgaaatggcttatctcttctacaagactgggtggctggaagatgcctgagaccatggtgccagagaattctccgttagagtatgtccttacaactcagtaagcttccagggctaagttccgtgttgtgtgatacacacggagtctatgatcacagggaaaccagctaaaacatttgattcaaaactttgaggccgggcgcagaggctcatacctgtaatctcaacactttgagaggctgaggtggttggatcacctgaggtcaggagttagagaccagcctggccaacatggtgaaaccctgtctctactaaaaatacaaaatttagctggaagtggtggtgggcgcctgtaatcccagctactagggaggctgaggcaggagaatgacttgaatccaggaggcagaggttgcagtgagctgagatagtgccacagcactccagcctgggcaacagagcaagactccgtctcaaaaaataaaaaataaataaactttggtccccagcaatatctaaaaattgtttttaataagaaataggcataacacatggttactcttcttccttgatttctaactaaatttatggtcaggtgattcatggagaattttaagtttgaatatattgttacttttaaacatagggtgcaaagcatgatatttagattgttcatattagaagaagctatcacaatgatcagtcaatttataatcattcaccagtcacaggggaagaagaaaatcctagatgcatcagaaaaataaattactaagacaattatagttataagatcttcatgctcattgaaattatttcatgggcttaattattaattcattgaagaaaactgtgttttcactagttaaagcttaatttaaattgtagatcatattaccttccttctccaagttattaaggaagatctttccaaagcaggaaaggatttttggtgtattgttaaaagtaaaaatatggtctatctatcaaactaactgggggaacttaagcatttttctcatgctctaaatggccatgctccatgctagctcaggatcctaataaacttccctcttccacatcaggaattatttgattgagttgctcaatgaaatcaactggttctcctttcattattataaccaaagtcttacattgttataataaatatcaaaattaggaatgtatttaaaggcgtgatttcataggctctggtccagagaactggactcttttccccgcatgtctgagccaaaatgaagcaagcccccacatacatgaattatggagaataaaactcagcaggacaggacattaacaaggatcagatcaaagggcattcactgagagtaagaggtgacataattcacagaataactacaggaaaaggaaatgttcttgacgattttagattaccttttatgagagagtcctggcagtttggaatatgtttcactaaaaggcaggccatacttccagatttctgatttataatattttttgagtgcaatcaatatctttgtctaagactgtccctatctgggctgcctttagaacaaatcaactgacacacaaagagtccctgctctccgggccccaacctccttcttgtacggatgggctcttcctaaatcaaaaaaccctgcctccttcagttctccagatttccttactcccagctcagctacccacaccccaagggaggggtgggtgataatccagctctggcaccctcctctcccctacatgagcctctctgcaatgaggcagcccaactcctctgatgggctgtcacaaaggtaattgaaaaggagcatcagggctcctgtccgcctccctcaccctccttgctggcagcatctaccacattcctgtggatgtgagtggaatcctggaccccgccatctcttaggtctccctgctctgtcaccaccagggccagagtgtgatagttgatgcctgctggacgcttggggattcctgagttctactttgttcagaaaaggtctgtgtccgctgatgtcttatcagctggcataagttggcaggtgaggttgaggattacctctgattgctgattctagagcaagtagaccctgtagtagaagagaagcccatccttgtcaagtggaggttgatgctcggactctgcagctagtttagaagcctagttaagggcttctcccatgatgaaaaccacagccctcgccgctggcgaaggaacaccagggtgaggttaccagcattccttcattgtatccttaccagggatattttttccagcctgcttccaccttgtatctccacaccatgtttttgtcttgtttagttttatttgcagatagggtctggctctgtcacccaggctggagtgcagtggcgtgatctcggctcactgcagcctctcgcctcctgggctcaagcggtcctcctgcctcagcctccaaagtagttgggaccacaagcacacaccatcacacttggctaattattctttctttcttttttattttttatttatttatttatttttttgtggggacgaggttttgccatgtcactcgggctggtctccaactcctggactcaagcaatccacctgcctcagcctcccaaagtgttgggattacaggtgtgagccactgcatggcccattccgtgtttttaattcacagacctggcccaggaggcatattccccactgtcacttcccctcggcccctccagggagggaaacccagcacccactcccattctatctaccgccctgagagctgttcagacaaagacaggcaatgagaagaaacaaacccagccttctctgtccatcctgtgaggcccggcaggcaacagggacaatgggaaagggaaggaattgctatgcgttaagaattcagtagtattttgtggccacattttcttcctctcttcttccaaactcctttatccttcaaacttaccaagttgatactgtacaattcctgacttgtattgtcttgagcaatgaagcaaggctgcagggagtccacagagaagctgctggagtgaatttccttatcgataattcttatcagctcaaatatgccactgctctctgacatagtttgaatgttttcagaatatgtcctttctttttagtcttatggtatcgttttttcttttctttcttttttttttttttttgagacagggttttgctcttgttgccccaggctggagtgcaatggcgcggtcttggctcacctcaacctccacctcctgggttcaagcaatgctcctgcctcagcctccagagtagctggaattacaggcaagcgccaccatgcccggctaattttgtatttttagtagaaacggggtttctccattttggtcaggctggtctcgaactcccaacttcaggtgatccacccaccttggcctcgaaaagtgctgggattacaggcgtgagccaccgtgcccggcccgtttttgttttgttttgtcttttaatatagaagagtaggtattaaatacgttttctttccagattattttggtttagtgagataactaaataatattcaaaaggaggaatttgatcagcatcatcttaaaagctatctgaaatctatttctaagccccagggtgccctgggctggtgagcctgcccagcctctgggggtggtatggactgaatgaccgcaggaaggaaagtgagtctgtgccctctgtaagcctctttgtggactttaaacagtacttgtggaccacctccctgggcgtgcttctttgtggagttactcattctcttggttgttatatttaccttgtgaacttcattccctctaaaaggtagctaaggatacagcagaatgacttgaagagtcaccatttagtaaatgtttggtttgacatctgccaagaaacaaattaacattgatgtcggcctgggtgcataggaagtaccaacactgatgagtgttgcggagaccttacttagttccaagtgctttatgtccagcattgcattgactcttattgcaaccttattaatagaatgagagcaccattattacctgctttaaaaatgagaggcttgcaaattaccgggtgtggtggtggcacctgtagtcctagctatgatgaggctgaggcaggagaatcacttgaacctggcaggtggacgttgcagtgagccgagacggcgccactgcactccagcctgggtgacagagcaagactccatctcaaaataaataaataaaaaataaaataaaaatgagagacttggagtgattcacttaaggtcacacataataagcagcaggaccaagacaagaaactagacctttaaacggtatgttacataaatgatacatatttttctttggatggctcctttccccatgagtttacaatgcatcatttactgaggacagaaggtaccgcaaatgagttcgtcctcaccagacatgatcttggtgctggagttatgggtagagggatggaaactgtcccgttcctcctacagtcaaagagctggcttcctcaggcaagaggctgaaatttgatttagctttgcaaacatggctcctccaggccctcaattttgactgccataacacacacagaaaatacaggagctgattctccccgctccccccgctcccctgggtcttactcttcttcactgttcagctcgtcctttgggtgttttcattcacccatattcctccaatcagttccctctctgggaagttagccagatttcattgctgtagtgagcactcaaagaaccgcatatgtaggatacttataaaattcatggcactgtgtgtggcagcaactgctttaatcctggagataagtcattcctcaacatctaggtgactatatcctgaggcactgggaagtaacttcctcaacactgaatagcaaaccagagttagaatgtgtacaagtccaccactccttatccacaattctaaaacccaagcagctctaaaaaccaccagcaaaacgtggcctgacctcatatgccgtggttgacggtctttaccttacttaatataatacaactcaagttgtgactcacagaacctgtgctcctcccccgttaatggataatggtcttgaaggtttcaagtttgtggtgagcctccaccctcatggtcatcctccactgtcggctcctccttctcataaatgtcagcagcttccagtgattggtggggtaggtgggggctataagtttctcacccaaatttgcaaatcttggaccacatcctgacaaatgcataaatgtttagcaagtaaatttcaaaattcataacttctgaacttttatgctcagggaaacccctccttcccttttttttttttttttgatacggagtcttactctgtcgcccaggctggagtgcagtgatgtgatctcagctcactgcaacctctgcctcccaggttcaagtgattctcctgcctcagtctcctgagtagctgggattacaggcgtgcaccatcacgcctggctaatatttgtatttttagtagagacggggtttccccatgttgaccaggctggtcttgaactcctgacctcaagtgatctgcccacctcagcctcccaaagtgctgggattacaggcgtgagccactgtacctggccccctctctgatcttcaaagagtacccgcatgagagttcactctgtgctgggtgcaattgtgttctgatgtgaggaccacatgagctgaatggatccttttgcagtccacacctgaaattgtaaaaataaacaaaataactaagaaacccctgacaatccaacactaaaaatcaaagttattttttcagcttatttgatagaaaacaatctgatactgagggttcgttataatttcattcatccactaagtgcgaatacttacatgttttgtgttgaagttttaatacatttgcttccagggtgtttcagacctctctgggttattaataactgcatggcgaatgcattttattctttttctacttggcccaaaggctctgaagaagggattaagatcctgtaatttgttcattcaagaacaaaaggcccatgtaatctttttagtcaccacttatcttgaacaccatgactttcaccaacaaaaaaattatttagcatactttattccaattagtgaatacattttttggtgtagagattagtagtttattgcctattagccattgctatggtaaagtttctgatacttgaaatgccagctaactacacttgctatttggctgaaatataatttgcatgaaataatcatcacatagtcactataatactctaagcaccaacattttaagaaatgtgaactatttgctatgaaattattttaaaattcctggccaggcacagtggctcacgcctgtaatcccagcactttgggaggccgaggtgagcggatcacgaggtcaagagttcgagaccagcctgaccaacattgtgaaaccccgtctctactaaaaatacaaaaattggccaggcgtggtggcatgtacgtgtaatcccagatactcaggaggctgaggcaggagaatcgcttgaacccaggaggtggaggttgcagtgagccgagatcacaccaccacactccagcctgggcaatagagcgagactctatcaaaaaaaaaaaaaaaaaaaaaaaaattccttagaaacctgcccatattttaaaatgaaaaggtttaaactgtattggaaaacctacaggagtatgatttcaaccaacagaaaagcattacaaacctccgcacccagtttctttttcattatctcctaactattaaagtggtgtcgcttggtgccactgcacgcaaacacaaatccaagcaggagactaaaactgtcagtggttgttaggagccggatatccacatgacttagaatgtatctatattgatatttttaaccaaccaaaatccaaacataaaattgcatagaaaatccatagatccccaagaatatgtctcagaattcctcaggcccatgaactctactctgaaaaacactaaacaattcctctgccattatatgtgaaatccaaagggagaactgaagactcaggctgatcccagaacaccgtaccatcttaagctagctaagcatatgaacttattcaatctacctatagttttcctgccttcaagcactcccctggactgtgataaaaatatatgtgtacttggcatgcaatggaatcctgccaagaagggcaactgtttcttataaatgctaaataaacctaaatttctaaaaattattggaaataaattcaaatgaaccaataaaatttttaaatgaaccagtaagtatattttaacggaactgagttcattgaaattttaaacacctagagtttattgctggggggaaaggatttgtgaagaaacttcatttattgcattatctgaatttattaaaaatattttgcttggccaggagcagtggctcctgcctgtaatcccggtactttggaaggcagaggcaggcgatcacctgaggtcaggtgttcaagactagcctagccaacatggtgaaaccccatctttactaaaaatacaaaaaaaattagccaggcatggtggtgcacgcctgtaatcccagctactcagaaggctgaggcagaagaatcacttgaacccaggaggcagaggttgcagtgaggcgagatcgtgccatagtgctccagcctgggtgacagagccagacttcgtctcaaaaaataaataaataaaataaatagaaaataaaaataaaaattttgctcatcctatccatgtattttcaatttagtaagtgtaaacatagtagatactttctgttgtagcatgtaaggcttgatattatttcaatgggggaggatttctagcttggtagtaaattgcattttacagaggacaaaaaaaaaaaaaagaatgcaagcattttaaccctcaccaaggatgctgaaaaactgatacagtttgctctgtttcagagaagcctggaaaaatttaacaaaactggagagatctaggactaaggagaggtttcagaggctctttggattgagcatttggcaggactctgggacaattcccatatcatcccaaatttatccaaagccaagaaatctataaaaaagagatcaccatactctcgagatgggttggaggtgaagggtcatttgttttgcagctttatcctgcgtattagacttctgtttcctagggaacagtaaatgatagcatgaggcttacttgtttaaatgcaatctctcaatggtgtaaggcaccataaataaaaatcaagttgacccaaaacacaatgctacttaatatgtaataatgttgtaatatatagatgtttaatgtaaaagatcagttttaaaattactcatttttcagtattaatgtgacaacaatcaataggatatatgtgagtatatatctatacaaagacatatgtatgtatataattataaatttaccagtgatgaagattgataactgttgtaataacacagaaaatacaaacaggctgggcgcagtggctcactcctgtaattccagcactctgggaggctgaggtgagaggatggcttgaaccagggaggtcaaggctgcagtgagccgtgatggcgccactgccctccagcctcggtgacagagtaagaccttgtcaaaaaaaaaaaaagaaagacaaaagaaaaaagaaagaaaatacatgcaaataattgtcctgttatcaagcatgtgtcttttgattggttcttgaacatctgtccggagtcagttgtatatgtttctctgctgtaaatgcatttttttcctctcaagacttaaagaaataacaacaacaacaaaaaccctccagtttacccggatactttttggtggctccaagaggatctgattgtgtccttgacctcaagggccacctgaagagtagtaagaaggccttttcttatgggatgttggagcaactcaaatctgtaaacttgtccctgttgctcagtttaattgaaagctgccttcatttattgccattttgaacatgactgaattgggatgagaagagagcgcatttcttcctgatcgttttgaatcttttttataagttgcttctcttttccacgggaagctatggttatgtatacggtgagcaaggtaaaaatgaataaaatcctgactaaatgtttagcgccacctattggtagtgaagtacatattgattcttggtgacagacattcccaccaaagagagcagaagtaattttaatgattctttttcttccagtgtatatgcctgtatgcatgctttattatgactattatatttaaatataaacatatacttaaattttggtaataatataaatatggaattcttctaggttatgatttgtattatttagcttcacaatacccttgaagtagaatatgcagtgatagtctacttttcaacagtaaaaagaaaattctaggctgggttcagtgactcatgcctgtaatcccagcactttgggaggttgaggcaggaggatggcttgagtcgaggagttcaagaccagcctgggcaacatagtgagaccttgtctctacaaaaaaaaaaaaaaaaaaaaagaaaaagaaaaaagaaaaaggaaaagaaaattctagagaacggggaagaaacaacaacatgacattgtcacatgttgtttgttatgtttgtcttgaaatacatattgtcacctatacacaaagtatcttgaatgtgctctatatcttttgaaaccgcctttaaaatggttttccacagaaatttgagtttgaaataatgatgttatttaaattcagttacttatctgtgctaagaatgaactggccacagatggtgctgagacaactggatttgcacatggaaaacaataaagttggactcctacctcataccataaatgacacttaaatcaaaatggatcaaatgcctaaacaaaatgtaatatataggccaggcatggtggctcatgcctgtaatcccaacactttgggaggccgagacaggaggattgcttgagtccaggagttcaggaccaacctgggcaaaataatgagaccttgtctccattactttttaaaaaagtaatatatgcatataatgggctattatttggccttaaaaaggaaggaaattatgacacatgctacaacatccatgaaccttgggggcatgctaaatgaaactggccaatcagaaaaagacaaagactgtagaattccatttataagaggtagtcaaattcatagagacaaaaagtagaatgctggctgccagggctgggggcggggagaaattcggattgttgttcagtggatacagttcccatttgggaaggtaaaaccattctggagatggatggtggcaatgtttgcacaacaatgtgaatacaatcaacactactgaattgtatacttaaaatggttaaggtagtaaatttattgtatgtgtgttttactataataaaaaagtaaaactttttaaatgtctcagactcctaaatgtaagaactaaaattaaaattcataatagaaaacataaatataaatcttcatgatcttggattaggcagtaagttcttagatctgacgccaaaagcagagacaatcaaagaaaaacagaacaaacacatttcatcaaaattaataagttttgtgtttccaaggaaatcattaggagagtgaaaaggcaactagggagaaatcatttgcaaatcgtatatctcataaggaacttgtatctaaaacataaaaataacttttaaggctcaataataaaaagacaaacaactcaatttaaaatgggaaaagagtctgaacatttttccaaagaacgtacacaaatagccagtaagtacatgaaaagatgctcgatatcattagtcattagggaaatgcaaatcaaaaccacggtaggattctgactcatacccattcagatggctgtactaaaaaagatagataataccaagtactggcgagaatatggagaaattggaaccctcgtacatggttggtaggatttgtaaatggtgccgacactttggaaaacaatctgtcagctcctaaaatggttaaggttagttaccatatggtccagcaattccaccaaaaataattataaagataaaaaacttgtatacagatgttcatagcagcattattcatagtagtcaaaaagtggaaacaaacaatccacatgtctatcacctgatgaatggataaataaaatttggcatagcacacaatggaatataattcagccatagaaagaaatgaaatgctgatatatgctacaacacaaatgagctttgaaaacattgcactaagagaagccagtcataaaagaccacatatggtataactccatatgtgttatatgtgaaatgtctcaaataggcaaaactatagagatatgaaatttctgtgaaatgtctcaaatagacaaaactatagagatatgaaatagggtagttctttctttgggccatatctggggggataaactgctaaaagtttcttatggggtcacgaaaacatttaaaaattaatggtgatgatggttccagatatctcaatatactagaaatcactgaatttgtacacttttaaagaatgaattttatatgtaacatcttaaaaagatgttaatgggtcagcactagatccaccattgtcaacttgtgacattgatttaaaaataccttcagaatgagcaagactagaaaaagagatatgagatgtgaatcatatagaaggatgtgaaacatccttcatggtattaaggaatataaaactatttatatttagatttaatgaatgtgagtattacagtgctttatttacagcaaataatttccactaaaattaaagagacattggtcttatcattccttatctctatactcttttcagcaaacaatatgaacaagcatcttaaacctagaaattgtcccccagctatgacaattgctctccttcctggaactgcctttcctatatgttaatttcctcagtgcaaaagctgttattttcattcagaatgttaaagatacccctaggaaaagtcattttaaaagtcttgattttcacagccttcttctgcattagaagcttaagagatatcctagggctagtcttcactccaggttttaggagcaatctaggtaagaatctgcagaagctaggtgaaaatgcagatccatggaagctatttcaaacctatcacatccttccccaggtaatttttatactaatatatgctagaatgcgataaggttaaaaatattctacttctccactttatcagagaggtgggagttttgaaatctcattgccatgcaaagaactacggcccagaatgtgataaatgaaaggcacctaagagtcatgtagggcagtccttttattctgtgaaggaagaaacaagatgattaggccaaagccacacagatattagctgcacaaccagcacaagattgagcacgagatggggctcgggtgttgtgacgtccagcgcagtttcttcagctcagttagggcagaattaggttgattgggcaccattgaagtacatgctacatccatccaccattagatgaaacctctaattttagttctgcttattattttttattttatatattttttatattttatattatatttattttattttggtttattttatttaattttactattattttttaagacaggatcttgtgctgtcactcaagctggagtgcagtggcgcaatcacaactcactgcagcctcgaactcttgggttcacgaagtcctcccacctcaaccccccagtagctgggaccacaggcacgcaaccaccatgcctgacaaattttttaatttgtaaacgtttttgtagagatagggtctcaccatgctgcccaagctgcaattttagttctatataaatagggtagcccagggaaaagagaggggagctaccatggggaaggggttactgtggatatgatttttaaaattttctctgctacagctcttccacgtttacccacataaatttgaagtttaatttttagtctctagaaagcattttgtgatgtcttttaaaatattatgtatgtattaagaaagcttgcatccatatgtgtagaactatttccttttctttttgggcacccgtggctctctattaatattaagaatttcttagatgttgcaattcttcaaggaaacaatttcagaagatagtttcttttcctcccttcccttcccttgcccacatttctctctctttttacttccagttctggaaattggccagcagaattatttatggctcttagttcccatcacaccttaataataaacagaaggagttttcctttgttttaaaatttcaacagtacagtagttaaaaattggcttccatcagaaaactctttctccaagtctaatttgctatgccatgtatatacatgattaaccagtacaatacgtacagcaaagaaaccaggtgagagatttattgattctggctgaaacaaattgaaaagtaaccttgaacactttgtgaagtccataattgagttccacaaatcaactttggagccagtttagcatgtccatttagttgaggcaaagagcctgtgtttgatctaacttaataaagtaattccagtgtaaaaaggtaggtcaaaatgactaccttctaaaattcaaagttccttttttcatgagagaaattatatttatttcaaacagaactaatgatactgtatttggtacaatatgttattttcttagatatcttaggggtaccttctactaactaatactttgggataggcttctgggattcatgagtgtcaccaagttcagagctgatcttaagcaaaactgaatggcttggcccttctagaaaattatcttgcctctgataactcaaaattcaaattgagattgtaaactataacatagaagtatttagtgtaggtgatattatagaacaggtatctgttctactgatagtcaccccatttgagttaaatatgctatgtgacaatattaagaagctatgtcttctgaaattgtgtaaactttaaaaaatatatgaaaaattagaatactatacaaaacaataattattaaaccttctcccactttctgggatatccaagtctaatttgctatgaattataattattaaaccttcttccactttctgggatatccaagtctaatttgctatgccatgagagtggcatgctgcccaagctgcaattttagttctatataaatagggtaatccagggaaatcagaaatgcagagtgtgtttataagcacatgtgaataattacaatagcagacacacaattttaaattcaaatttgttgttgttttttgttggttttgtttcttgtttgggaaccacaaaataagcctgtctttctttggatcttaaaatttattcacaatgttttcatgttttatattaggaattatctggttctacagaagtagagaattccattcctacgggaatatcagaaggaggttaaagtgggcacaggtaaatcatccatttggctatcaaaaagtctgattctgaccaggcgcagtggctcacgcctataatcccaccactttgacaggccgaggcgggcagatgacctgatgtcaggagtcgagaccagcctggccaagatggtgaagccccgtctctactaaaaatacaaaaattagctgggcgtggaggcgggcacctgtaatcccagctacttgggaggctgaggcaggagaatcacttgaatccgggaggcggaggttgcagtgagaggagattgcgccactgcactccagcccgggcgacagagtgagactccgtctcaaaaaaaaaaaaaaaaaaaaaaaaaaaaaggctgactcttttttctggtcccaaataaaaatgactaacttcttcaaaatatagggtaataaaataccctgaaatgagtaaaagttattcattctgactataatacactttgttttggtagaaaaaaaatcttcataaatttaaaaactgaataataagcccttggttaatcatttaacattagaactcctattttctcttctagcaaatgtttccaaacagaaaaacgaccacaatcaattttagaaaacatgtttcccctttgaggaaggaaggacaaataagatgtttaaactgcagttggtaaaatcatttgctaaccctctgcgtggtaatgatgccacatcacctgcactttgctgtcttgatccatgctgaagtgatatgttcttggacccaagcagaactctctagcgatttgcatgttttgtcatattgtcacagacactcatggttaaataaaaacaatctggttagtataaagctcaatttgcagagaaataactattctctgtgtcagagtccacaggcaccagaagaaaacattttcacacagaacatggctatgtgccttttaaatccatttgcaaaattgtttcatttcttatgtaaaaaggtggaatattgactactgataaaaatttcctcctacacaaatatttttcaggttcatccaatcccacccttactcaatatagtggaacatgaagctaaattcatctggaatacttcactaactcccaaaatgaacaagggagtggaaagttgataaaaaatactagcccatacataatcagggaaacaagggttgtatgttaagtggattttcttccatccgtgtgattacctgaatgtcatttttaacttgggtaacttaaggtaaacttatctctctaagttcatcaatattcctgcacaaaccttcattgccatttaattttaataaaactgagaaagagagagtgaaaactcatgttacccattccaggcaggaagatgggaagaaaggaagcatgccattcagaattctgaattgatttgtacaatgtcttaggcaaaagctcttccagaaatatctatgaattcacgttgaacataagacacaaaattacagataaaggttaaaatcaaacttgtcagatgttaacattatcctgactactcataaattgattcatttatgtgctagaacatttttctactacccaccctggaggaggagagaatccatttactgggaatgtggaatgtgcttcgtccgggaggggaggggaaagaaagaatcttgactggtgctatgtaaagtggctgcacctttcaaccagttttcaatttcaaacaagacttttaatatctatgtcttttgattgtttctgacttttaatttttgaaataactgctttattaagatataatttagataccaatttcctcatctaacgtgtacagttcactgatttcttggtatattcagacttgtgtaatcatcaccataatcaagtttataacattttcatcaccccaaaaagaaccacacaccttttagccatcacccctcaacgcttttttttatcctttagccctaagcaactcataagtctacagatttgcctattttgaacatttcatataaatggaatcaggcaatttgtggtcctttgtgatgggcttctttcagttagcataatgtttttaaggtttcgtgtttaaataattttttaaaatttgggaatcttttcaaatttacaaaagagtggctaaaaaacattgtacggaaaacctccatttatcccttatctagattcatggtattgttaatcatgtttctaaaggtttttaatgtctgttgttatagcaataaaacattcaaaatggttatatttataaaagagtggtctgcaaatgcttataaataatttggattgtcatttggaacattctgaaaatgacatggaactcagggctatgaaaatccactggtagatgtgtagttgatgtaggcagattgaatttccatatgtgcctggcattattaaccatacagtcatacagtcgtgtaccacaggaacctttagtcaacgacagacttcatatatgactgcagccccataagatgataatgccatatttttacagtatttttcctgtgtttagatatgcatagttacacaaatacatttgtgcatgtaatactacattataattgcctacagtattcagtacagtaacatgctaggcagccaggagcaataggttataccacatagactaggtgtgtagtaggtgacaccatctaggtttgtgtaagtgcactttaggatgttttcacaaagaccaaatcgcctaaggaagcatttctcggaacacatccccattgttaagtgacagaagaccatacaagaaaactcaagattctcacaatcaaaatgaacatgtaggaaacagggcttaagaaggtcatagggctgggtgcagtggctcatgcctgtaattccagcacttttggaggctgaggcaggtggatcacttgaggtcaggagttcgagaccagcctggccaagatggtgaaaccccgtctctactaaaaatacaaaaattagccaggcttggtggtgggcatctgtaatccaagctactcagaaggctgaggcaggagaattgattgaacccgggaagcagaggttgcggtgagccaagattgcaccattgtactccagcctgggtgacaagagtaaaactccgtctcaaaaaaaaaaaaaaaaaaaaacaaaactcatagggataccaagtccttttccatcattcttaatcaactggaattacaaccaattagtatttattaagcacctaataatttgtgtcaaaaagttgtacaaagaggtaaggagtaagtataaagaagaataaaacaaggtggtcagttttaacaagatgatctacattgtgacctgaactctgtcagcaaaattaggacaaaatagctatgaaagatataaaaaattaattctttctgggagtaagacactactggaatcacaaaagaagatgtactcaacaaagcttcaagtcataatttttttttccttctgacattaaagattaccaaggctctagctctcttatggaaaaaagtaataagatgaagttaaggggatcttttccttagaagttttattatttacaaataatgaggggactaagaacctagttgttgttgttgactttttaggaataatagtactcgggcaccttgaatttaagcttagcataattatagttttaatctatgttgcaacagttctatggaatatcattaatcttttaccacttttaatatattaaagcattgcatcccagtcttggctagggaacataatttaatctgtattcaagcttggggtgcttgaatacagatacccagggttctctgcagatccccttaggagaacctctgtcaaaaaaagtttggaaaactctttgaaggacactcctttaggagtttatcagctaaatgtaggatgctctgggttactatattcattattgacacctagtttatggacatagaaagtatcctcactaaaatatttaataagaagcatgttctactgtctttgaaccaagacagagtgctcttagtaatcaaggtcaactgagctgggtgcagtggctcatgcctataatcccagcactttggaaggccgaggtaggtggatcacttgaagtcaggagtttgagaccagcctggccaacatggcgagacaccgtctctactgacaatacaaaaattagctgggtatggtggcaggtgccggtaatctcagctactcaggaggctgaagcaggagaatcgcttgaacctaggaggtggaggttgcagagagccgagattgcgccactgcactccagcctgggtgacagaacgagactctgtctcaaaaaaaacaaaaagtgaactggagtccttcgagcattggataaatactacagtggctaataatttccctctttacatgtgtaaaaccatgttagcagtttgggacacagagggcacaaactatggaatgagaagattcaattcttcctcttgtgtgaccctgggggagccatttcatccttttgaacctcattttctcttgtagaaaaaaaatgaaaagagtaagaatatctaactggtagggtaattttgatgatgaaattgaagtatgtatataaaagtactgtacacactgtcattattattttattttgtaaaacaataatttttccacattcttgtcctttagaaagcagtgccaactattgtaacaacttttttctttacgaagctacataccattttaaatatattgtgcaagtctattatatctgaaaataaatctacaaaagaaataattttccccttttgtgtactattctgtactatagcaattttgaccctttcacaattttggatctcctccatacagaaagttcccactctaaaagacttgaagatgtttgtggatgcctgggttagagaaaatgtacagatatataaaataataaaataaaataatttgaattcaaaaaagctatttataaagaaatgtaacatgcaaggaatatggctacccaatttaagcatcttcgagagtacagctatttgcaatttagaatgaaaggaattgaggataaacagttcaagtgtctgcctggaaaatacaatggcacatcaaataataattttaagtcctctgtctgaacaaaggctttagtatggtaataagtagtacaaagcaatcaatgtttcatatattataatttttcacatatggaaacttgcaactacagctctctgttggctgcatgtggtggaaacaaaaggaagatgggaatttaagggactccaagtgtatttataaagtcagaagttacactgagttggaggatagggtggaaggcatgacttgaaatatctaggtgaggagagtttggacaaaaacgctgatcccattagaaagccaaatggcacctcccaggtgtggagcaggcctgtcgcatctcacaggcggaacagcgggcacagccgaggggacgcccactctaaagagggtgaagaactaaaccccttagtttgggcttctgccaccagatcccctggattgactattagaaacttcacttctatttctccatcagtaaaacagaaaaagaaatattcgatgggtaggagtagctatggttaataaaataggtttaaatatttggcaacagaagaaagaattcaaatctgtgattgagaagcaggtcactggaaggttaagttaacctgaaaactccaattccccctttcctcatcactgcgtagtttgcttttcagtcgtttcactcagtctgcacctacactaaatcccagcagcgaagttgaaggcattcacgtctccactcaccaaggtccctggatctgaatggccaggcaaataacctagctgtgcgatagcgaatgcagtcaatatatggcatagtgttcatctggtgcttacgagtgatagaagtttttatctaatttcacttttataatcagtttgaggtctcattatttttcctttttttaaaaaataaggaccagtaacataaaatggcaaaaaaaaaaaaaaaaaaaaaaaaaagggctgctgttttaaggccccctgtgaactgtttgtatcccacctgcaggggaagtacagaaactgcaagtaagcaggttgggaatttgggagcaatttgaatggaatctgacacctgctgaaatctagaataaaaaaatgtgtattttgtatgcctttattttattcttctagtgatttatttttaatgtatgttaaaagtactactgtgtgacagattggaaataaaggaaaaacctgattcctctccacaggtaatcagtgagaacattgaattttgatgggcatttcaatgactgagttattttctccatagaaagagtgacacaagtgaggggtgagggggtggggagggagccctgtcttcagatctcccgttgtttgacttgggcgtaaggaactttctgagtcaacctgcaggtggcttggcagggattccttcttcccagctcctggctccaggtgatagctgtggtctcatctcctcagcaaacaccttcaaagagctcacagcagatatgcagtgggcagggagattggctttctccaaacacaggggagattgtggagggggagcaggtgaaaatcatattgttaatcacaaacaaacataattaaccggcaactggattaagatacctaatcagtcaaaattatttagaggctcttataaccatcacccttcttttggaagttcctgcttgctctgtgagataatgctctgttaatgaaatacatgtccataggggtcccctgaaggggacattcctcctcttaaagtgacataatgaggcttcaataaaatctctaagggggaagagtgttttaaagaacaagaggagacgtgaaaatgtgtggtcaaggactaaccaagagtcaaatgcttgcccagctttggtccctctgtgggctttaaagaaatccttcagtaaggctcagtctcaggtgatctttcattcattcaacaaatcttgcggagttcccacgatgggccagtcgccagcagttctgggcatggggggctgggtacagcaatgaacaacacaggtaacacccctgagagctagcattctaatgggcagggggtagacaatacaaataaatatagaacataatgactgctagtaatgagtgctttaaaaaattataaagcagagaacagtgtgtcacaagtttgtggaggaggtgggggacagtaacgattctaggtaggatgtctctctgagtaggtgtcgctgaatgaggggactgtagttccaggcataggcaagagaatatgagtttcgagcaaaaaggagcttggcatgttctgggaatggccagaagccagttgactagaacactgtgatgaaggcagagtcatgaaggatgggagtagaaggataggaatgagccactttggctgggcgcagtggctcatgcctgtaatcccagcactttgggaggccgaggcaggcagatcacttgaggtcaggagttcgagaccagcctgaccaacatagtgaaactctgtctctactaaaaataacaaaattagccgggcttggtggcgaatgcctgtaataccagctacttgggaggctgaggcagaagaatcacttgaacccaggaggtggaggttgcggtgagctgagatcatgccactgcactacagcctgggcaatagagtgagactccatctcaaaaaaaaaaaaaaattagatggtcatggtggtgggtgcctgtaatcccagctacttgggagcctgaggaaggagaactgcttgaacctggaaggcggaggttgcagtgagccaagatcgtgctgcactccagcctaggagacagagcaagactctgtctcaaaaaaaaaagaaagaaccagttcatatgggaccttgtaggtcaccagcatggataggatatttacataggattaaatcaaaattgatgattgtgatgttatgcatgtacacaagaaagtgcaaggagcattcactaataaaatgtacctaaatcaaatgctaggcaaaaggttaaaaagtagctataagttaaccatctttataaatatgccattataattcatgtgttaaacagcataaaatatgtactggcaaaatcaaattagcataggccctccaactgttgaagacttagactgctcaagaattaaagcttcaattcgaacaaccaccctaaaactgagttgacatgttaggtatttgtggatcacactacatacaatgaccaaaccagttagtcatatacatatgattgctatttgttaaatcattcatgctcagagtctttgcttaaccagaggctgccccttctggctctgggatgtcctatcatcaccttttctgtagacacgaccctgtcagattttcctcctttagtcctggaaagggagaaaagatttgccaagaagagaagagcctgtttacgtgccctaggtcatccactgcagctaacttttggggtatctgtttgttttgttttttgaggcagggtctcgctctgttgcccaggctggagtgcagtggtgcaatcatgactcactgcagccttaacctcctgggctcaagtgatccttccacctcagcctctcgagtagctaggactacaggtgtgcaccaccacgcctggataataaaaaaaaaaaaaattgtagagacaggcactcactatgttgcccaggctggtctcgagctcctagtctcaagcaatcctccctcttctgcctcccaaagtgctgggactataggcatgagccaccgtgcttgacccgtagctaaacttgtacctgcgcactgtcaggtttcctggggctgccagcagtgccgctcctgagctctctaagagaaagcaccacaccagggatgtagagttcagagagccactgagcctgctttggagacagaggggttgatcttcattttaatgtagttccactgaactttccctcttacactgaagatggaaatgactcatgggaattcaatcatgcaaagcagcagtataaattagattggccagcctctgcacttggggcaagtcatgcaatctggcttgttatgcattattttcttcatctacaatcatggagagtaatgtgtgtgtgggtgtggctgacagcagggaaaggcaatatatttatgaaatatttcctcaaagctgccacatattttattaacacatctggaaaatactatttaatgcttactcctctttcttccttagggtttgttttgttttgttttgtttttgagatgaaatcttgctctgtcacccaggctggagtgcagttgcacagtcttggctcactgcaacctccaactcccaggttcaagtgattctgctgcctcagcctcctgagtagctgggactacaggtatctgccacaacacccggctaatttttgtatttttagtagagatggggtttcaccatgttggcgaggctggtctcgaactcctgacctcgtgatctgcccacctccgcctcccaaagtgctgggattacaggagtaagccaccgcgcccggcccccttatggtttttaagaaaagaaatcctagttttgctttagccatgactaaaagccccagacgcaaagaatatttgtttgtttgtttgttttgttttttgttttttgagacagagtcttgctttgttgcccaggctggagtgcagtggcgtgatcttggctcactgcaacctccaactccccggttcaagagattctcgtgcctcagcctcccaagcagctgggactgcaggcacacaccaccaatattttagttcttaatggtacaatcttacagttttaaaacgatgagtgactgcattcaagacaaaccaaaattgtgccttgtttttaactgatgcctgaggaacgtgccagcaggtaaagggagtgaagacgaaaacatcaattagcttagagtttatggtcacactcgatacttaaaataatttttaaatagatttaaacaagtaattctttctttctttcgctttggggcatggaggaagcagggtgctgggcaaagcctgcacagaggcgctggcatgcctggaagccaaaaaaatgggggctgggagcgggcagtggtgtggccgggagcctgattacagtgagcacatatgtgcacatatggagagaaacaggagccaggtttctcactgtgggaaaagagatttacaaatacagcaaaggagcagtctagaaagaaccctaagatgttggattggaattggagactaacacaagatatatatatataaacacacacagaggtagatttagaaatagttatagatatgtatgtatgtggacacacacgtatacatacatgagcatacattatttcctagctctgtcttttgagggtgcctggaagcagggacagtacagtactgatgagaacccagatttccacttctaaatgccatcctccacaaaaagatgcccttgatccttggagaaatgcctggatctagggctaaatgaagggaaaattcaaaacgagcctggaatatcgtgttgtgctaaaaactatgaaaatggtcaaagggttataaggacatatcaaaagaatacaggagctagctcgaaaggcacctcactggccaaatctgtggcaactgcagcacccaaactattgatacaatctagggaataaaaagagaatcaattggccaggcatggtgtaatcacacctgtaatcccagcactttgggaggctgaggcgggcgaatcacctgaggtcaggagttcgagaccagcctggccaacatggtgaaaccctgtctgtaccaaaaatacaaaaatgttagctgggtgtggtggtgggcacctgtaatcccagctacttgggaggctgaggcaggagaatcacttgaacctgggaggcagaggttgcagtgagccaagaacatgccattgcactccagcctaggtgacaagaatgaaactccatctcaaaaaaaaaaaaaaaaaaagaaaggaatccacagagatacaaataaacaaacaaataaaagaagggagaacttccttacagtagaaggaatacatgccatttcattgtcagagttctcaacacaaagacacacacaaaattctcacttacaaaggggaaaaatagtgacctgaaggtagagaaactgggtagacaccaacttgatgaagtgaccagattagcatcaccagtgatgatgagacgtccgacggccttccttgtcataccctgatgggagcacaccaccatatcaacgattttcctacaaagaatgtgtgagtcaacatagacagaccagggtgtgggacattcttggcatgaaaggcctgcactctttaaaactataaaggttataagatagacagaaaaatatggaagacctttgataaataaatgtaacttgatcctgaattggatgttgggccagaaagagaaaagaggcattgttgaagcagcttgcaaaatttgaattgagtatgtggcttagatggtagtgacgtatggtagtaatgtcaatttcctaatttgtatggtatttgatggttttggggagagtgtccacattttaggggaatatacactggagtatttggagtaagtgatgagacattgtgccacagcttgctctcaaatgggtcagaaaaagactaatggcatgcatatatgcatatgatttaatatagaatatgtaacaatatatccatattacatatttatatagtatctatattaatatattatatactaatgtattctatgtttctattgttctgtgtatgtatatttagaaaagaagaatgagatggaacaaatgtgggaaaatgtttatttagatagagatggagcaaaagataaaatgctggtgaggcgcagtggctcacgcctgtaatcctagcactttggaaggtcaaggcaggtggatcacttgaggtcaggagttcgagactagcctggccaacatggtgaaaacctatctctactaaaaatataaaaattagcctggtgtggtggcgcaaacctgtaatcccggctactgaggaggctgaggcaggagaatcaagtgaacctgagaggtggaggttgcaatgagcccagatcacgccactgcactccagcctgtgcgacagtgagactccatctgaaaaaaaaagaaagctaacacagcagtctcagaaaaggtgatacagttctttgtgttattcttggaacttctctgcaagtttgacattatttcaaaataagtgattttaaaagaatatctgtgtatttatatagtggtataagtaacaaacactttcatttttagtggaatatgtagtatttcatatggaagatatttccatttttcaatactctctaggaattctggaacttggaaggaagggggtgagttatatagccctttttagcccctgtaaaaatgttatataaccagaaaatgtcaaaaagaaagagttatctattctctgtccaaattcccaaattctacttttagattagccactgaaataatcgattagctttactaacgtaatggaaacccagtaaatccatagtcattcctcataaaagtagaatctgcattcccctggatcaaaggtagggaccctctgtgcaataattaatttcaaataattttaaaaagggtttgctctataaaaaaatagcattccatttttacccaaagcagtatagtcttctttacagtccctgacttgcgttttatctcaatttgctatttttttctgtacagaaaattttctctaaatcattatatccctagacacacacacacacacacacacacacacacgcacacacagttttactcagcacttttactttacaaaggtgtctgtgatcatttttttcacttctttatctgacaaagatctgacattctccccttctttttttgggaaaattgagggtgaggacttgcaatttacctggtagcaagttattgaacaaccgagactagaatttagtcttttcactctacaacacaaagatctagcctaggttagtacatttgtgggttattcttcctttaaaatacttgataccagccacacttattgagattgtactctgcctctgtaagtctttaggagaagaatttaggcctacccatgtaaatacccatttgcaaagcatctctttgcattgcaaagatatactaatagaatattgaattctttgcaattgtatttttgcttgccggttgtaacagggttttagaaggttgacattcacaaaacaaagacttcttttaccaccagagtaaaaatgctcacattcaaatataactagaaaatgaacaataatttatagagaaatctctgaaagttttgctagtgtaagacaattttgattaaagtataacaatgttgttactagctatcatagatgttaacacatgatattatacattccatctagttgctataatgcatgtaccctcaacactgtggtagttttattttattttttctcacaatgttttcataagctaacatgcatttatttaatttaattttatttattaaatacctgtgtagaacttactatgtgcctggccctattataagtagtttatgaataattaattcatttcatcctcataaaactccctgaggtcattactattaccatcctccagttcacagatgaggtctaaagaagattaagcaacgtgtccaaggaatacaccactggtaaactgtagaactagaattccagcccaagcagttcaactccaaatatgtgttcataaccaatgtgtcatgctgtgccaagcctcagattcacagttgttggataattatttgtggattaaatgaacaaattactctcttgtctcttaggctgatttgaaagcattaagcaaattacccaattgttctgtaccttattttttcactttgtaaaacagaattgataatatttgccatccatttctcttccaaacaacaggaagaatggagagcatttactttacctacctgctgtatgtttttatgtctttaagactggatctgcagtgggtctagagtaggctaacagcttataccttaaacaggcaacaaaaccacaattcagtataattaagttgctttccatctgaatgagtgtgaagtagaggggcaaaagtttgagaacttcaacttccttacacatgagctttattcccatttaactctgaactgttctgtctttttttcagctgaatcagaatttgtttgtgtaaaataatagttaaatgaaatgttatctagggcttagattatatgatctaataaaaatatcaagttatagatcttctaaatgaaaatgctttcctcttacagcactgcatctctaatatttaaaaattatcaggacctagttagggataacactggaagtttctgtgccaagggtccttactccatctctgtctatccactgtctttattttgtccctgcgctttccattaggttctttattggctgtagacatggcatgaaaagaaattcaaaacaagacccactaatgttttgttttgttttttttagaaacaggatcttgctctcttgcccaggctggagtgcagtgatacagacatggctcattgcagcctccaactcctgaagacccactactgatagcagcaagggcagatagctggtccaagcactcttgtgtgcttttgagcaaatcatctgtcctttctcaatcttaatctcctcttctgaaaaatgaggctaataacaaaggctgcactgtctacctccagagctgtcaggagggtcagagaaattagtgaaactgctttgtaaactgtcctctaccattatgaagacgttaatactaaaggtcagtttcgaaaaattttccaaatatagacatttgcttttgcattatatccacatgcaaaattatccatttacattcttggcctggagctccaagtggaatcagttcagaaaagaaacagaatttgacttaatcctcaaaaaaggtggtatttcagatgctcaatgaatgtctggagactaaactcctggtgaatgagaaaaagaatatgacagacctgaagtcagatgaccacaggcctacacagatgtgtctgagatgagaacagtctttgctaaggtctacagaggtcattctcagtgcctttgctaaggtctacagaggtcattctcagtgccttgccttgtagggagatgaccttaggactccatccatgacagctgtaacagtatactgaagaatatattgaagaccagtgaattgcgtgggctctcaggacataaagatgaaatgtaccaaagaccctgtgttgttattaaagagtattgacagttttgcaaggtccaaaaagtggacagagaagaaaatttagttaacaggttaaccaaatactgactgcaaaggaatctagcaaggatccctaacattttctcttctgttcagaaactttggaagccaattcagataccctttcaaaatctgacatgtgtgtggctaaagttgtacaaaacagtgggtaatgagtgttgtcagaagtggcctgtcctatgccctatttaactttgatcacttccatgataacaaaatgcacaccttgccctaaccatctggcacaatccagccctgcttaccagggaaacttggcaagccagagttttcagggtggaaaggaaacctattatctctactagaaaaaaaaaatctcaaagcgcttgacctactgatgtcagcatcacctttacatgccaggaacaaattattacagaagaccatacctagaacacccagctggaagttaatgaatcagggaggaagactaatgacacggcacggtacattcctccgaggcagggaccgcgtctattctccttcgggtgggagtggaagtgctctgcgcacagtgggcacgctgctgataaggctgtctggtcaggtgaggacacaggtctccaaggaaagccctgccttctcctagggtgtggatggggaaagtgggagtaggagttcacctgcagcaccgagtgcatagaagctctgccgctattgaaatcccttttaaggctgaggggcagatctgaaaggggtgagcaagacagtactgtgtatgtgacgagtcctgggtgaggaacgggaccctctccctcattcccaacgccacctctccctggagtatgaggttccacagcccaggcaataaagggaagtagcccacacacctcaacccggggccacagttggaggtggggagatctaagaaacactccacggatgagtttctgaagagggaagtggaccgggaacagcgcatttcctgcttcgcctgtgcaaatcccaggcggggccaagcgggaacggggacacggtctaagagtcgcccgctgccagggaggggttggggggcagcctcgaggggacaccgcggaaccagggagggatgcgcatggagggagtgggagaaggcgtccaagtaaaatgcatgctccggtcatcgggggtaacgcgcgtccccaaatcccctctcgctgtcgccctttttttcagtcctcacggggagaggccggcgcagcagtggagcaccgcaggggctggatcggacccgcactgcagcatctgcagggctccgacctggtgcgggcctccaaggcagggggcgcgcggcggcacagccggtggccgcgattttccgggccactccttccccccttacactcccctcccgcccgcgaccttcgacctccatcctggacccacggggtactggcccggggacaaggaggagacgttaaaggtatcaaggggcgcggcaccgccgcctagacggcgccgggacgcgaggtgcgaatcggcggcgtccggctgcgctgccctacctgggaggtgcgggaccctcggccgcgctccaccgccgcgcgccacctcgtgctggcctccgggaggcagccgcccgcgcacgatttataaatgcaaaggccttattgttgttctttgttcagggataccattgtctagtcatccacgggcagcctggagttttcccagggtttgcggcgcgcactcccctcccccgcccccacagacttgctctccagcgccaacccggatctgcctaggtgcccacgggtccttcccgatcgacttgagtgtccttcctccagcccctgctttcccagcatcgaaaacacaaaagcctgccggaaatcacccagcctttgcctggtcactcaggggcccacggataagcgtggctctgattcctccaggtcagccccacggttcgccacctacccgagttaatttctgcgcccgctgaccaaaggccccaactggcaacgggcacagcttcttggtgcgctagtcgcttccttgcccagcctttagagcctcgggtccggcccaaggacccggggacgtgagcgcaattagtagccaggagccctgcgaccctggaccgtgcagtgctaacgcacccgaacggctatgcgagcggtgtactcggctcttacttgtgaaagttgtttcccccaaccccctgcgtaaatctcttgtgttgagaaaagcaaggcttgcaggaagccactccggatgtttgctgctttacatgtggcatctgtggctggctctgataacgtcccggggcaccacgtattaaagtgaagagactgaaatagaaggctccacacaccgcgcgcgggtcagcgacgtcgccgccctccacactgccccccgaaatataagacaagcgaatgatcagaagaaatgagatctaactaggtcacagtatgtaaaagggactagtcttggaaagccaccacaattcctcccctgtaaatttgtaaactgtgaatttatgatctcagggagggtgttataagaagtagggggaggggcgtcaaaatctgaagctcctactccaacctatgattgtgtactttcacctgatttctcttaccagaccaagatcagtccccaagaacaagggcaaataaaaatagggaaacccggccgggcgcggtggctcacgacggtaatcccagcactttgggagaccaaggcgggcggatcacctgaggtcaggagtttgagaccagcctgaccaatatgatgaaaccccgtctctactaaaaatacaaaaattagctaggcgtggtggcatgcgtctgtaatcccagctactcgggaggctgagacaggagaatcgcttgaatcggggaggcggaggttgcagcgagccgagatcgcgccattgcactccagcctgggcaacaagagggaaactctgtctcaataaatgaataagtaaataaatcaataaaatatggaaaccccacgttttcttccccatcattttctccaccttcttggctcccaagcgcacctctcccaataatgagctgggtgaggaagagcatgaggatgaagaaagtgtacagggctaaatctgtatatgtacattttttggactcacacctggattgtatttcctgtagtgttttttaaggaattagtcaaacagactagacagataaaaatgaattctggaccagatattgttttttaattttcaatgtttattctaggaaaactccttagctcataaaagatttagtgttaagagaaaattctgctttgagagctttgaaaaatatttattattatccagaaaagttagaaaagatctcaaaaaaaaaaaaaaaaaaaacagcaaaaaacaaggtactacggggttaatttgtagattgctctctctcctcctatagttttgttgcttatttaatcatttgcaatgtgcttttgctttatactgaagcccatttttttttcagaaaaaataaagctttaaaagtacatcatcatttaaatttgtctaaaatcaaccgctttcaaaactaccaactagaagtaacacctctctatgatttctttatgcagatttaattttttttcttgtttgaatcttagagacccaggaactagaaacactttcttaacttgtcccctagccaaggcttcacagatacttgcagaattaaagataagttggcttaaaacaattgtgtaagagttcttttgagaaaaagcaatgccagagaaactgaaggccaggagtttgcaaaagttttgtatttttatggatgccactaataagcaagactggacagacggtcttgttgttgtagtatcacactcaaagcagcagcattttacttctcagattccaggtgtaagctctacttttttatcacgccttcataataaagaaaatctgttctggagattcgtatattgatttctttgcaaagttatctctaattatgcaggaatggctgttagttgccctcaaaaaccaacacaaatacacaaacacaacagcctggcttagtgattattaagagctgcaagtctgaaggcggactgctgggtgtgaattccaccttctcaacgctgtagtctccagcaagttccttaacttctctgcctccgtttcctttcctgtaagatagagtctacctcagggttaatatgaggatatgcttctttgctaatgctggagggcgctaggaatagcagtggcaggctgtgtcatttctcagtgttgtataacggcttgttttaaaagtcccactgaaaactttttttttttccagatcgaaacacaagtttaatagtcattcagatttcattccagtctaaagaaacttatagaaatctaattatctgccagaataaccgctttaaactgactgtaagaaccacagttactttgcagctaaaacagattgttctcttcccccaaacaaactcggacatttagacaaatattgctgctgtctttacattttagaaatcagtattaaggctcacctgttactgaacacatacgagaaacagttttgttatgcgtatcttatatacatcatgtatacattttcgtactttcacatgatgtgtataataagatacacataaaaactggttggcttgtcatgagtaaatgctttattctttagagtgaaggaatattggatacagaacgtcgttccatatttaatcttgctttagaaaattaggatttatcttggacacagcattttgaatataacacaggcaagttgagtcctgggggaaaaattgtatttttaaatttattatcaacggtgtctttcgcatttgagaaaacacatttgaagatgcccatgcagttccttggaagtaaactaggtcacccaccactgaaacaccctcggcttctgcaaaaagatgtgctttaaagagaatagaatggacgctcggtatgttcatctaaacgaccttgggcaagtacgtcgattccaaggtacaatcagccctcccagacggcttttcgagtctccctaaccccggtgggagaggacgcggcgccagagcccagctccggctagttttcccgggggcaggtgtagccttgggcgcggggccgggggaggggcaaggggcgggcgtggggttggactgggacgtgggactcggaccacggcctgggcgtgggcctaacgacgcgggaccggcccgccctcgccgctccattggccacatctgtgcagaaaaggccccgcggcccaggggcgcccgcagtgtcactaggccggctgggggccctgggtacgctgtagaccagaccgcgacaggccagaacacgggcggcggcttcgggccgggagacccgcgcagccctcggggcaaatctcagtgcctcactccccaccccctcccccgggtcgggggaggcggcgcgtccggcggagggttgaggggagcggggcaggcctggagcgccatggtgagcaagggcgaggagctgttcaccggggtggtgcccatcctggtcgagctggacggcgacgtaaacggccacaagttcagcgtgtccggcgagggcgagggcgatgccacctacggcaagctgaccctgaagttcatctgcaccaccggcaagctgcccgtgccctggcccaccctcgtgaccaccctgacctacggcgtgcagtgcttcagccgctaccccgaccacatgaagcagcacgacttcttcaagtccgccatgcccgaaggctacgtccaggagcgcaccatcttcttcaaggacgacggcaactacaagacccgcgccgaggtgaagttcgagggcgacaccctggtgaaccgcatcgagctgaagggcatcgacttcaaggaggacggcaacatcctggggcacaagctggagtacaactacaacagccacaacgtctatatcatggccgacaagcagaagaacggcatcaaggtgaacttcaagatccgccacaacatcgaggacggcagcgtgcagctcgccgaccactaccagcagaacacccccatcggcgacggccccgtgctgctgcccgacaaccactacctgagcacccagtccgccctgagcaaagaccccaacgagaagcgcgatcacatggtcctgctggagttcgtgaccgccgccgggatcactctcggcatggacgagctgtacaagtaaagcggccgcgactctagatcataatcagccataccacatttgtagaggttttacttgctttaaaaaacctcccacacctccccctgaacctgaaacataaaatgaatgcaattgttgttgttaacttgtttattgcagcttataatggttacaaataaagcaatagcatcacaaatttcacaaataaagcatttttttcactgcattctagttgtggtttgtccaaactcatcaatgtatcttaaggcgtaaattgtaagcgttaatgggctgcaggaattcgattcaaggatccataacttcgtataatgtatgctatacgaagttatctcgagcgtcaggtggcacttttcggggaaatgtgcgcggaacccctatttgtttatttttctaaatacattcaaatatgtatccgctcatgagacaataaccctgataaatgcttcaataatattgaaaaaggaagagtcctgaggcggaaagaaccagctgtggaatgtgtgtcagttagggtgtggaaagtccccaggctccccagcaggcagaagtatgcaaagcatgcatctcaattagtcagcaaccaggtgtggaaagtccccaggctccccagcaggcagaagtatgcaaagcatgcatctcaattagtcagcaaccatagtcccgcccctaactccgcccatcccgcccctaactccgcccatcccgcccctaactccgcccagttccgcccattctccgccccatggctgactaattttttttatttatgcagaggccgaggccgcctcggcctctgagctattccagaagtagtgaggaggcttttttggaggcctaggcttttgcaaagatcgatcaagagacaggatgaggatcgtttcgcatgattgaacaagatggattgcacgcaggttctccggccgcttgggtggagaggctattcggctatgactgggcacaacagacaatcggctgctctgatgccgccgtgttccggctgtcagcgcaggggcgcccggttctttttgtcaagaccgacctgtccggtgccctgaatgaactgcaagacgaggcagcgcggctatcgtggctggccacgacgggcgttccttgcgcagctgtgctcgacgttgtcactgaagcgggaagggactggctgctattgggcgaagtgccggggcaggatctcctgtcatctcaccttgctcctgccgagaaagtatccatcatggctgatgcaatgcggcggctgcatacgcttgatccggctacctgcccattcgaccaccaagcgaaacatcgcatcgagcgagcacgtactcggatggaagccggtcttgtcgatcaggatgatctggacgaagagcatcaggggctcgcgccagccgaactgttcgccaggctcaaggcgagcatgcccgacggcgaggatctcgtcgtgacccatggcgatgcctgcttgccgaatatcatggtggaaaatggccgcttttctggattcatcgactgtggccggctgggtgtggcggaccgctatcaggacatagcgttggctacccgtgatattgctgaagagcttggcggcgaatgggctgaccgcttcctcgtgctttacggtatcgccgctcccgattcgcagcgcatcgccttctatcgccttcttgacgagttcttctgagcgggactctggggttcgaaatgaccgaccaagcgacgcccaacctgccatcacgagatttcgattccaccgccgccttctatgaaaggttgggcttcggaatcgttttccgggacgccggctggatgatcctccagcgcggggatctcatgctggagttcttcgcccaccctagggggaggctaactgaaacacggaaggagacaataccggaaggaacccgcgctatgacggcaataaaaagacagaataaaacgcacggtgttgggtcgtttgttcataaacgcggggttcggtcccagggctggcactctgtcgataccccaccgagaccccattggggccaatacgcccgcgtttcttccttttccccaccccaccccccaagttcgggtgaaggcccagggctcgcagccaacgtcggggcggcaggccctgccatagcctcaggttactcatatatacttagattgatttaaaacttcatttttaatttaaaaggatctaggtgaagatcctttttgataatctcatgaccaaaatcccttaacgtgagttttcgttccactgagcgtcagaccccgtagaaaagatctcgagataacttcgtataatgtatgctatacgaagttatgatcccaggtccctgatccgccccagcctgcaggccagaagcagtgttacacacttcctggaggagctaaggaaatcctcagactcctgggtttttgttgttgctgttgttgttttttaaaaggtgtgttggcatataatttatggtaatttattttgtctgccacttgaacagtttgggggggtgaggtttcatttaaaatttgttcagagatttgtttcccatagttggattgtcaaaaccctatttccaagttcaagttaactagctttgaatgtgtcccaaaacagcttcctccatttcctgaaagtttattgatcaaagaaatgttgtcctgggtgtgttttttcaatcttctaaaaaataaaatctggaatcctgcttttttgctctactagtacctctgtcacactagtcttatcaaaaaccagttcttaagatcaatgttaagtttattagttaatgtaaatttctcatcctcgaaaagggtgaacataaatgcctttaaggagtatatctaaaaataaacattaggatatctaagtttgatgtaattgtttcaggaaggaaaaaagaaaagcattctggaatgagcctacttcaagtaatcttagtttctaaaactaacagttaatattttcaattccagtatatcactttaagtagaaggggatgtccaagtaattttggttttctaactgttgaatcataagcttgacctgcccccagaggctttttggatgtttttatctgtgttttgccatctctttacactcctcgacattcagtttaccttaatcttcacatttttacaccttgggaagtggcaagcatcgctgggtttaagataaaggagtcacaaaaactaatcaaaataaaatttgcattatgacaacttttaatacactttagcattttatttgattggttttttttttttttgcttttagatttaatacatatacggacgattgcacagacttaggggagaatccatgaatggtttgtgtgtagtgtccctatctatcaccattactttatcaagaagaaacagttacagggttgtgagtaaaagatggggatcagcccctgtaatctgccatactaatcgctgtggcacgtctcaccacatttgagattgagacataaatggaaacaggtgacttataatgggcatttcctgtgccagatgtttgttcaatgccattctaaacagtgtgagcctcaacaaacctgcaggtttaggtgctatttttcctattttgtaagaaaaggaggcaccaggccttcccctgccatgtatatgaaggcttgtattacaagttcttttgacatatttctcacctgttttcctctgggccagtatgtattcatgggcactgggagaatttacattctgttgatgagaaaccatataattatccttagcagcaagtgctatagaaaaaggaaaggcttggaggatagcttccagcatttacatgggagagatgtctgagctgaaatgattggctggattctcttgaaaaagggcatggaatatgttttttagaagggattcctggaatgtgaaggatagacagttttagtgaggaaaggtaagtttattctgtcaggcataacaggctgcctttaaaaaggttaaattctttctcttagctcagatgggttgtttctgcttccagcctgagctccttctgcagggtgtcccaagagttcccagtagataaagtggacagaagggctaccagcccaagttcagggctgtgctcagattacacttggcattttcatcatagtcagcccaagaagactcagttttacccttggctgccatctcttaacgatattaagataagtacagaaaagaaaaagaaaaagagttcttaggggaaagatctaaagtcctgtaaattacatctttaactactcactaggcgcaggtggaaaagcagtaagagctaaaattgttaagttaatgttcatgcatttacatggatggagggattggtgttcacaaataattttttttgggtaagaagcatcaagccaattccttctctttcctcaagcacacagatcaagtgactgcaggtagcagctagtgattttttttaattcctaattttagtttttatgggtacatagtaggggtatatatttatggggtacatgagatgttttgatacagatatgcaatgtgtaataatcacattatgtaaaatggggtatttattccctgcagcatttatcctttgtgttacaatccaatgatactcttagttattttaaaatgtacaattaaattaatattggctatagtcactctgttgtgctatcaaatactaggtcttattccttctatgtttttttttttttggtagttttaaattaccaaaacatttggtatccttaaaccctttctcattttaaagtacagggatgtgggccctggtggcaaaattagaaatagagctttggggtccattacagaccattatagttttaaagtgaacgacagaatgtaaaacttctgcctaggtcgaacgactctatgtcatcaccaagtgaacagacctccccccaccaccaggtatgacatcgccaaatgcataaatcccctctgtgacattaccaagtgcctggatacccccatgacatcaccaaatacgcagacctctgtttcctcaagtagattcagatgaagtgaccacaggtaccagctagtgaatttttgagacaaaatattaaatctgtctcaagtttttactgttttattttggagacaaatacacataaaggatacattgcttttctacccatgtctaatttggtactttagaattacattaggaggtaagaatccagctcttttatgagctaagatagccagacttgatgccagtacagaatgtgcatgcctttgagacatccggagcaataaggaagaggttattttttcccccatgagaatactgactacatctctattaaagctaccaggtgggtctgataaattacagataaacttgtaaatgacttacacaagcagctaagagataatattgcaatgaaacaatttacttattattcttatcagtagattattgcctctttagtttgaatcacgctgcagaagatatcagcttgaatttgtactgatattaggaaaagcacatacaagccaaaggaattcagataaaatggaaagggtgcaatgaaccaaaagacatcatctcagcctaacattttaaaatgtcccatttcattttgtttttaatactgtgcctgtcacataataaatgttcaacattcccttcctcctcctgttcctctttgatttgttttgacaatagtggacagggagaagtattttacatccattatttcagcacaaatttatttttcctgcttacaaggtgcttccttctgggtctacaatattcatctgaagaaaaatggcactgatgttcctacccagtccccatctggagtaggctcaagttcctccacagggtgggctcctaatggagagagtatttctttaggtcctctggcctgggatccagcagcatctcagtttttcaccataacacctatccctaccctccttctaatgagaaggtggctgtgtgctttctctggaattaccaagcagctttatgggaataattcagtttgcaccatcctccatatacaaacactgaaccctcaccactgatatttttcccaggttggttcaagacactggaaactacaatgtcttagtgcagcacttagtacacgcaagtgctaagtaagttgttgtgataatcatgatgttctttaatgtaaaaatttctctgtagctaagattcaagaaaccatttggctaaatattttaaaaatctcttcttgctgaagaaattttagctttgacaatctttttttccacttgaatcgaagtcttaaaccttttgccaaagttgacttcctaacaagtattccccaaattgatgttgctccaaaagatgatcttgtgaggatactctctgtgtgcaggttcagataacaaaaaaaataaacatcagtagctgtgctgtggatcccagttctgtaagtcagtgccttcccataagcctgataacttgttaggcaagaaaaagaactgtggtgcgtgtgaagttaaacccagcagttttctgctcttggttaaggactgtctcattttcagtattacctgacgttaccggttgctcagaaaactgactgaataacttgctggaagcaacttgctgggaagccccaaggaaactcaagagttcctgctttgcctctcttttctattagaggcagtcacctggtgactattattcctttctcttgaataatgtgtttgaacacaaaaatttaaccccagactgtaaactactggagcaaggattagagaatagctctatgaataaagctagcagtgtctgtcctccgtaagaagaaaaatctctgcagtttgaatcagaggttcacctggcttggaaacttagctctgtgagtttggagacatcaccgaccatttctgcactccagccagcttatctgtaaaaagcaggggtgacggtaaaacattttgccaaagttgactctggataacggcgaaagcttcactgaactgttgtagggattagatgagattacgctgaagggagtgcttcagtgccacagaaagtgatctctctccctctctccggcttcctatcttttgattttatgtatctctctctatctcagctgacttggggaatttaatttcattcttccattgggaaagaaaaaacaacaggaactcgccttccccgggtgctttccttagtggaatgagaattttacagccctataagatggtctgtgtttgctggagacacagcatctgtgttttactttgtgctttggacagcttagtctctttgattataaaatgagaaaaaaataattgtcagttggagaactttgtatagaatgtcttaatacacaagaactcccatcctgcatgaaaatcttaagatctttataaaagggacagttaattgggacatactgaatgcgatatcaagtttgccaacatttatctttctgttagcccctcctcccaccagtatggtttctgaagtcctgaatcgatttccataccgtttactttttgagaactgaacagggtctgaattcttgaggaggaataagcagagtgtaatggggaaaaaggcaaattaagaaaagattctggcttccagtagttccaggtaatactgaaacgcgatccgcaggcttttaaatccctcagtcctcagaagttatttctgtgaactgatggatatggacggactgatagaagaaaattagtagacaccagcaaaatggaaggagcaattttatagctgccccctatatagtggatttttctgctttttaaaataaatatttgtttggacgtttgaatacaatagtaaggatcagaggtgcacacatgcgcaccaagaatattgacctgaaaaagcttactgagataacaggaaggaaaaatagaaaataaaaatttaggtttgtagtttcaataacgagactgtggatatagaaaacattattgttttattcatttaaaaataattttaaaaatgtaaatgatgcacacgcttacaacaactcaaacaacattgcagacgggcttgtaatataaacagagttgtcagaagtttccatctctccccagccccagtgccacaggtcagaatcaattccttttttcttccccctactgggcattacctacattaataattctgcttgtctagtggttaattaattaatgtacctgcatggctaattttaggcttatgagttttagacatttactttctgctacgacagctaagaatttcctgcccgctcttcctcggaatatagttacatccttatttccacttctgttaattgtcttttaaagtccaggactacatacccttttctagttccatcgcgaaggcgggaagtctcgattcctcactgggaaaggtgaggacatggatgcctccacccttccctgaagcactcctctcctcttctgcggaggtggatttttaaaaacagattggggttggggtgggggagggacagcacgcagaatattgatgcaaacgtcatatgaaaaaaaatacatataatatatatgtatgtatacctgcaaagtgctgttacatatacgtgtgtatattaacagcattatgaatcccagacaattggggccgcttaccgccgtggctgtgactttaaattcactcacttcttacatccactaggaaaagaggatttgtttccctaaagcctataaaaggggaaaggcttaggcgcagtggcagccccgttccccgcaccctcctgccctcgggtcccgggcgggctgcgggagttcctcctgcgcgggcgtctgaggcgctagaggtcaccggagcgcgctcccctcgccagggacctacactcttcccgctgctacattaggccgcattaacaaggatctggattcactttaatttaaaaggtaaaagatcttaggtctgatgggggagtgcggcgaggagagctcggaccgcgacgtcgcgcgcccgcttcgaggagttttgagctcttagcttggtgccggggcccgcccggcgctagatgaagtgctcgtttactcggcctaagccacggtgactcgaaggtgagaatgcaacttcgcggtgcaccggctcaggggcctgcctgccgcgccaaggcttcggaagttctcagcgggaccgctgggacaggctttcctctgagggaagaggaggggatttgtgcctctgcacgttctttcctgtggaggggaaaatcaaaccctgtagccgtccgctgccgggtagggatcgggcgatgctcggcgcccgagttctccgccgttgaggtggagcccggcggcgggagcttagattctctgtgggccacatggtctcagaagaggccccgcggcccgggggcgcccgcagtgtcgctggaccggcggcagcgctggccacgccgtgggctgggactggcccggaacgcgggtggcggttcggcctcggagacccgcgcagccgtcggagcatctccgtgcctcgctcaccaccttcttttcctccgcgtccggcggagggtttcggcgcgcggggcaggcctggagcgccgtgagcaggccggatgcgggatacgccagtgactaccagagccagacccggagcgcgctgccggcggtgacggctaggctgggcccctgtccttgggccgagttgccgagctccctcggggacttgaaggtgaagggcgaggcgccggccggggccgcgggccgagccaagggcgagtctcgcatccggcgccttccaggtggggcgaaggtcgagcgccagaggctggcgagggacccccgcccagcttgacgcccagctgcgcccgacgccgggggaggcggagcgcggggaacccgggcgccgggaaccccggacgtgggagggctgggcttctgcgcggggagacgccgggcttggcgaacatcctcaagaaccggtcggtggctctacctccgaaaactctttcgtgtttagcgattctcatatttagtgtttccctttagggagacttgaccggcaattgcagactcgtcttgggagctggagatgacattaaataaaaagttcaaaaccaaattgttaattatctccaggtataaacgataacacaaaattttgcagtcttgggagaaaggttttaatgtgccgcctaattaggccaggttctgcaaaaacgaaacagctctattccaagttaaaaagtatgcccctattccaagttaaaagaaaaaaaagttgtattccttgttcatttattgagtaaggaattgagagatgggtgctgagttattacagattctaactgctcgccacacatggagctagaaatacatttaacagcctttcaggaaaacgcctaaagctttagaatttcaagctagccaggttgcaatctagagctctagtttgttgctgaagtttgggagaggatggcctctacctgtgcacacatcgagttaattttccagagtcttttgaagttaatagggagcggcttttctgtttgtttattttttgacagggtatccttctgtcgcccaagctggagtgcagtggtgcatcgcagctcactgcaacctggacctcctgggcccaagcgatcctcctgcctctgtctcccaaagtgctgggattataggcatgtgccaccgcgcctggcctgttttttgcttttaagagaaggaataacatggccagagtttgtttgtttattttttgagatgacgtctagctctgtcgcccaggctggagtgcagtggcgcgatctcggctcattgcaacctctgcctcccgggttcaagcgattctcctgtcccagcctcccaagcagctgggattactggcgcgtgccaccactcctggctaattgtcttattttttagtagagacgtggtttcgctatgttggccagtctggtcttgaactcctgacttcaagtgatccacccgccttggcctcccaaagtgttggaattacaggcgttacccaccgcgccccgcctgttttttgcttttaagagaaggaataaaatggcccgagtttattttaatcaaaccagtgtaaaaccctttctattctgcattatagctttatttaaaacttatttcatagaaatgtaagcagcatatgaaaacagtttccctgctccagtcccaacttcagatattcagatatgtgtcctgtgttcccttgaacacattttctcttttcttttctttctttcctttatttcttttctttttctttctttctttctttctttttctttctttcttttttctctttctttctctctctttctttctttctttctctttctttctttctttcctctctttctcgctttctttttttctttttttgagatggagtctggctctgtcaccacgctggagtgcagtggtgcgatctccgctcactgcaacctccgtctcctgggttcaagcagttctacctcagcctcccgagtagctcggattacaggcgtccgccaccaggcccagctattttttgcatttttagtagagacgggatttcactacgttggccacgatggtctggaactcctgacctcaggcgatctgcccaactcggcctcccaaaattctgggattacaggcgtgagccaccgcgcccagccgcacacattttctatttacagtcatacagaggagtttctccccccaagcccccattgggatcgcattttcctactattctgaaacttgctttttcagtttagagtacacatttggcggtcttgtattcctagaagatggacttcgatttaccggttgatggtcttctccactcttccgtggggtcagccccacttgtcccgtctccagtccaatgtcagtttgtgacttaatcttttacatcgtgtacagtctgagccctcagaccccctcacacatgcacaaattgagtttatgcacagaacagatagtacctgtacttaaatgtagactcactggggagcacgtttcactccataagaaaaggggtaaaaattgtgcacaccataattgcaatattttacaagaccggtgctttctttatctcaggggtgctggcagagagaggtgcatagaaaactctgggtgggttatttcctcctggagcattgcccctccgttgcctgcttacctgggcaagtgctggtctgcgtggatggcttattggcacttccgggaccctcatgtcgtaaggctgagacctaagaagctgattctgtccaggaggtgagatctgccccgataatcgtaggctgatggggtcgctgctctggcgtcatagttaatgttaacttccactcacactgtgttcgtctgggtgataaaagtgtgtggggcgcctctttgcaggcttcctgtcctcttgggagatgtctgcgctttgtgagtttgggaaacaactgggtacccagcgaggtgggcgcaggaggaggagctgccttcctccgggaggcggcgcagcgcggggatcttgcgggaccaggccagagaccaggaccgtcccccaaccgttcgcggccgcgtagccctgggcggcctgggcctgcccttccccgcgcagggctttccctcctgccggtcgctgccccgcacatggctctggtcgtactcccgctccactgccaccactgcccacgccctgcgtccccgtttgaccgcgtggagccggaccccgccttcctcgccccgcgctgccccaggcctgccccgcaccagcagctaagcgcaggtctctactgcaagcccgcagccccctcatcgctgggcctactggcgacccccggcgccatgcgcgtgaactgtgggcgacgggctcgcccttggcgggcggcgcgcgcggtttccagatgcagccgccgcgccggggcagctgacgccgcctccaaagacgcgccctgctggacggcgctgaccccacgcagccagcggagtctcctgggaacagcccaggcgccggtgccgacttcaacctctctgctcaggcctcttgagttgcgttaccagcttaccatgtattactaagactgacagaatataggaaatattcctgtctttctcagaaggaactttccagtaaagacagcgtttaatactgttaacgtctcaaaggaggcagtgaaaaatgtgctcagcttaagcatatgcaaagtcagtctatttccattttctacttatgcacattatattttgcattaaagtttgatcattttaaaagtggaaaattaatgggcagtggcagaaacagcttttttcccccaaaagtaatcttcttccaactagttttaaacattttactaacaattattgagtatcttctacattttaagtcattattttaaagttcttggttattgacatgttgtaaatttgaaaaataaagtttttcttaaaaaattgtgtgtgtatgtagattttatattctgcaaaattaaatgaagtgtgtgtgtgtgttattcagggccccgcaggaaacagctaacatacttaaagagtgcccgaagaaagatcatgagtggtctatacatgtgaatccatctcgggactggaagcatccagggccccaggcgctcaaagctgcactcatcaggcctgactgggatgatggcaaagcagtccctggagcccacgatgactgtggctttaggagttctgccagccaggagctctgaccttgaagctaatgctgattgtggcccagaaagatgggactaggaaataaatcccggagaaaatcctgttgcccacctggtttgctggccaaacctgacccccaaaccagaggacaggaggccagtggacgcaggaacccggagagctgggggagagggcatatgctgggggacatccaggtggaaagggccaggctttcctttaagcagctccatgggaggccgtttagcagagcaccgtcatattatgggtgcggagcgtcagggatgggaggagggaatcttagctgctgttcttctcattctcaagaactttatggcccaggtggggacccaaccaaaaatgagtaacaatacaacattgccgggtggaacgttccttccctactttctctggttgacattacttcttagaaaggttgggtgacaccctcttaggagcttgtgttttgtcccttaaatgttagaggtttgaaatactagtttctgaggaggcttttcaaaggttggggatacattagtacctgcagaatgagctaataaaatggattaatacatgccattctccatgataaatgtagagtacgtatcttgctatttttcatactacttacttaagactttgaatgagcttggctattttccgaccaaaaattagctatggttttcaaaagagctttgtaatgtttgagtgcttttccctggaatcagggatgtggatgtagggtgaatgatttctgtagaggatttctaaaatcggtttttcaggaagcatctttgtgatcaaaggtgcaattcaactccctggattcatgttaaataaattttgaaatgaaataccataggccggatgcaatggctcatgcctgtaatcccagcactttgggaggccagtctgaccaacatggaaaaactccgtctctactaaaaacacaaagtcagctgggcgtggtggcgcatgcctgtaatcccagctacttgggaggctgaggcaagagaatcgcttgaatctgggaggcggaggttgcggtgagccgagatagcgccattgtactccagcctgggcaacaagattgaaattccatctcaaaaaaagagaaatactgtaatacccacatgaccagcactgtattgctgtttaagaactggtgaccagcactgtattgcactttaagaattggggacagagctccctgtttggcctctcagatgggatgcgaccatggcagttgttgctgtctccccagaagaactttggtttttctttggagaacttgccctttcagcatcgtcagtcatgaggtctgggtggaggtcactcgggtgagcccggcatgtctcaagcttgttggcattacccatccccctacccccccagttatccagttaaaggacagacgtgactcagaaggcgggtggatcgcctgaggtcaggagttcgagaccagcctgaccaacatggagaaacctcgtctctactaaaaatacaaaaattagctgggtatggtggtgggtgcctgtaatcccagctacttgggaggctgaggcaggagaatcgcttgaacccaagaggtggaggttgcggtgagctgagattgtgccattgcactccagcctgaggaacagagcgagactccatcacaaaataaataaataaataaatgaacaaacaagagagtgactggaagcagccctccttggacacagtgggggtgacggtccataaccaatgcagccattttcatgagagttgggccaggaggttaccggtggagaacggacacaaagccaagcaaggacacagagaacctggatcccaggtgacaatatcaaggctcccagggagtgagctgtacctctgactacttcagttatgtgagcaaattcagtttatttactatgagttcattttcttttcacttgaaacaaagggattcataacagataaccagggtacagggcaggctggagcagtgattgctaattccactggctggcacaaggaaataccaaatatggagtctctttggaccgccggcatttgcattgcctgagatcatccagaaatgccgaatctcagaccatcgctgcacttcttctttagattggtccagaacagtacttctcaaatgaatgtgcatgcagatctccttgggatcttgctaaaaatgaagttccaagattctgcacttctagcaagttcccaagctaggctgatggatcatactcagagagcaaagccctggtctacacttacttcatagggaccattcttttttttttttttttttttcccccgagacggagtttcgctcttgctacccaggctggagtgcaatggtgcggtctcggctcaccacaacctccacctcccaggttcacgctattctcctgcctcagcctcctgagtagctgggattacaggtgcacgctgccaccacgcctagctaattttgtatttttagtagagatgaggtttctccatgttggtcaggctagtgttgaactcccaacctcaggtgatccgcccgcctcggcctcccaaagtgctgggactacaggcgtgagccaccgcgcccggccttagggaccattcttaacctaaaacacttgaagttcaggaacggacactgaagattcatttcagaaaagtcactagatgagaatcttgggtcatttctcctctgctccttacctcggcacagcctgtcctcctgactcaccaggatcctctttcttttctccaaagtcttatcaatgatctagttagatcgagactgacatgagctgacaacacatacaccctgttggcaggcggcaagcagcccccgcttcctcatgcatttccactggcctcactgccaaattcattattgctcatcatttcaagaatctgtctctggtttgcttgtctctcttactagattagagtcaggctcttgctgtaacacaacatactgaattagatactgagtttctaccttctataaacaaatgattctcaaagcaggttgcacactgcaatcagtggaagctttaaaaaaagactgaggcttggtctggccccttgagattctgacttaattggttttgcctgcagtcagggtgtttcagttttaaaatctctcgaagtgctgctaattgctgccataagtagatgaacatattgatatcacagagctacctgagaagtcagttacttatttaggtatttatttcatcaaatatttattgaacatctattatatgccagacactatacgttgtcttcaaagataagacacatacattccctgtcctaaaggagcctgtcatcctgtagaagggaaaggtgtatagacaaataattgtaatggtgtgttcaatgcaatgaaaagtataaaaactatcctttggcaaaaggcagagtggtggattccatgtaaaggggcatgggataaaggtaactatggctgacagtaactgagcattactatggaagaggaaggcctccagagagtgctgatgtgtgtgtgaggccttgaaggaggagagaacccaatgaagaaggtgagtgggagatgggatggggaaggtttttctgggttgaggttgggggatttggggatgagatggtggaggagctgagggggctcccttctgttttctttgtaaaatcagagtggggtgaaaacctgagagggcacagtgctgggtgttgggaggggcaggggcattggcaggggtgggcctgagaaaagcagtgagctctgttctgcaacattgaaggccctgataaaggtgagttcatagatcagcatccctcttcaggctcttgtgagcagaagctcccatgtaaacagagatgagactataggattcatccgaagctgtgctttcagcagcaggggtgaaggcagacaagagggccagagagtgttggtgagactggggttcgagagttccaatttccatatggaggaagtgagatctgaagagagcttgggaaaaagggagggagaagctgggatgacaggagaaagtatcagaggggaatttcagagacaagtaggtcagggtgaccaaaatgtgcaggatggactgctgagggggtgactgtcactggagttgtggagctctgggacgtggatgctgaaaccccccatggtggggaggggaagactgtgatcctctctgtacatggttcatgagatgcccaccagtgggtccacccagaggggaaggcaagtctagtgggagtggatttgaagaaatcattcaggagggggaggtaaaagagaacatagggacatggcactgaaatgcaaaacagagcaatggagaaacaggaaaatactgaggaaaaaggacagaggttcctagtgataaaaggaagccttgcacatccctctgaaagctggattttttttttttttttttttttagtttaggggtaaaagacctagagttctgaaactttgctagaggcaacagtggaactgttgctaccagctcaaggccaacctagacagcatctcttatcaactctgtaattgatagcaggctttacagataagtgatttcaacaatgcactcctgctgagaacttccagttagaattaattgatcttgatcactgggtgctaaacttcaaaaatcattattaaaaaatattctgcccaacagctccatattgacaccttgaggcaaagccccattcatctggcatcaattacagttctgctcagcctggagggatgcctgacttcccacacttgacattcctctcccctcccccagaccctagaaccttcccttatcctattactgagcattagggccaggttctctatctgacagcacaaggacaacacccaatgtcaagaggagcactatctgacccaagatataatggaacttcagaaggtggctggctttcccagaatttcccactagaggagggggatgcacctggggtgctggaaacatgcgtgcaggggtcctcctggagcctcctcctccagagaagtccagtgatctccaaaaacagggcacacagaccctgcaagatgcgccccctacttagagagagacagagccgcccgaagaccttcgaggacagaacccgagttcaccagtcaatgaacgccgggagcatcctcagaccctctgcagccaatgctggtgtgaaggtggagtcagttctttcttggaagtttattaccagcggcggctgcgacgtccatgtttgcaaaggaagggaggccttcctcttcccaagtggatcctacatcccgctccactcactccactcaggagaatcaaaaaagaggaagatagggctttctgccttccttttcccagcttttctttctgggctgtctcactcgggcttttgctgaaccatacaccccagaaccatccaagagcacaatggctctgtgctgtgggggagtctccaggtgcggttatatatagtgtgggccagcacacccactcccgttactcatgcagtttggccctggttgaatgcatgaacaatctcttccaggcactccctgttttcacttcccgctgcccacagggcccctcctctgtctgacccttgggggtcaacatcctttctagctaatccaccccacttcctccctcaggccgggctggaggctgttttttaacttcaggggttcctggagaagagcttcctctgccccttcacgatcacatcaaacacactggattcagggtcttgagatttgaagatttgaaagcagaaagatcagtgtgagtccaaactgtgggaaggaacatgatgaaagaggctggacttgaaatatccaccagcgaaggtgggcaaagggccgcctcaaacagggagaaatgggagcacctcgcattctgggttctctggacagcagcctgagcagctggagcaggggcgcaggggtgtctgaggggctctggcgagagttcgtgcaagcagcatactcaggcagggtgggcgctgcacaggtgatggagctggacacctcattttgagagccccctagctgggtctgtgacctggggccagccccaaccactcggaaggtctgtttcctccctgtaaaatgcaggtaattatattaaataactaactgcagagtcactgtaaggattggaaatatttgcacagtgcctgcctgaatgatggtattgggaggagacctgtgtacctgagttcctctgacctgatatttccacgggagctggggggcagctgatgaggaagaagcttctgccccaccagcgcaattctgtaccgagcaatgcagcctgagcctccgagtgaccaccctcctgagcagtcataattcactgggatagaaacatgaaacagttttttctcgaagtatggctttaaccatgctctcttaaatctccctgtcttgctctttaatgatcccttgggaagattttattactttttacttttatttgttaaaatctaactgtatttatttgaaaactaagaatgcaaaaagtcaattcgctgtaaaacctcaaacatagtttaaatcttatcccttttattcccttccctaaaggtttaaactgggaccctatctaccagccatggaagaggagggacaccctgccttacagatatcccttctcccctccctctctaaggcaggcttctgctgtgtgcgtgttagactggggtgtggaggaaggagagggaaagggacaagggtcattttacttacctggtagccgctgctgtgcttatctctggtgcttctctgcaggtcatttactggactaagatcccttatgtggcagggtccaactcatgggccacatgggatgctttagaaggtgctgggggccaccatactgccttcttcctgggagatgggctgcggctggccacttccacttccacctgcccatcctgggcggcaagcccacagctctgtgctcaggcgccctcacctggaaggcagttttctctgtggtgcactggcaagatgactagggcctgatcactttgcatggtgcccactctacaccaggaaaatccatgcactctggaaggtagtgagatggcccctactgcccctctcccagccctgccgcttcccctcaaattcttttttctttcaaatttgattcttagacatcaaatcagaaaccaaagttcaactctcctttattgcatttcctgaaacatctgtcttcctttttttttttttttttgagatggagtcttgctctgttgcccaggctggagtgcagtggcacaatctcggctcactgttaactttgcctcccaggttcaagtgattctcctgccttagcctcctgagtagctgggactacaggagcgcactaccacacccagctaatttttgtatttgtagtagagacaggcttcactgtcttggccaggctggtctctaactcctgagctcaagtgatccaaccacctttgcctcccaaggtgctgggattatagatgtaagccaccatgcccagcctgtcttccttttcagaaattatttaacctacaattatttattatgtaatttataagacattcaaggactaggtgtggtggctcacacctgtaatcccaacactttgggaagccaagatgggagaatcacctgaggtcaggagttcgagaccagcttggccaacatagtgaaacccctgtctccactaaagatatgaaaattagtctgtaatcccagctatttgagatgctgaggctggagaatcgcttgaacctaggaggcagaggttgcagtgagcagagatcgtgccactgcactccagcctgggcaacacagcaagactccgtctcaaaaaaaagacattcaaaattacacagtgtaatagcataccacccatcgtaagaaacaaacatcttctacagttggtcctttgtattcctttgtataatactacatccgaactgtgtttgtagtgattctttatttgcatgtgaaagaaacccaactctgactggactgataaaaagaaaggaagtattgattatgtaattaagccacagaaagggcaggtagacttttttcttcttttcaatttttttttgttttgttttgaacctttaatgataatatatatgcatactgttgggctatagaacaccatgtttggtttgtctttgggtcaagggttggggatgcgcatggcagcactagtgaacagggtctacatcaacaaagatacacgtggtcataaagcaagaaactggtgcgtggcgtggtcaactttcatttcctcatcactcagtagcatgttggggtccccacggctgatgtgggacagatgtccagactctgcgcattgcaaggtgtcctctaacacatccagctcgagcagcatgtggtgcatctcccttggaaatttctcataatgctcatacccctgaatcagccctttggaaacctcgagcaggtccagagtcttggctgcttccaggagtgctgcccactccaccatgggtagcatacacaagtgttgaactttgtagggttgatgtggacctcagtgtagtggggaggtggaaggggaagccacagggccccatcccctgcacatgtgagctcagctgattgtggggtgagcagtttcaagtcatcccattagctcttgccaggccagaagtggaacggtcctcttttctcttctgagcttctgttggcctgttggtttcattcctttcggctgtggatctccaatatactggatctattgggacagctctttccagcctcattgctagatagggcgtgtgccctccaccagctccagacagaaaaatgcaggggaagtcatatgcctatcgttgaatcaattattgtgtgtagggggactgggtattgggttaggctgagcctggttttttagagttaggtattttatttttagaaaaattgagagagaatgcttggtactacttagtatccactgtatagatccactcaattctttaaaatgctgcattgtattctgcttcagggctgtgctgttatttggccaatctctattaatggatattaaaggtgtctccatatggaatcaatctaggttcccatcaatgatgggttggatgaagaaaatgtggaacatgcacaccatagaatactatgcagccataaaaaagaacaaaatcatgtcctttatagcaacatggatgcagctggaggccattgtcctaagcagattaacacagaaacagaaagccaaatgtcacatgtccttacttataagtggaagctaaactttgggtatacatgggcataaagatgggaacaatagaccctggggactccaaaatggagaagggaggggagcaagggctgaaaagcttcctaatgggtactgtgttcactattcaggcgatgggttcaacagaagcccaaaccccagcgtcacacaatataccctcgtaacaaacctgcatgtgtaccctctgaatctaaaataaaaaaaaaatttaaataagaacttaaatggactggatgtggtggctcaccctgtaatcccggcactttgggaggctgaggcaggaggatcacttgaagccaggagtttgagaccagcctggccaacatggtgaaaccccatttctactaaaaatgcaaaaattaaccaggcttggtggcacatgcctgtcattccagctactcaggaagctgaagcaggagcatcacttgaacccgggaggcggaggttgcagtcagcagagatcaccccactgggtgacggagcaagactctgtatccaaaaaaggaaaaaagaaaagaaaataaattgtctctatttttttcctgatatgaacaatgctttccataacattcttttatttttgtaagcatgcgtccatattttttataagacaaatttccagaggtggaattgctgcctaatggtatgcgggtggatcacgaggtcaggagatcgagaccatcatggttaacatggtgaaacctcgtccctactaaaaatccaaaaaaaaaaaaaaaaaaaaaaaaagggaaagaaaattagccaagcgtggtggcgggcgcctatagtcccagctacttgggagcctgaggcagaagaatggcgtggacccgggaggcggagcttgcagtgagccgagattgcgccactgcactccagcctgggcgacagagcgagactgtcttaaaaaagaaataaaattgatattgccagattactttctagttgcactctaccagtagttcacaacagtgttggcttttccatactcccaccaacatcaacgtactggttaatttgtgctgtgtaacaagcttctgaaaacttagtggtttgaaaccaacaaccacttatttgcccaccattccattgatcagcaatttaggcagggcccagatgggatggctcacctatgttgaccatagtgccccagttttacagtcagctggaggtcagtgacctcgctcacatgtctggcagttggctggctgttaggtggagtgatggagacaactaggtcatttgtatttgtcagtcagcatgttgttggtggccaatggattcccaagaactggaagttgcaagttccattgcatcagtacttttcaagcctgcatttgggtaacatttgctaataaccctttggccaaagcaagccacttggtcaagctgggatccataagatggaaaataagctatacctcttcatgggacaaactgctaaatattgtgatcatttttgtaatctatcatagccaggttatatcattttgttaatcttggtcaatatgactggtaaaaaatgaaataatcttttcttaaattttactattatgattgatcattttttcccaatttgtgtccatcatttaaatttgttatataacttgagtgtctgtatttttgtttggggttttgttttgttttccactaaattgaaacaccatttttgacatatattaactttctcatatgtacttggatttgatttcttctgcatcctctatattttttctgtaccttatttgttaattcctgaaaatattttcaatatttctttttttttttttttttttttcagagaacagggtcttgttaagttggccaggctggccttgagctcctgggctcaagcaatcctcttgcctcagccttatgggtagctgggatcacaggtgctgccaccatgcctggctcctatttactattcttattttaaaatttctttttctggccaggcatggtggctcatgcctgtaatcccagcactttgggaggccaaggtgggtggatcacctgaggtcaggggtttcagaccagcctggccaacgtggtgaaatcctgtctctaccaaaaatacaaaaattaactgggcgtagtggcagacacctggtcacagctacttgggaggctgaggcaggagagttgcttgaacctgggaggtggaggttgcagtgagctgagattgcaccactgcactccagcctgggagacagagcaagactctgtacccctctccctaaatttatttttctattaattaacttttattattctatttaaagttaaaatcatacttatccagtttgaaaagaattggaatttaaattggaatgatagtacatttgtagcttactttaggtaaaatatatatttttacgattcattcccatctcatatttcctagcctggtctagagattcaatgcaatccctattagaatgccaattgctttttcttgcagaaaagacagtttgatcctaaaattcatatagaaatacaagggtcctcaaatagccaacacaatcttgaaaaaaaaagttggaggatttctatttcctgagttcaaaacttaatacaaagccaccgtctgatacttacaactcaacaataaaaggacaaataactcagtttaaaaatgggcaaagattttgaatagactattttttatactgtctttgtctggtttttggatcagggtaatattagtttcataaaatgaattgggaagtcttttctattttttggaggagattgtgtagaattggtgttacttccttttggattgtttgagagaattttcctgtgaagccatctgtgcctggagatttcctttttgggaggtttttaaattatagattcaatttcttcaacagtcataagattattcaaataatctcttttatattgaatggtattttgtgattttcaagtaagtggtctatttgttctaagttagtaaatttatgattatagaattgttcatagtattcacttactatcctgttgatatctgcagtgtctgcagtgatattctgtttcattcctgatatagtaattggtatcttctctctttctttgtcagtcttgctagaagtttgtaacttttatagagtttttcaaggacccagtttttgcttcattggttttctctattatttttctggtttcaattttattgatttcttgtttttccctgcccccaccacctttccttccttccttccttccttccttccttccttccttccttccttccttccttccttccttccttccttttttccttcctttttcttgctctgtcacccaggctggagtgcagtggcacaatcatggctcattgcaaccttgatctcctgggctcaagggattctcccacctcagcctcccaagtagctaggactacaggcaaatacctaaaaaaaaaaatcattctaccataaagactcacgcacacaaatgttcattatgcactattcacaatagcaaatacctggaatcaacttaaatgcccatcagtgacagattggataaagaaaacttggtacatatacaacagggaatgctatgcagccataaaaaagaatgagatcatgtgtttttgtaggaacatgaatggagctggaggctattatcctcagcaaactaatgtggggacagaaaacaaaatactgcatattctcacttaaaagctaaataatgagaattcacgaacacaaagaaagaaacaacagacactgaggtttccttcagggtggagggtgaaaggtgggagaggagcagaaaagataactatagggcttaatacctgtgtgatgaaataatctgtacaacaaacccctgtgacatgagtttacctgtgtaacaaacctgcacatgtacccctgaacctaaaatgaaaaaaattagcttgtgactttgctagctcacttattagttctaatagccttattggtagattatttgagattttctttgtagacccatatgtcatttgtgaataaagacagttttaattcatctttccacatttatatgccccctttttttcctcacgttactgagctggtgagggctttctgtacagtctcaaaaaggagaaacacccaagagtcttccttctttttctggtgacatgactcgttggtaagtcatctcccaagaggatgaaagtacatttttaattactagactctgcctccatgacactcacctttggaggcaatcaaaccaccttagtttgagaagggagtagagtgaactttggtagtgtgagaactgaaaaagtgagtgactcaacacttgtagtggctcatctcccagaatgaatgcccagtgattatgggtccctgatggacttaaacatgtctttggggaagctgggctcagagaagaatggacattcattgaactgagaggatagggctcttaggctacaacatggcaaatatggtgagaaagtctttgcatcatgtgtggctctgaggaaatggaggcatacaggggcaacatctaacttcagaagtcctggccaaccagtgctgggagatgggcctttgctttggacagagggaagactgtttgatggcagtcctgggtggcagagatatggcaatgccagtggcaatggtttgagagacaccagggctgttggagtcttggatccacttggcagtgaatgtttgagggatctttgtttggactgcatgtgactgaaattcttgaatgatccagaagaggataagagagagcctctaggagggtgaaaatgtacttcctgctagtcacacatttgggagttcaaatcagttttaattcaattgtgggaaatgaaataaataaaaagcagaatcattaaatgttttgagaaggaaacgatggacatgtcaagtgcatggtgtgccactgtatactggtgtgtactattctcacaggtcaagggaagaaaaggtgtgcacaagcatggaggctggagcaggtaaagcccatactggaaggacaagttcattggcctgttcagagtggaggagaacccaaggctcttgggccagggtggggggaacttgaacaatgcttctgcaaagaacttttcctacaatgagttaaaaacaattccaagatctggaaatatttccacttctttttcttatcagactaaaatccattttagtaggtatttcttgaagttattaagggaatagacttattgtttaaagagagggtggctgctccatttaccagggagaacctatttaagaacccacagtcttgggctctttccaaggcattgtaaatttactttacagtgtctgatttactttaaagcttcttgttattgcagtttaaaacaaaatttatcctgcacacatcctgtttaaaacagaattttctcctctgttaggcagagataaagaatgcaagaacgtgtgcttttatagcattgattgcaccttgatattaggtgaaaatgggccctgatgctttaaattatcaggttgatggctgaagggaaaccaaatcaatatgcattttaaaatgtaatttcattatttcttaatttagttagggtgatagttctaacaaatctaaatggaagaaaaattcattttgtctccttttcctcttgctccttcactttcttcacctttgtgttcctctttagaagtgtgacatgtacacatttttatatatagcattatggtactcctccaacatttagatcctattttcttttggaagacaacagtatgctccccaggctgcgtgacatgctggtggatcgcacctgtccctgtctggcacagaatcactagtagctagagcagctctcccttgctgagcagcccggggtaactgggaccttcttgtgcagcacttttatttccttttgccaactcacagcggatttgcctcttgcataagtgagcaaagcccccagaagtgttgtatgtgctaccccatgtcatgcaaagatggaggtagcaggctccatgcactgtgcatgcctttctgtctttgatagggctcaggtatttggcccacatctttatagtttcaaagactgccagtggaacaggagtcatgcttttcagcttatgacctctgaaagaaacacatctcatatatgcttgctttggagattcagctagttgacaatggttgatattgacaaaaaagtcaaaaatctacaagaataatattttactgctagtctcaaggaattttgacacagataggccttgactatggcccactgaagtgtcatgagaactaggtttgcttgctttttaggtaatcccctgtcatttctggataatctcgaagaaaatgccaatttcttgctgaggatgagcagccttcttggtctgaaaatagtgcttctgcctcagggcaacttccttcacgtgccctcacagatgcccccagtgctttatgctgccttctcctaagctcatcagcatcctgcccttatctgggaatcctctgtgactttgacctgggaaggtccttccactgccctgggcatcacatccactggtcatcatatccactggacatcacacacactggtcagttgctagggaaggttctggttgtagacctcggaactggccttgttttatggtaactctgtgacttcaggatagagactacgtgtcccatattggttccctttaaaacagtcaaccagaattgtgtcacttgctgtttcaaaacttgtgtttcttgtagaacctaggcctcagttgtggtttgaatgcttctatattcagatgacttttcgggcaaaaagattggcacttcattgatgactggtcaattcttcctagctagaccaccagtcctgctcatcgtctaggctctctttgactcaattcccccatcaattgtcaatcaagctctcttcttcccctcttctctatctatctctctaccccagctttggtgttctacaatatttaaatgttctaatttacagtttttgtgacactttggttccatgtaacagaaaatccaactgtaatttgcttaggtaaccatgatctttttaactcacacgactaaaatgtttacaagtaagacatatttcaagcatggctggatctagggactcaacaatattctcagaaccaaatttttctcctttcctttttataaattttgcctctggttccttggaggtgaatccatttttagataccacatggaggcaagatgactggagaagctctaatatccacatggcaagaggtacctacatggcgtggtccccattccattaatggcatcttaagttggctgcttcttgtgcaaaacccagtctctgttgggtaaatactgtcagttcaagatttcctccttggttttctccccaggggctctggaagtcatggtgcatgggggcggggaagtggcttctttcttggtgtcttcatgggcttccatccctgctcagtcttctgatgaaacatttgcttccccttctgctctccaagtaggtatctgttgtttttgtcccaacttcaaggtgtcctcattcagctacttccatctttctgtggcacaagaatttttggtcaccctgctgtttcctgtggggactgcctgagcctttaaaaaaaaaaaaacactggctaggggcagtggctcatgcctgtaattccagaattttgggaggccgaggcaggcagatcacctgaggtcaggagttccagaccagcctggccaacatggcaaaaccctgtctctactaaaaatacaaaaattagctgggcatggagggcacacctgtaatcccagctactcaggaggctgaggcaggagaatcacttgaacccagaaggcggaggttgcagtgagccaggattgtgcactgcactccagcctgggtgagaagaaacaaactgcgtctcaaaaaaagaaaaaaacaacaacaaaaaaaacctaaacatacttgctatcatttctagcctaacacttcaaatataaattgagtctcagattagcttactcacatatttccagccctgtgttggtgtttctaactccttctcacaagggttttgacaaggttgagcaggggccaaggagtaagctttgatcataagtattgaaaaccttctcctttctctagctggttagatttttaaaaaaatcacctattgcttaaaaaaagagctgcattcctttctgcgccctctctaactctgtaaagcatattcgttctgtgcttgagtctcctaggctttgctcttgctggtcacaggcaaatatctggaattttaatacacacagcaaacagcaacagttacaaaacattttctttcttaagtttctctgaatccatggctttcaagactgttctctgtgttttaaacttgaaagagtactgtgagagatggagaaaccaagaattggaccctccattgactcagaggctcctgctgagatgttaggaagaacaaacactgggaaatggggcagggtgggaaagggtgcggtggaggacgtgtatttgtttaagtggtccaaattttaacttatttctattatgcctaacagctcttgtatcctgaaatcatatataataaaatgctgtaatgaccatcacaggatgatcttacaaaggacataactagtagagtttaggagcattggtggaaaggagggaggaaatatacatattctcccaacatctcaggttggatcagggtgtagtgagtgttctgtctgggatgtgatatgctgagatgacaatgacagtatttgtgaagctcaagcttcatggtgttagttctgaacaggaagaaggaaggaggtgctacagcagtggttccagactctgggtaaatcaccctgggggtacttaacaaaaatacactgggcctcctgagccagaatctctggggttggtgataagcttccagggttttttcttttttttttgagacagagcctcactggcgcaagcttggctcactgcaacctccagctcccaggttcaggtgattatcctgcctcagcctcccgaacagctggaattacaggcatgcgctaccacacccgggtaatttttgtatttttattagacacggggtttcaccatgttggccaggctggcctcaaactcctgacctcaagtgatccaccagccttggcctcccaaagtgctgagattattggtgtgagccactgcgcctggccatagggaattttattgtagccagcctagtacaagtcaagtatgtttggggaacactgtgttagatcagggaagaatcaacaaaatataaaatggcagcatgatcccctggtagcctggttttaagagacttcattgtcaagtgctctgacatgaatagtgctagacaagaaagaatactgagctgaaagaattttaatgatttatatgtggaggagaagatgttttctttgtaaagttgtcaaagctaccatatttggaactctttagaaatggttggccgataagagaccctgatgtgcaaaacaaaccattggggaaagatgctaaactgtttttcttctattgattgaacctaattaaaatgatgtcttaacattaagctatattccacttgtcaagctatgaataattttatctgcctttctctcttctaaccaggctaacattaagagaggccagtattgaaggctgcatcattaaaaatcctgtccaggtaggagaagtctctggagaaagccctatacatcataagactgctctgtttctgtgtagcaggatagaacaaggaaagccttgtcttcattatttcccacggattttaggacatcttttgcagctgcattcagatactcacgaagtaagcctttgattaggaaggcggagaaacagagatgcttaaatggaaccgggcaaactaaagtgagcacatagcttagtttgtattccctttccttttgttctctctgatagtgtttattctttcttatctgaaagcattttattgtctacttaaaaaatcttaggtataaatttatagagcttggattttaggatttatataatctctgctttgctgaacattcaggtgcttttaacaactgaaatctttcaagttgtatgccaggtttttgtgtatgtaaggttttctatggaagaagattcaaatatttccttagattttcaaaggagtctttggcttcaagatgataaagaactaagcagaagtcttgatgctaagtcaacagttctctttgggaatttgacagtgctaatcggtagtttctatagattacaagatgccccacacctgaacaatagaaaaaaatctaaggtcatcaaatgagacccttgaggggcggtcctccttgcatctggtctgagggctgtagcaactggttcctttctcttgataatgcttttcttgtttgttttgaaatgtgggttgctagagagattaactgaactaggaggggttctcagagatgtggcagtgcagagagggctcatgacttagataactctttagcaaagtgctgtactgggccaaacttgacatcacctggtgcagtcttgtgcaggaggcatgcacctgagctctgatgaacaatcctctgtaaaactctattcttcttgctttgggtcttcttgcaaccccagggagcctgctcagagagtctgtcatggtcatggcataataattgattttaaactgggcacagtagtgtgcgcctatagtcccagctatttaggaggccaaggtgagaggattgcttgagcccaggagtttgagtccagcctgggcagcatatcgagatcttatgtctaaaacaacaaaaaaaattaactttataaaaaaactatatattttatcctctgtggctaaaaatttattcagaataccccctctatcttactccttaatatatttgaatgtcaatagctatttcaagaggaagagagggcaaaagtaaacattcttgaacattaatatatctgaagctttcctgtagtaacattccatccacagacaagtctgtaaagtaaggccatgccagtttatagatgagaaaaatgagcgctcctctagcaattctgcctcagcaatggtttctctaatcctttccactctgctgtcttctctgacctaaagcaaacccatttcttaggatgaccttcttccttttaagtgaatgaacaatttctgtcctcttcatggccagctataaagaaaaaacttgccttgactttctgtcttcagactctcatttcctttctctcctcatcattgcttctgaaacaccccagaaactcctacttgtcaacttatcctaaattccagagaactgatgtgagttggaaaggaacggtgggttcgagaagattgcagaaggctgggaacaattaaaaggatggaagtggcagccagggtacaaactgggtcaaaccaagaggggcccgtccctgtgagagggtcaaggtttcacagaagcacaggtgagtgcagaggtgcaagctgtgagttgttgcaagaaaagcaaatgagcatgtgtagaaggcaaatgcactggaaacgttgtctctgttgaatgtgcttatgatcagtgagagcctgcatggctcttggaatgctggaaacagttcccctgacagctgcctggtagtttttgttattcaaattgcacatcaaattgttctttgactggtctcatggattttattcctacacaggtgcaggctaatatgcagccacagactcgaagggaccctgcatgcaatttctggagctctttctctcacatcatcctttctgccactctgctcacaaattctagttgcctcagtctcccaaactccaacctctgtttcctgagctcagcagaactgctgcactatgcttgcagtctcctttcacaagtctttatagtcttatacactagctgatatattgtgtattatttgtttattttctgatattgtacagctatagtaggtcctcaatgtgttaaattaatacacgaatgcatcaacagaagggttcggttagttgctgtttttactattttatttcagtttagttttatttcattttactattttatttattttattgagacaagatctcactctgtcacccaggctggagcgcagtggcaccatcaaggctcactgcaccttcaacctcccaagctcagcctcctgagtagctaggaccacagatgtgccaccatgcccagctaactttttatattatttgaagagatgggatttcaccatgttgcccaggctggtctcaaactcctgggctccagtgagcctccctccttggcctgacaaagtgctggtattataggtgtgagcccccactcctggctttcagctggtttttattcaggttgtttggaggaggttgagtatggtgcaacctcagatgaagactccaaattctctttccctcaccctcttttctgggacccacagtccacccacatactattgatcttctgaatgccaaaccagactaattatcgtcttccttctattcccaagtctgccttccttagatattccttgtctggaaaaataatactatatacatgttttactttattcatggtaaattacctgctgtcctgaacttactctttcaaccacaacattaattgaaaattttttgcatctcctatgtgccagccactgtcctaggagctgggctaataaaagcactgccctctaagagcttacatttcagacagggagacacgcaggcatgcaggtactactacactgtaataaatcacaacagaggcagaaaacaagatgctcggagacttaacaggaaggtaaggtctccttgtttcgcccatgtctctgactctccccaaccactatctctagacttcgagaagtcccattcattctctgttattcagcacatatatatatctcttgggcatagttcaaggtccctggctttatgttgctccagtgtgtttatacagctaccataacacttactgcttgtaaggctaggatcatggttttttgtgcctctgtagtcaaatcaaaagcatagctcctagcacatcataggtgccgaaagaatcaagaggccaatgtgacatgccattttccttatgcagggcccaaatctcatgcccctgtatagatattttgtagggtttggtgacaggagtactggtggtggttatatactgtacggtatcactagagcatgggattttttttccataggttattggggtacaggtggtattcggttacaagagtaagttctttagtggtgctttgtgagattttggtgcacccatcaccagagcagtatacactgcaccctatttgtagtattttatcttttgcccccctctcatccttccccccaagtccccaaagtccatcgtgtcattcttatgtctttgagtcctcatagcttagctcccacatatcagtgagaatatacgatgtttggttttccattcctgagttgcttcacctagaataatagtctccagtctgggcacgatggctcacgcctgtaatcccagcactttggaaggtcaaggtgggtggatcacctgaggtcaggagttcaagaccagtctggccaacatggtgaaatcccatctctactaaaaatacaaaaaaaaccaaacaaacccaaacaacaacaacaacaaaaaaattagctgggtgcggtggtacatgcctgtaatcccagctactcaggaagctgaggtaggagaatcacttgaacctaggaggcagaggttgcagtgagtcaaaattgtgccactgtactccagcctgggcaacctagtgagactgtgtctcaaaaaaaagaaaagaaaagaaaaaagaataataatcttcagtctcatccaggtcactggaaatgccattagttcatttctttttatggctgagtagtattccatcatatatatatacacatatgcgtatatatatacacacatatgtgtgtatatatatacatgtatatatatacacacatatgtgtgtatatatatacgtatatatacacacgtatgtatatatacgtatatacatatatacatacatatatatacatacatatgtgtgtatatatatacgtatatatacttacatatgtgtgtatacatatacgtatatatacacacacatatgtgtgtatatatatacatgtatatatatacacacatatgtgtgtgtatatatatacatgtatatatacagatatatatatacatgcatatgtgtatgtgtgtatatatatacacatatgtgtacatatgtgtatatatgtatatatctcacagtttctttatccactcgttgattgatgggtatttaggttgtttccatgattttgcaattgcaaattgtgctgctataaacatgagtgtgcaatgacttcttttcttctaggtagatacccaatagtgggattgctggatccagtggtagttctacttttagtcctttaaggaatctccacactgttttccataatggctgtactagtttacattcccatcagcagtgtaaaagtgttccctgatagctgcatctatgccaacatctactgttttttgattttttgattatggccattcttgcaggggtaaggtggtattgcattgtggttttgatttgcgtttccctggtcattcatgatattgagcatttttcatatgcttgttggccatttgtatatcttcttttgaaaattgtctattcatgtccttagcccactttttgatgggattgtttgtttgtttttcttactgatttgtttgagttcattgcagattctggatattagtcctttgtcagatgtataaattatgaagatttttctcccagtctgtgggttgtctgtttattctgctgactgttccttttgccgtgcaaaggttcgttagtttaattaagtcccaactatttatctttgtttttattgcatttgcttttgggttcttggtcatgaaatccttgcctaagccaatgtctacagggtttttccaatgttatcttctagaatttttatagtttcaggccttagatttaagtctttgatccatcttgaattgatttttgtttaagatgagagatgagaatccagtttcattctccttcatgtgattagccaattatcccagcaccatttgttgaatggggtgtcctttcccccactttatgtttctgtttgctttgtcgaagatcggttggttgcattgcaagtatttgggtttatttctgtgttctcttttctgttccattggtctaggtgcctattttttataccagtaccatgctgttttggtgactatggccttatagtatagtttgaagtcgagtaatgtgatgtctccagaattgttctttttgcttagtcttgctttggctatgtggggtcttttttggttccatatgaattttagaattgttttttctaattctgtgaagaatgttggtggtattttgatagagattgcattgaatttgtagattgcttttcgcagtatggtcattttcacaatattgattctacccatccatgagcatgggatgtgtttccatttgtttgtgtcatctatgatttctttcagcagtgttttgtagttttccttgtagaggtctttcacctccttggttaggtatattactaagtatttaaattatttttgcagctattctaaaagggattgagttcttgatttgattctcagcttggttgctgttggtgtatagcaaggctactgatttgtgtacattaattttatatcctgaaactttgctgaattcatttaccagttctgggagctttttggatgagtctttagggttttctaggtatacgatcatatcatcagtaaacaacaaaagtttgacttcctctttaccaatttggatgcccttgatttttttcttttgtctcattgctctggctgggacttccggtactatgttagatagaagtggtgagagtgggcgtccttgtcttatgccagttctcagggagaatgctttcaacttttcccgtttcagtataacgttggctgtgggtttgtcatagattgcttttattacattgaggtatgtctcttgtatgccgattttgctgagagttttaataataaagggaagctgtattttgtcgaatgctttttcttcatctattgagatgactgtgtgtttttgtttttaattctgtttatgttgtgtatcacattttttgacttgcagatgttaaaccattcctgcacccctcggatgaaacccacttgatcatggcggactacctttttgatgtgctgttggatttggttagcaagtattttgttgaggatttttgcatctatattctacaaggatattggtctgtcgttttcttttttgattatgtctttccttggttttggtattagggtgatattggcttcatagaatgatttagggaggagtccctcttcattccatggaatagtgtcaataggatttgtaacaattcttctttgaatgtctgatagaattcagctatgaattcgtctggtcctggactctttttttgttggcaatttttaaattaccatttcaatcttattgcttcttatcggtctgtttagagtttctatatcttcctggtttaatctaggagggttgtatatttccaggaatttatccatctcctctacgttttctagtttgtgtggggaaaggtgttcgtagtagccttgaataaacttttgtacttctgtgttatcaatagtaatagttctcatttcatttctaattgagcttatttggatcttctctcttcttttctcgaaaattgtctattttcttggttaatctcgctaatgttctatcaattttatttatctttcaaagaaccaaccttttgtttcatttatcttttgtaatttttttggtttcagtttcacttaattctgctctgatcttttttatttatttttcttcttctgggtttgggtttggtttgttcttgtttgttcagttctgtgaggtgtgaccttagattgtttatttgtgctctttcagattttttgacataggtatttaatgctatgaactttcctcttagcaccgcttttgctgaatcccagaggttttgataggttgtgtcgctattatcagtcagtccaaataatttttaaattttcaccttgatttcattgttgacccaacaataattcaggagcaggttatttaatttgcatgtatttgcatggttttgacggctccttttggagttaatttccagttttattccactgtggtctgagagaatactcaatataatttcggttttcttaaatttactgacatttgttttgtgccttatcatatggtctttcttggagaattttccatgtggtgatgggtagtagcagatctttttgtaaatgtcctttataaaaggttaaaaatgttcccttgtaaccccagtttgcagataatttatatcaggaatggatgataatttttgccaaagttttaaattttcagtatctgttgagatggccagtttttaaaagtttgatattattatgaattaatttatttgcaaatcaacattagttgattttcaaatgttaagccagccttgtctaactaggctaaaccatacttggtcatgatgtcatttaatatgttgttgaattcaatttgctaaaattttgtttggaatatttgcattcatgttcataggggatattggtctgtagttttacttttgtgtaaaatctttttctgattttggtattagggcaatactagcttcatataatatgcagtgaaaaattcactcttctttcatttttggaggaatttgtgtagaatttgtataattcctccttaaattttttggtagaattcaccagtgaagctatttggttctgtagtttttttgtgggaaggttttaaaagtataatttcaatttctattaaacatttagggctttgcaggcaatttatttcttcttgagtgagctttgctaatttgtgtctttcaagaaatttatcaattttatctaaattgtcaaatgtatcagcataaagtagtttctaatgttttattatctttttagtagaacctgtagtatcacccctctcatttctggtattggtaatttgtgtcttctttttctttctaatcagtttggctagatgtttatcaattatattgatcttaaagaaccagcttttgatttcattgtttttttctactgtttttctatttttctattttacagctttttacttattttttgttatttattttcgtgagcttactttaggtttcattttctcttctctttctagtttcttaaggtaaaggctaaaattgagttgggaactatcttcttttctaatataagcattaagtgctataaattttcttctaagtactgatttaatggtcttttgacaaattctgatgggatatatttttattcagttaaaatactcataaatttttgttttgagcatttagtaccataaattttcttctaagtactgatttaatggtcttttgacaaattatgatataatatattgttatttttattcagttaaaatactcataaagttttgttttgatttttttggttcatgggatatttagaaatgtattatataatttccaaatatttggagaatattccaaaggtctttctgtcattgacagaggggcattcaaatctctgactacaactgggaatttatctatttctccttgatgttactgtagtgcctgctaatccatggttttactttctgtggtttcatttatccactatatagtacaataagatattgagaaagacagagagagagagagagagagagggtatactcacaaaactcttattacagaatgttgttataattgttctattttattattagttattgttaatctcttactgtgcttcatttacaaattaaactttatcgtaggtatatatacacaggaaaaatcatactacatatagtttggtactatctgtggttttaggcatccgctagggttcttagaatgtgttctccatggataaagagggactactgtctatcagtttggttgcatttgtttgtttgtttgttttgagatggggtctcactctgtcacccaggctagagtgcagtggcgtgatcttggctcactgcaacctctgcctcctgggctcaagcagttctcctgcctcagcctcctatgtacctgggacttcaggtgtgcaccaccatgcttggctaactttttgtagagacaagctttcgccatgttgcctaggctggtctcaaattcctggactcaaggaatctgcccaccttggcctcccaaagtactgggattacaggtgtaagccaccttgcccagcctgtatatatcatctatttttgattcatctattttgaagcaatctgttaatacatgcatattcatttagaatttttatgtacccttgatgaataaattctttattattatgaaatgacattcttcagtcctcataatattttttcctctgaaatctactttttctgatattcatataagccttttcagatttatttttattattgttagcatgatatctacatttccatcttttcattttttaacctgtttgtatttaaagtgtatatataaactcactttatatttatatatttataaatatatatacactttatatatatttataaacataaagtgtatatatatttttatatacactttatatatatttataaacttataaagtgtatatatatttttatatacactttatatataaatatatatacacatatatttatatatatgtgtatatataaatatatatattatatatatataaaatatatatatttgtatatataaaaatatatattgtatatataaaatatatatatttgtatatataaatatatataatttgtatatataaaatatatatatttatgtatatataaatatatatttgtatatatatttatatatatataaagtgtatatatatacactttatatttaaagtgtgttttctataggcagcatatagttgggcctggctttcatattcaatctgacaacctctgtgttttaattagtgtatttattcaatttacatttaatgggattatggtaaggttaggtatggctgtaacatcttcttatttgttttcagtttgctttatttattattctttttctttctccttttttcctgttttttttgttttagttaatttgtttctatgattcagttttttctccttgtgggttcttagttataactcattgttctagtatgtaatggttgctttattgtttatggtatacatctttaattatcacaaactaccttcaagtgatatatcacttcatgtatagtatactttcatttctctgcgcttggtctttatggtgttgttgtcatgtactttacttttatgtgttataaacccaataatacattgttatttctgtttaaacaagcacatatcttttaaggagacttaagtaataagaaaaaatttcttatatatttactcatgtagatatatttttggtggtcttcattcctttgtgtagatccagatttccatctggtatcatttttcttctgcccaaggatgttatttggcatttcttgtagtgcagacatttcttctggtggtggtaaattattctagcttttatatgtctaaaaatgtctccacttcaccttcatttataaaaaatattttttgctgggtactgaatactgagtgacagtcacctgccccccagtacttcaatgatgctgctccaatgtctcttgcttgcctgcaatctttggtgaaaaatctgatgtcagccttatctttgtttctctggatgtaatacgggtatattttctggctgtcagatttttctctttgtcattgttttttagtaacttatgctgtaatttggggtagttattttcatgtttatttttcttggtgttcattgagcttagatctgtaggtttatagcttcactaagtttggaaatttttcagccattatttctaaaaatatatttttcagtctttcttcttcagggactccagttactcatgtattaggccactgaaactatcccacatatcacttatgctttttcattttttggaattttattttctgcgtgttttattttgggtagttttcattgccacacttttaatttcactgatctcgcctttcttctacaatgtccaatctgcctttttcttcctccagtctatttttcacctcagacattatagttttcatatctagaagtttaggttaagccacggtggctcacgcctataatcccagcactttgggaggccgaggcaggtggatcacctgaggccaggagtttgataccagccgggccaacatggcaaaaccatgtctctactaaaaatacaaaaattggtcgggcgtggtggcgggcacctgtaatcccagctacacaggaggctgaggcaggagaatcacttgaacccgagaggcagaggttgcagtgagccgagatctcaccattgcactccagccttggacgacaagagtgaaactccgtctcaaaaaaaaaaagaagtttaattttaattttcatctttgtaatattcttgggccaggcacagtggctcatgcctgtaatttcagcattttgtgaggctgaagtgggaggattgtttgaggtcaggagttcaagatcagcctgaaaaacatagcaagaccctgtctctacaaaaatttttaaaaactaggtgggcatagtggtatgtgcctgtagtattagctactctggaggctaacagagaagagtcacttgagcccaggagtttgaggtaacagtgagctatgatcaggccagtgcactccagcctgggtgacagagtgagacactatttctaatatataattagatatctgtaatatctaatatatatatatatttataaacaaataatgtatatatatttcctcaatatttctacttaacttcagaggttaaacaatatggaaaacaattctaataatggctttaacatctactttgttaattctaattttatcagttctggattggttttgattgattaataaatgtcttcatttgggtcatattttcttgcctctttgaatgcctggtaatcttttattggatgccagacttgtaaattttgccttgttggtgctgggtgttttcgtatttctatacagcttgaactttgttctgtgatgtggttatgttccttaaaaacagtttgatccttttgggtcttacttttatgatgtgttaggtcagtccagtgcaatattcagtttacccttgtataaccgaggtaagacctctactcaatactctgtgaattatgattttgtttttactctggctagtgggaacacacactgttcctcatcctatgtgagcatgctgttccttcagatacttttgggtgagtttttccataacctcaactatttttcttagatgaatccgttgatctgcattctactgaaaaatccagatggaccatgtcactggcaactctcttttctcttgtcctctgtcctgtgaatttttgctgccttggtctctgtggaatcaaggacatggaacaggatggagaacttagagaagctgttggattccctgagtcctctttcttgtcacttatagccatactagtacattctttttttctccccagagacagggtctcactgtgtgcccaggctggagtgcaatgtcatgatcgtaactcactgcaacctcaaaatctcgggctcaagtgatcctcctgcctcagcctcctaacgtactggcatgaaccaccatgctcagccactagtacattcttataagagttttgttgccttgtttgcaatagcaaaaagacctttaaataatttatatagaaatcattagaatacactataatagattattgtacaactattacaagtaatgtgctgatatggaaaattctatattaaatgaaaaaagtaaagtattttatacttattatatacaattgtttgtattgttaattaaaaatcatctgtgtatgtgtatgtatatgtatatgcatatatgtgtgtataaatttgcatagacacaagaaatttaacagttatcttagcagacatccagtgttttgtgtgtgcagtttgtcttttcattgtttgaattttcttttggatatttttgttccacagtcatgtcatctgtgagtaatgatagttttatattttcttctctaatcctcatgccttttatttctttcacattgttgataacagtgtcttgttcccaatctcaaagggaaaatcttcagcatttgacctagaagtctggtgctttctgtagaattgttgtttatataaatacctttctcatattaagttagtttcattctatagtttttattttaattttaaaattgtttaagattttaaataattataaatgtaaatttgtaaatattagatattttaaattttaaattatgtaatttgttgattagattgacattagatttaattgggatctttttctgaatattttgaagtgatttgcatttttttcaccttttgtcctgtaaatgtagttattatactgattgatttaaattaactttgcattcctgggataaatctaattggtttgtccacgatgagataccatctcacgtcagtcagaacggtgattattaaaaagccaagaaacaacagatgcaggtgaggtcgtggagaaacaggaacacgtttacacagttggtgtgaatgtaaattagttcaaccattgtggaagacagcatggcgattcctcaaggatctagaaccagaaatatcacttgacccagcaatcccattactggatatatacccaaaggaatataaatcattctactatgaagacacatgcacatgtatgtttattgcagcactatttacaatagtaaagtcatggacccaacccaaatgcccatcaatgatagactggataaagaaaatgtagtacatatacaccacggagtactatgcagccataaaagggaatgagtcatgtcctttgcagggacttggatgctgctggaaaccatcatcctcagcaaactaacatgggaacagaaaaccaaacaccacatgttctcactcgtaagtgggagctgaacaatgagaccacatggacacagggaggggaacaacgcacactgggaccgtggggggtttgggggcgaggggagggaacttagaggacaggtcaataggtgcagcaaaccaccatgacacacgtagacctatgtaacaaacctacacgtcctgcacatgtgtcccggaacttaaagtaaaataaaatcaaagaaaaagaaaagaaaaaaagaaaaaaagaaaagaaaagcatatacatagcttgaaaaaaaaaaaaaaggaaagaaaatgtaatcccagcatttttggaggctaaggcgggcggatcacctaaggtcaggagttcgagaccagccttgccaacatggtgaaaccctgtctctactaaaaatacaaaaattagccaggcatggtggcaggtgcctgtaatcccagctacttgggaggctgaggcaggagaattgcttgaacccgggaggtggaggttgcagtgagctgagattgcaccattgcactccagcctggacaacaagagtgagactctgtctcaaaaagaaagaaagaaagaaagaaaagtaacatacttaaaaaaaaaagtcttaaaagttctccatcaggaactaggaatactaaaatatatttttattagttacaaacttagtaagatattaaaataagagggatagcattgaaagttgagagaaaagttgggtgtattttaatgccgtgctgtcctgaaatgtcagaactatgtactagcccttcctgtaagggtaagagtcctagcaaagaattcagagtaaggtttttgtttgtttgtttgtttgttttaccaaactgttccaatatagtcctagaatgctgtaaaagccatgttaaattaaaccaaaattgataaagttaaaaaaaaacaccaattggtttatgatatatatatatatatatatattgatagattctgtttgctaatatcttgcttaggatttttcatctgtgttcaggagtagattggtctgcactttccttttttatagtgtccttgtcagatttagaatcaaggttgttagcttctttttctattatctcaaaaggattgtgtgaaattgttatttttattttcagcctgtttcaatctactgttaatccatatgatgagttcttagtttcagttactgcatttttaagtcctagaatttttgcttgatacttttaaaacagtttctaattatctgataacattttctatcttgtttcttattttcaaataattagcatagtgattttaaagtctccaatctagagaatgttttcagtagtttttgttacttttttttttttttcttgagacaggatcctctgtatgttgcccaggctggtccaacttcaggcattgagataatttgaacctaagttccttcagtgtctataggccttccagtttaccctcattccagaggtgattcctttaaattcaaactcagtgcacagtaggagtgaggggcattcactaaggcctgatgggacctggattctaaaacttttccctctagacccatgagtccttcaaaactgcagctcagctcttcagcttctcagtctttctttctggaattggcaacattccctagggcagaaatgtcccagcgcaggactcaattccctggtcctccaactttcttggtttctgtcttggaaattcttcactattttagcactctgttgccttcaagtagaattgctatttccctcttaactagtttgcgcttactagaaatggacacagtaactaccttctttccaaaaccgggacttcaaatagaaagttctgctgttggtgaccagaagcttggccgccctgcctctgctgtccagggggaagcaggtggagagaggggccctccatgcctgttctttccgggaggcaggcctcttctaggtgaacatccttatatttgcttagctgacagtgggtatttctttaaatgggctgtttggttataggagacaattagattaaaaaaaattctgaaagctgctgcttgccaaattttattgatgatgagtgagctttgcagaaaatttccaaaataggttcattgttcaagtcacctgcctttctgcttttgaatcctcaactcacacctgagcagtggtccaccaagtctgagccccccaagcctgaggcctgacagaggcagagtggatgggataagagggtgagcgcggaggtcagcacttctgaggttcattcctgctctcagatgtgatgcttctgggtaacaggagccaggccgggagtcatgtctgctgggatttaaccatgctctgccattcactggctgtgccagaaagagaaaaagcatctaatctcattttaaaaacaagggattaagagattattagctgattccagatgtggctgctcattcaaagtacccaaagaggttgtgaaaaatacagatgcttgagtcataccccacactgtctctaccccaggacctgagctgctgaataaaacctggaatatatatgtgtgtgtgtgtgtgtgtgtgtgtgtgtgtgtgtgtgtgtgtgtgtgcctgcatatgagtggcataaaataatcattcattattattaccattatcgcctgtcacagttccaggggttgacggggcctagtgaggcagggcctgctctgggtctatcatgcagggcagtagcagaagactgaggctggagtcattctgaaagcatccacttactttctttcttgctttctttctgttttttgttttgttttgttttgtttctgtttttattttttttatttttttgagatggagttttgttcttgttgtccaggctagagtgcaatggcacgatctttgctcactgcaacctccacctcccaggttcaagcatttctcctgcctcagcctcccaagtagctaagattacaggcgtgcaccaccatgcctggctaatttttttgtatttttagtagaaatgggttttcaccatgtaggtcaggctggccttgaactcctgacctcaagtgatccacccacctcaacctcccaaagtgctgggattacaggtgtgatgaaggcattcactttcgagtgtctgagctgtgggtcagaatacctgcacttagcttctcccggtggcagggacagaatctacatttttaacaagcccccaagatgattatcagttggctaggcagtggtctctgacaacattttaggaattactggacaacatgaaacttttagtcccttaaagttgtacagttccagaattcaagtttttcttttgaagtaaaaaataacttctgttttaagagaatacaggtgtttctcaaagcaaaatgtcaagaccacttttcagacataggattatcagaaattctaacaaaaagctggtagaatactgcccaatagaactctgtttattcagttggatgtgctttaatcgagttctcactctgtgcaagttactgtttgggaaggtgtagacttgtattatttttatggctactaacaaagattacacataatccagagtagcagtacatttaaggtgagtctacatttccttgagactcaaactcctgctgttgtttgtggaaaatgagtatctggggcaaaagaggaagtgagagcccttaaagagagcagaccttcctgcgaagctgcccgctgtgcttggcttggggacagccttgtatattgggccaaaaatgtttgcctccaatattgtagggtagggtgcatgtgactgccacactggcttcttggtgttcatcaccagacaaacgtctgttttcctgccatgatgctaaccatgtttagcatttgtgtccacttggtatgataactggctagacattttgctcctttctcaaaaacaattttaactagttcataattaatatgccacaagacaaactatggttcagcattgggtcttctgggtgtttcaggcattaaaaagaaaatttatttcggggaatcatactagtcaattgttacttttcatcattacagtttccagaggtttattggtggcagatgttgcactcttttttaaaaaagaaaaactaaaaaacaaatggacatctccccgatggattcttagtgaaatgagtctttaaaaagagaaaccaggggctttctcatagtaagcagaaatagaccaacttaggttttaggccaagtgatgaataacgatatggggggacatcatgtaaacaaactactctgtcttttaatgattcttatttcctaatttaaaactgcaacaatatccaggaattctcactttctggtgaagagtgagaaatctttatgggctctcatgattcagttgaaagcaagaggaaatgtgcctcagacattttccttgaacattctccttctgggcaggaagtggaagtgggcagtgttcactgaagacgtggccgtcagatgggaggaaaagctgatggtgtgacaaaatatctacctccccttcttggtgtgtttccttcttccctagtatttctttgctttttttttttttttatatacaacagaaatttatttctcacagttcccacagaccttgaagtccacagtgaaggcagattgagtgtctggtgagggcttgcttatggctcctgagtgggaccttcttgttatgtcctcgcgtggaaaaggaacactctggttgcttcggacacttgtaagggctctaatgccattctttttttctttttcttttccctcttctgtgttggattttctgtttattattattattattattatactttaagttctagggtacatgtgcacaacgtgcaggtttgttacatatgtatacatgtgccatgttggtgctttcctggtatttctaacttagaaactaaaccaaagctcagtgacatgtaagtattgggagaaagccaatcagatgattactgaaagtgattagggagtaaacctgtgtgcacagagctaaactgagcccttcttactgagaggggagcatcaggaactgccttcctttgcgacgatgaaaggctgtcccatctataggagaaaaggttagagaagagtcaagctttgttgtttagttattgggtgcctttagataaatctcaatttctccacagaaatttctgtaatactaaagtgtcaaaatttgctggaaaattttttaaatgttcaaaaaaatattgtacaaatctaagacagtggtgctaaaacaatactagttaaaaatggactttattttatttggtaagaatgcccatatttacaaataactccgtataaatccaggtctctgaaagcaatacagtctctgagaggagctcgatttgagtgttatatgtgtatatctttgcattcttgagtctgtgttttttcataaatttcattttcttttactgttaaaatataactactaattaaataaataattattatttactaatgtgcaagcactatacagttctttgtatggtgcataaaaaatgataaaacactgtctcagtcctcacagaatttacactgctcacattatcttgaaaatatgcattttgagatcagactgatttgtggattttatacgtgtgcttcctgagatcattgggtgatgaacaaaattgatcatggcctgagtatcaacaagattttcaatgtaacagccttcatcagataacataatgtgtttcttagaaaggaagttcaaaaggaccaattctgttagattgctgaccttgacctcctgtggccaaaaatcctgtttccctatgttttgaaaggaaacacgtttgagaaaagctccccatcccagatttggtgattttccttaaaggctgtttggagagacaacaatggaattctgggagagatctgacatcagcaggttcatctgatctctctcaggagagagaagtgtttgtttactctgctcagagtgctatattcctatgcatgtgctattattagagtcctttgaagtagaagagtcatatgtcatagacctctttgtaattaaaaactgtaaggctgtttttctgatatgtatgtagagtagatggagaaggagaaacacttgtttgttgaaaatgaattctgaggaatttgggagcagagctttgcaagtttgggttttctgtacaatgtcacatttatttatcttaccttttcaaatgtttttggagagatggtactaaagagaaaaacatgattggacctttgcatctggacctcaagaaatttataggaaattgagtggtatccagaaactgtgctgggccgaagttaattgggagtaatacttgccctgagtacatacattgtgaatatcaaatgaaataagtcatatgaaatagcttccagaccatagctattgaaaactgaaacatttgttatttatttggctcagcataacttaaaattcaaaatttaagaaaatcacaatttaaaaaaatgatatgcaatttaattattgttactctatagcaatataccctagagttttttacatgtgtatctaattttttaagtggctgcatagtatcctcttgtatgaaagtaaaatacatattctgtgttgatagacatttaaataattttctgtttaactattttgaaaaagccacagtgggtacccaagttacacatacttttatacattctcaagcatttcttattgatggtaaaatgtgtgaaaagagaagaaacgcacaaaagatgatatgctgttgaagatgtggactaattatgtttatatttattaaggaatgaaattttgcatgaggcaattaagacaatagagtgtaagagtaaagccatttaaaaattgtaaaaaacgggccgggcacggtggctcacgcctgtaatcccagcactttgggaggctgaggtgggtggatcacttgaggtcaggagtttgagaccaacctggcaacatggtgaaaccgcatctctccaaaaaacaaaaattagctgggcgtggtggcacgtgcctgtaatcccagctactcaggaggctgaggcaggagaatcacttgaactcgggagtcggaggttacagtgaaccgagatcgcaccattacacttcagcctgggcaacagagtgagacttcgtctcaaaaacaacaacaacaacagcaacaacaaattgtaaaaaacaagccgtcttggctcctgcctccaggaagatgcaatagatatacttttctctattcctcttgctaactacagctaaaaactgtgggcattacacaaaaagtaaatatcagaagactttaaaagatgagaaacaaaaaggactggctagggatcatgggacctgggtttttgtgttgcctcaggtattctagattgggtattcgagaaacgtaatgtggaaatgccaaaggatttagactaaaaaagcccaaaggtgaatctgtttcccaaatgaccaagaaaagtgtacttgctatggtttaaatgatggcatctcctgcaaaatttatactgcaacttaattttcagttcaacaatattaagaggtatggtctttgggaggtgactaagtcatgaaggcttttccctcgtgaatgagattagcacccttatcaaagggctgtaggttgaaagaagtgctctcttgccctttctgtcccttccagcatgtgaagacacagtgtttctctcctccagagaatgcagctacaagatgctatcttggaagcagagagcagccgttaccaaacactaaataccaatgccttaatcttggacttcccagcttccataaccaaaataaataaatatctattgtttataaattacctggcctgtgatattttgttatagcaggacagactaagacaccaatctaatgagacaacttttagataatatctgctctattccatcaaaatatcacagaagctgacaatatcccaaatttggcaagagacataaacctgtagattcaaggagctgcggaaaccacaataggataaactcaaatatttctgtgtcaagacacttcataaccaaacttctaaaaaccaaagaccaagaaaaaagccttgaaagcagcaagcgagagattacttgtaacaattcaagtgatagtggagttttcatcagagacagtggaggctgaagacaaagtggcacatttttcaagtgcctaaagaaaagaacaattaacccagaattctatattcagagaaaatatcttccaggaatgaagggaaaatcaagaccttcttagtgagtcaggctgaatagttactctcctccaaatgctcatgccctaatccatagaatttgagaacatatcaccttccatggcaaaaggacttttcagatgtgatttggttcaagatcttgaggtggagaagttattctggactatctgggtgggtccaatgtaatcacagggtcattataagaggaaggcaggaaggtcagtgtcagagaaaagaaaatgatgatagaaacagaggggaggtagagagtggagagagagagtttgtgacagatttgaagatgctacctgttggctttgaagaagaaagggccacaagacaaagaatgtagaaaaggaaagaaacagatcctccctagaacctccagaaggaactagaactgctgacaccttaactttagtccagtgagactcattttggacttctgacctatataacggtgagataatacatttgtcttgttttaagctacttagtttgtggtaatttcttacagtaacaacaggaaactaatatactcagataaagaaaaactaagagaggtatgttaccagcagacatgccttaaagaaatggttaaagagattctcgaaatagaaaagaaattacatttaaaaaaagaatcttggaacattgggtataaagaaagaacatggcaagcaaaaatagaggtacatgcaataggttttccttctcttgacttttctaaattatgtttgacagttgaagcaaaaatacaacaccatctaagtggttctcaatgtatgcatagggaatatttaagaaaattatattataaatggaagagagtaaaaaatgtaacagtagataaagtttctgccttcatctgaactgctaaattgtcaacacccattgtattgtatacatataatggaatacctagagtaaccacttaaaaagctatacaaagcaatacgccccaaacacatagagaaatcaagtcagaattctttaaaatcttcaaataatacacaggatagcaagaagaagatataaactgaaaaataagcaggaaacagaaaatgaaataacatatttcagccttaacatatcaatatttgcaaggaactgtccacaagaaactaatttcaaatataataataaaaggaggttgaacgtaaaaggatggtatgacatttcattttataggtcagcttgactgggtcagatggtgtctggatatttggccaatcaatattctgggtgtgtctgtgagggtgtttctggatgagattcacctttgaatcagtagactgagtaaaatagatttactctaccttccctaatgtgggtgggccttatccaatcatttaaagaccccaatagaacaaaaaggctgtgtaagagggaacgccttctccctgactgagctgggacattggtccttctggcctttatctttaggttgaaacattgggtctcaagcctaatggctttcagactggagcttacacccttagctctcctggttttcaggcctgtagacttggactggaagtatatatcagctctcctgggtcttcagcttgctagctgaagatctttcaggacaatgtagaacttgttagcctccattattgcatatctttctatatctatatctatatctatatcatctatatctatatctaaatagatctatctcctagatatatagatataccacctgttagttgtgtttctctggagaactctgactaatataaatgggaaaatattaatatatactatgtaaacaattgaaagtgcaaataattgatagaacacttgatagaaaatcagcaaggatacaggagaacttagtaacattatcatccaacagaatttagtggacttttacaaattattccacacaataagagcaaaatacccatccttttttcaactgcccatgggctatttaccagtatagaccatacgctggggataaaataagcttcaataaatttttaaaaatggaaattattcagagtatattctctgacttacaaaggtttcaaactagaaatcaatattggaaatataataggaaaaatctccaaacacttggaaactgaacaagacatttgtaaataattcataggtcaaagagaaagtttcaagggaaatttaacaaatatattaaactgaattaaaatgaaaatacacatataaaactctgtgggacacaactaaagcaatactaggaaataacttcatagcattaacacttacattagaaaaccagaaaaatctcaaatcaataatctaagctcccatctcaaaaacctagaaaaagaagagtacaaacccaaagtaaggagaaggcatgaagctataaatgttaaatagaaaattaataaaattaaaattgaaaacagaaaattaatggagaaaggcaatggaaaaaaaagttggtcctttgcaaagatcaataatactgggaaaagtctatcatgacaaagagaagacacaacttactaatatcaggaatgagacaggagatagcactatcaactttgcagacatcaacagagttaacaaatcaagactatgaatacctgtacatacataaatttgacaacaagactgtgtgtggtgttggcagagggatagacataatgatcaatagatcattctcaatagagatacacccatccaatttatgagaggtgcaaaagccattcagtgaaggaaagaacacttttcaataaatgctgctggtgtaactggttatccataggcaaaaaaaaaatgaacctcaatttcaacttcattccttaaacaaaaataagctaaaatgaattatggatttaatgtaaaatctatgaatcaaatatagataaaatgtaaaggtgtaaaactgacaagttaacataagagaatatctttgggatctaatgcttgtgaagagttcttggacatgatactgaaggcataaatcataaaagaaaaatcaataagttggactttattaaagttaaaaaccttagctctgcaaaagaccctgttaagaggatgaggaacaacctacagggtgggagaaagtatttcacaccacatataaaataaaggattcataactagaatttataaataaacctcaaaactgaacagtaaaaaacaatctgattagaaaacgggtcaaagatcttgagacatttcatcaaagatatacagagattgcaaataagcacatggtgttcagcattactagctatcaaggatattactacacatctattagaatgcctaaaatttaaaaaaatagtgaaattatcaaatcctggcaaaggtgtataaaaacttcctctctcacacatggctggtgggagtgaaaaatggtactaaccactagaaaataacatggtagtattggtattattattatttttaaactagacatacactacctcatgacccagcaattccacggctgtgtatctatcccagagaaatgaaaatgtgtgttcacacaaaaacctgtatgcaattattgatagtggctttgctggtaatagccaaaaactagaatccaccaaaatatccctcattaggtacatgggaccggatgtgatggctcaatcctataatcccagcactgtgggagggtaaggcgagaggatagcttgagcccagtagttcaagaccagcctgggggagacctcatctctaaacaaacaaacaaatgtaaggtaaattgttaaacaaactggtgtatccataccacataataactacccaggaataaaaagaatgacctgttgatgcatgaatcaagttggatggatctcaagggcattacgctgactgaataaagccagtctctacagatcacgtactgtgtgattgtatttatatatcattatggaaatgacaaaaccatagacatagaaaacagattcatggttgccaggagttaggggtggtggagtggggcggaatgtgggcgtaactaaacggggtagtgtggggaaaatctttgcattgatgtacttattatgtctctttattgtggtagtggttacccaaatcaaaatatgtagatgtgtttctttgggaactaggaacagaaatgggctagatactcagaatggcaaggagaattttttaggaatcttatctattttttttctcatcaaagatattaatttgaccaacaagtatttattaaatgccagttaccgaaatagctgatggaatacagagataattaaaatatgttctttgccttcaaatggctgacaatctagtacatgtgtaatctccggtgcaatgtgatagatggatattaacaaaactattgttggagggctcaggtgggtctcctgatgccagtgagaccccacccctagctgatgtgagaaagaattcagggacgagtcagaatgaagtgcagggcaagaagcctccattgctaagtgaaagcacacccttacagaagaagtgtgtgtgtgctcgtgagaatgacttgtgcacaatggagtttgggtttctaatttatgggtgtttaactaatgggtggaataatcattaggtattctggaaaaggaggggattgcagggagctgcctggttatcatcccctttctcccttgtttgggtttgtctggaagagtcatgaacatgtcaccctgactggcgttttggccattttctcccttattttgggttttctgttatcctgtgatttctttgcctagttcctgtttttgctgttgtttgggtttttccatcctcctgcgaccacccagtgctattcctatctcaaaaactggcgagaatgaggcattgaaaaggtgttgctatttctgatctgggaggaacctgcagagcctgctgctgtgaggatgaggaagttgtctcagtttggcacaaatgcctccatcctcttatctgttgtccaccactgatttatcacgtccctttctctgtgcacatggtcttgacctcagaatccttctgaaacacattctaggcagccagtaccaagcaagcagagtggcttcttgacatagaagaaaagtttcagttgagtaatcttagattgtaataatcactccccctacgagctttaaggttaacactcagggtgagcaatctccaaattaacagccttcaacatgtggtctgtgtttttttcatgtttgtgattctatttagatgtaaggtgtttaaaacattttaaattttattggttgtaaatatcatgaactattttatggataacaataaaattgtatgacatacagaccttctcacgatttctaaatgtggaattacacataggcaaccacaagctgtcatgagagttttttaaccatcttggtactctcacttcagtgatgctttaaacacacaggactcctttgcatgcagctcactccttgttctcaagtcctgcaggattcccagccttcatggcctccttacaagtctcagccctgctccagtctccaagaccaatcctgatttctgccgaaggcatttaggcaactttagcatatgctgagcctcagtatctggtcacctgcagcttttatctgagattttacaaccaagcttctacttagatcctatttgaaattgaaactcagaattagatattgctattaaagagttaatatttgtatcctccaaaatccgtatgttgaaacctgatccctaatgtgatgatatttagaggtagagctttgaaaggtggttacatcatgagggtgaggtcctcatgaaagggattagtgcccttatgaaagaggtcccagggaaatctctttcccttttttgtcaggacacagagaaaagcaaacaaaaagacagcagtgtatgaagcagtttcccaccagacactgaacctactgatgccttgatcttggactttccagcctccaggatgatgagaaataaatttctgctgtttataagccatcccatctatggtattctgttagcagcctgaacagattaagtcaagtataccgggcctggcccctaaatctctttttataagctttaagtaaactaggaatacaagaaaatgacattggaagaaaagaaacacatttatcagttgtagatgacatgacaatatacctaaaaatataataaattcaacaggacaggtgaggtacctcacgtctgtaatcccagcactttgggaggccgagtcaggcaggtcacttgagctgagaagtttgagaccagcctggccaacatggcaaaaccctgtctctactaaaaatacaaaaattagccggatgcgatgacaagtgcctgtagtcccagctacttgggaggctgaggcaggagaatcacttgaacttgggaggtgcagattgttgtaagctgagatcaaagccactgcactccagcctgggcgacagagcgggactccgtctcaacaataacaacaaccacaacaacaacaaatttacagactgttagactattaaatttttaaaaatggctttatataagatggaatacagaaaaaagtattactttcttttactagcattgaacaattagaaattaaaatgggaaaaatcacattcaagataatgtcaaattagtttgtaaagcatctaagaataacttaataagagcactatatatatttttattaaaggacataaaataggactaaaataaatgagacatagtaataattcctcacgggaggaagactaaatgacatacagatgctgttccttcccaagtaaatttacaaagataatgcaaatctgattaggatcccagtgaattgttttgggaaatagacaagttggttttaaaatttgtttgtaacaatgaagttagcatttgaaaagaagaatcagaaggggaaatttgctccctaagataacacataattacttagataaaaatggttgggtaatggtatagagatagagaaatagatcagtggtacataagacagaatgtagaaacagacacattgatatatgtgggtttatgtagtgaatcttataattttatgttgcctgaacatgcattttgaacatttaactttctcttatcagtagcagagttagtctgtcttgacagtctccagttttatgctccccccactcccacacccagttgctcagtgttgttgattcagctatctgccttatataactgcctcctggtaaccccctccctatgggacagctggatacaacttacctgactggccctgctgatccccatatcctacatggacagtgcagatgtgctacagtgaccacctctcagtcacggtgtgacctggaatttgtgcctgctgctttgaacctactaactaaaactcctcttgggaaatctgtttgaataatgtcctggactccaataaagggactggcccacggatccctctcccaacacactccctgacctgtgtgtgtgtgtgtgtgtatgcaatgtgtgtgtgtgtggcctccaggcatgctgtgcaccccatgaacctgtaagtagtcaaatatttatttccatcttatatctcatctatctaatcattgaaggagtggtctccatccaaaaaaaaaagagaagattctaagtaaaaacagtttaatattacgataatgacagtattttgaaaaaacaaacttactctcacattgcatgatgtaaatataaattgtaggtgaattaaacttctaaatgtagagaaaaaacattgctaggttaactatgctgcaatatcaaaaatatcttaagatcacagtagcttaacataggaaagtttctttttttttcttttttttgagactgagtctcactcttatcacctaggctggagtgcaggggcatgatctctgctcactgcaacctccgcctcctgtgttcaagcaattcttctgcctcagcctcctgtgtagctgggattacaggcacgtgccaccatgctcagctaattattgtatttttagtagagacagtgttttgctatgttggccaggctggtcttgaacttctgacctctggtgatctgtctgcctcgccctcccaaagtgttgggattacaagcatgagccaccacacccagccaggaaactttcttgattatgtgaagtctgaagtgagcctggagattcttccaaggaagcttccttccatgtggtgactcagggattaaggctgcttccattttgttcccacaaaatttgaaccatttggtttcaaggtgtactgctgaaatggaagagaaatctgaaggttcacacaggggtcttcacgatcggggtgaaaatgacatagaactgtctatgtcacctctgctaacatctcattggctagaatgagtcacatccatgtaacttaattccgaaaaaggttggaatatggtaacatacatggatattaagtcagcattaaatatctcaatcgtaaaaagtataattatcaagaatagatatacatttttataaacttggggttgaggaagcttccttaggattatttagaaaagaaaaagcaataaaggaaaaactaaatttaacaatagaaaagcttaaaataattaaacagtgaaggatgccaaaaacaaagttaaaaggcaagcaacagattgagagaatatatttgccacacatacgaattacaaatgttaaaatttctaaagtgcagagtttctataaagaaaaaataggccaggtgtggtggcttacacctgtattcccagcactttgggaggctgaggcaggaagattgcttgagctcaagagtttgagaccagactggacaacatagtgaaacctttgtctctacaagaaataaaaaaaatcagtcaggcatggtgatgtgtgcctgtagttccagctactcagtggggcagaagtgggaggatcacttaagcctgacgggttgacattgcaaggaactgtgattgtgccactgcactccagtctgggtgacagagtaagaccctgtctcaaaaaaaaaaaaaaaatatatatatatatatttatatagatggtcagtgatataaataatatatatattatatgaggcagtccattgtagtattgtggtaatggcataaaattgaacacaatttaattttcaataagagtctgactaaatcacttacagtatggctatacaacagaatatcacgtagtcattaaaaaagaacaatgtggatctctatacactgacatgaacaaatattcttgatgtataagtgaaaaaaatgagatgtagatcactacggacaatggtgattgtaatttgggaaaaaaattaatgatatataaataaatagataaataatataaaacaataaaagtattaaaatatgacaaaatagggaaggatatggataaaactttacattgttaatcgctaaaaagtaggaaggcattcactttgtaattcatagaattttcttttttttggctcaatcttttaatataaaaaattcactgctgtatacaaaaatgtgaaagtgtgacaatgacaactatgaaatcctgtgaatgaaagtcccctcaaatgcactctgtggtgcacatgcggccgcccacaaaaactctggcgtggaaacaaactcatgcaaaccagtgctgccaagaagcgccaacacgtgtgttctccattccaccaatcacagaccaatatctactccaaacatccagtaacaaaaaatgtggcatcttcccaggaacagcaaggcagacttcttactcacgatggaccagcacaaataaacccagcaaaaagagcacttcatacttatgtttaggatagtcattcatgaggctcgtcccaattccaatataaggaacaaatcccctggctctccccacgacatcttttttctctagccaatgttgatcttgtttatagaggcctctgtcatcaaccgcattattatctcctttggtcaaaaacttgatatgcccattttgcttttcatgaatcttcaagactcggtgaactataggaatctttcttccttctatccttagaacagcgatttctcccactcgtatgggatcttcaactcgatttgttagaaagagaagatatcctctatgaaatgcaggttccatgctgccactgagcaacacaattggactttcacttccagttattaccattaaccccttccagatcatgagtgctgatgagacaatcattccaaaatttaggacttgataatagagccgccacttgttcatccactgcacatcatccaaaaagactagagacagtatggtggggatggcgagcaggacaccggcaagggagagggtgcgaggaccagcgggcagaacgactggcctgtaattcagagttttctaagtgataacttttgtctttttgtgttctgggcatggtttaaatagaaaaccttcaataatattcactcattcatttatttatctacccatctatccaaccatccatccatcgttccatccattcattctatcatacctaagaaacattgattaaaagtctatttgtaggcattgtgtttgccatgcacattcaagtcacatttagtttggcacagcttggaataagaagaaaaatgcccatgtgttttttcctttttcttctagttgactattttaaaaccaatcaacaaaacgtaaagagtctggccctgggcttcttgcacacaacatctgttttggcttccctggcctctggcctttgtctgccctgtagatgacagattagtcggggacatccttcatagtaggaaatggaggtcaataaaatttgcaccaggcttttcaatttagtatcatcccagtcaggacatcccaaaataaaatttgttttaaaaatagatctaggaggagaaaaaagattgaaaacaaacaatcctcttatgtcactaattctgtgagaaaacctgattgaaaaacaaatcagtttcttgttcaggtgcaatgattttgcgggtagaaaaaaagcagaacaaaaatagtgtaaagagtccagtgtgataaaggatactatagagcaaaacaggaagttgtttaatggaagggagtaattgacctcagagcctgagacgtgaatagatccttggatgcagaggtttttgcatttgtaaagtgttgtatcgatgctttattgaccagatttgaattgtacaccatggattctttctttttttgagacagagtcttgctctgtcgcctaggctgaagtgcaacagcgcgatctcggctcattgcaacctccgcctcctgggttcaagcgattctcttacctcagcctcccgagtagctgggattacaggcatgtgccaccacacctggctaattttgtatttttagtagagatgggatttttccatgttggtcaggctagtctagaactcccgacctcaggtgatccacccatcttggcctcccaaagtgctgggattataggcttgagccaccgcgcctggctggacattgtaaattcttactctgataattcaagcaaaatttcttgaattaaagaggagtatgagggaggctgttgtgaggtaggtttaatttttatcttcattctgatcttacaggggaggaaatgaatgctcaaagagattctgtgattagtttgtgatagagccagtaaatagaagaacccatctcaaaccaggtgtaccaaccccagacactggcagaacgctctctttatgtaagacctcaaaatcttactggttggtgtctgctgacttgtttttctctgttatcttgcctgtctgcagtgacaaattcagtgcagctctaactcatgtggacagggaggaaatgattctaggattgaggacttaagggtgtctggaagagaagagaattgttttgttttgttttgttttgttagttgttgttttcctcagacaggaccttgtcaacgctttcaaatatgtaggctgtttgctgtttcctttatgttggtccctgagaaggatctgcccttctaccctgtttccctggggggtgtggacagagcctttgtctttggggaagggggtcatcttgggaaaaggagaacagggcatcctgaggacctgctccgtctaaggagagaaagccgaacagatggcagctgccacgcagagggcactttgtaggaactctggctggagcaggcttcctgcgctccaatgccaaatccttcccttccaaggcaatgcagaggaacctgatgatgtggcttggggccagtgggcttgtggccaaagagcactaaatcaaagcaaagaagaggtgacaccttaaaagcaaaagacatttcatgtttgtttgttttggaaggcagaaagaaataagttgtaattgcaaaagagtagaagatataaaacaacatggctgtaaaatattttaatgttatttgtttgtaaaaggcttttctttaatgaatatgctctattcttattaagcaactttcccatttcactaaatgaggatggtgagtttgtaatttctggttttacctgaaaaccggtgacctggtgttagggaggctcttatccctttaaaataaacataatgcactagtttgtaatctctgcaggtatattaaaatgtttgcagtgataaacatttctagctttaaaacttttatctcttatccgaattcaagatctatgtctttaatgaactctttcaactggacattcaaacatggaaaatgtttctagattctcatctcccataatcagctgagaatggctgtgaattcccagaggaagacctgcggaagacagggctgagcttctggaggcaatattatgggagcatagatcttggggtacgtttcctcagaacccaggggactcctaggcactcactcatttatcatgatcatacgtttaatcttttttacttatgtttcaggaatataagaaaatgtatgttttaaaagcatgaacactcatacttactgaatacaatgcctgactaagaaacaaggctttataccttattaataaggagaaaatgccaagctaccaaagcatacattggaaagcaatatgacagagtagaaataatgctagctttattgttcctttacatttattagtaacctttaatgagcttctgtttgtgtcaggaactgaagttgcagagatgaaactctgaaattacaggtgcccatcaccatgcccagctaatttttgtgtttttagtagagacggggtttcgccatgttggccaggctgttctcgaactcctggtttcacgtgatccacccaccttggcctcccaaagtgctgggattacaggagtaatgcagatgatgaaagataccctttcctgactcagatgtgatgagagacttgtaagacacacacacacacacacacacacatacacacacaccctatactatacttcaggaagtgctgtggcagatgaaagctctgggaactaagagatcagcagtaaagggaatctaacccaaagtgggagcagggttaagccagacaactccggaaagaaggatgcagcaggcaggaggaacagcatctgctaaactctgtggtggggcagagcacttgcacacaggcagctgccatgaatatgattggctggtgtaggctgtgctgttggtggtggagaggaattgtggggggcctgggtatccacaccaaagagctgaggctttcagcaggggacccaaaagttcacatctgtttactcagagactaaggtggagatttttgcctggaggggtctgaggagcacattagaagctatgcaaacctgtcgaaattgtgtgcaatatgttaggagtatgtgagggtgggtaggtgtgtgtgatgtgtgcgttttcccctgggaaggtttggttatgttcttccatcttaaaatgtgtcataactctcagaaagggtgaggagctcaactaggacagaagagggtgatcagattggatggttattgcaatacttcagatgactaataatgaagtcttgggctgataaagttgtcctcgggatggatgggccaggacaatttcagagaaaataaagatatggtgctgacaggatgtgttatctgattagatctgcagggggaaggggagagggaggaagctgcccagtgcaaggcctcttgaattgtgacctgcccatgagctacctggggctcctgctcgagtgtagattctgactagaaggcctggggaggacccagagattccacatggctaacaagttctctggtgatgtccatgccatgccattggtgctgagtagcattttaagtcacaaaagtggaggtagcatactctaggtccaattctcaaccttggctgtcgacgctttctctgtttaatgattatggggcttggcattgtgagcatggtaggtggttggacagcatcactgacctctggccatgagatgacagtagcactcttgggagtgctgaggagacaaacaaccaaaaacttctccaggtattaccaaatatgcaagggcgggagtgggggcgaggcactgatctagaggttaaccactctggcttcacgttaaaatcatctgaggagttttaggagctatcagtgcctggcctcgcccagactgattatattctaatctctgcttgggggttggggagggtgcccacccagctttcgggaagtccagtgtgcaaccatctccgtggttgatggggcagcccggctgataaaacccaggactacacctgaacgcaggaagaggagcagtgtgggtggggaggtggcctgaggagtgaagataagacttcagatttacatgttgatacgagggaaatgcctggggctcatttagatggagatgctcactttgattttcttggttagtgacaagctctgtggcctcgtatctatgaaatatattttcaggtttttattttactcgtcaattctgatagtatctactctatgaatagagcagattgatgaaaaggtaaaataaatgaatggatgtgaaagaaagtaatagctgtcttacactattgcacacacacatgctcaagagttcttcagaattttatttgaaaaatcgtattttgaaagttttggaaaacacagaacaacattctataatatcagggcaagaactgatttctagaaaaaagaacaacaaacaaaaagcacaaatcataattgatgcattcaagtaaattaaaaagcaccatcaggaaagttaaaagacaaagactgaatgaaggtatttgcatagcatataattgacaaagctttagcataaagaatatgcaataaacccctaaaaatcagttacagaaagttgaacaacccaagagaaaatagacataagatatcaataagaaagctacagaagaggaaacagaaatagccaatatacataatactacaagatgctcaacctccacaatgatccggcaaatggcagctggagctgcaatgtatactatttcttacctaccagataggcaaaattttacaagtctgatacaatgaaatgttgctgaaatggcaaggaagaggaaactcatgctgctggtagggatacaaattagtactacgattctgtgagcaatttggcaatattaaaaattaaaatgtctaataacctgtgacaccgtaattccattcgtaggtaagttgtttacgtgcagagatgattgctgcagcattatttccaaaagtgaaaaattgtaaatgccctaaaggtctatcagtaagagaatggctaaataaattacattccttttaacataatggaatttgtgtatttttatgaatataaataaattagagctgtagatattaacatagataaatatcaaaggtgactgaaaaaatggtaagttacagaagctgtaattagtgtatcctgtttatttaaaatgtaaaaaatacaaaacaagactatattttatttacattggcatacattcttactttaaaaagaatcaagtgcatgcacggcaatgttgaaaaccaaattcaggatattggttctttgtaggggagagagaaatgagattggggagagtgacacagggtggagaagttaaatagtttgccctggtgtcaatagcttagagaacaggagagcctggattatacctcagcctccggccccagaacctgaactcttatgctctgtggttcatcctgaatttaaactctatctccatattgaaaaaaagtttcctggatgagctgttgtgctcaatctgctcatgataatttaattggagaaattattggttattgataaataatcttaaattttgtgattcaatcttaaaatatttctagcacagcatttcagtactagcaagtatcatagtataattgtgtgactacctgtattaccttttttaaacctacatttgatgtataatacattgactaaaataaaattcctcatcattgaaagtcaaagattcagtacaataatgattttttataaatcagctttctattcctttttaaatctgttttctactctcaaaagttctaaattttctactaaaaaaattctagtttgataagattttgtgaactttataaaaacatctctttatactgagaaggaaggagtccataaatcttgagtttgagcccatgatatggttgtttggctcctagaagtgtctgaaataggacccaacatgtacacggagctttcctaatttaaaagttccttcatgtacatgctcaatctttgtcttcgagctcagattgctgtaaccaagtcccatggacccagtgacttacaaacaggaatttatttctcatagttctggaggctggaagtccacaatcaggatgccagcacggttgagttctggtgagggcctcttccaagttgtagagtgctgacttcctgtgtatcctcacgtggcagaaagacagccagcaatctctttggcttcttttcataggggcactaatctcagtcacgagggtcccagcctcatgactttatcacctcccacaggtcccacctccaaacatcatcacattgggattacagtttcagcatatggatttttggggggacacagacattcagtccattgtacccttgaacccaaggattctgtggggtgggtagatgctatttgttacactcatcaatttgcaattgataccaaagagcagtagtttaagtgatttgctctgagacccagtgaccctgtggggattggagccagaattgcaatgtaaagcccttggtgttatcacttgtgtttggttcacttggacctgctcgttatcatgcacagaaccattgctcactgatttgacccctttctcttcactggagcagctctccagaccaccatggccttccctgcacatcctccttctgtccagagcagcaacaattcttggctcagttcatcacttcccccttgaaatgctctctggcttctgggacctcctctcttgctctttctcagtcactttgcaatctccacacttctaaatattggaggtctcaggactatgaagttctcttgtatctacatgcatttgttattttttaaaatttaaaatatcataaagacatacataaatcaacagagaagtaaactctaggaaagaccttggcttttgatctatgtacctgatcactactcttagagtgagaattaaactattttcagagaacagttattggctgatttttattacactttggatgatgttaataccagaagtgtcagtataagagctaggcttacacagcaaaggcttcggaaaaccatttcccccccatcctcaagttatgaggcagattaggagctagaaggataatgggcagtgttcatagcaatgggaatttagcaattttatcggcaaattaagaggaggagagatggtgagtattaaatgtggccatttcaaaatccttgggatactgtgttaaccctcaagagaagcagcagataaggaaccagaaatacatttggcaccgagaggctggggacacatagccaacaaaacaggtgaagttggaagagacatgatgaagtagtgaagtaaatttattgtatatcagttgatgatatgtgctaagaaaaagaaataattagtgggatagagagtgatggtgtgaaagtgccattttttacataatgctcagggaagtgctaaagataatatttgactaaaggcttgattgaaaagaggtcaagctagctttggagtttctagtaggcagtttgagatgtacaatgattggtaaggggtgggatgtgagctggagtccagattcaggacttgttggcacatagcgggtattgaaaaccatggggcaagatgaggtcatctagtcaatgtttaatggccatgaaaagagcaaggcccccaagagatgtgggatatctcaaaggaagtgtaccaaagctgactgggatggatggtctaagcagggaggtggataacccaggtggggtgatatggtttggctgtgtccccacccaaatctcatcttgagttataactcccacaattcccacatgtcgtgggaggaactggtgggaggtaattgaatcatgggggtgggtctttcctgtgctgatcttgtgatggtgaataagtctcatgagatctgatggttttataaaggggagtttctctgcacaagctctctcttttgcctgctgccatgtcagaagtccctttgcccttccttcatcttctgccatgtttgtgagacctgcccaaccatgtggaactgtgagtcaattaaacctctttttcttcccagtctcaggtatgtctttagtttccacagtgtgaaaacagactaatacatgggttgtcatggaatgcaaaataaaagtctttcaagaaagggggtgggtgttagtatgtcttttgctgctatgaagtcaagtaaagaaaggattgtgaagttgctattatggtagatcctcttcaaagatggccccaccaattccttcttctccgtatgatacacatgcctatggggtgatagctgaagctggatctagaggaaaaaggaatttttttctttttaaagataggaaattctagagcatatttgaaacaagacagaaggagaaatagatgatataggttgtaaatggaattccgaagtgaaaaagcataaggcctttgataggacatttcattgctagcagtagaatggggtgcacagtatgggaaaagaagcaagtggattgttctttggtggatggaagatgaagggcctcctagtgatagttcctagcttcttcgaaaggcaatgctaacatctgatggggccaggggtgtgtatttttatgagaggtttgagccaagaggaacaaacaaaagggagaaaaaaaaaccctctgcccctcctattttgttttcactatatgagctgcccaggttcataaactattagtgactatttttatattaagcacaaaatattagaatttaagtcagaattgaattttttcttacaatttcactaaactacgttttaaagtttacttctctgtttgtaagacccatttatcttcaaattttatgttcaatataaacatgtaaatgtaatttattaagaaattattaaatggaaatacttatcatttatgtttagtaattagaatctgtctttaccactcttttttaggaagaaaagtgaaaaccatcttgataggttttagaatgagattttcatgagagccaatgcaatgtccatgcttgtttatgacatatttgaagtgcttaaaggaaatatccatggattatcaggattttaaaaagtcatttgtgttgtcaaactctctaatgcacaatattggagtgccaccacaaagtcagctaaaatatgctaaaggtaattaaatatgtcttagagttgttttttctcttttggggggtttgagttttagagctttgtttgattgtttgtaagggttag

SEQ ID NO: 6 - DNA, 20574 bp, Artificial sequence
  SOX17-GFP recombinant plasmid
gtaggtcaccagcatggataggatatttacataggattaaatcaaaattgatgattgtgatgttatgcatgtacacaagaaagtgcaaggagcattcactaataaaatgtacctaaatcaaatgctaggcaaaaggttaaaaagtagctataagttaaccatctttataaatatgccattataattcatgtgttaaacagcataaaatatgtactggcaaaatcaaattagcataggccctccaactgttgaagacttagactgctcaagaattaaagcttcaattcgaacaaccaccctaaaactgagttgacatgttaggtatttgtggatcacactacatacaatgaccaaaccagttagtcatatacatatgattgctatttgttaaatcattcatgctcagagtctttgcttaaccagaggctgccccttctggctctgggatgtcctatcatcaccttttctgtagacacgaccctgtcagattttcctcctttagtcctggaaagggagaaaagatttgccaagaagagaagagcctgtttacgtgccctaggtcatccactgcagctaacttttggggtatctgtttgttttgttttttgaggcagggtctcgctctgttgcccaggctggagtgcagtggtgcaatcatgactcactgcagccttaacctcctgggctcaagtgatccttccacctcagcctctcgagtagctaggactacaggtgtgcaccaccacgcctggataataaaaaaaaaaaaaattgtagagacaggcactcactatgttgcccaggctggtctcgagctcctagtctcaagcaatcctccctcttctgcctcccaaagtgctgggactataggcatgagccaccgtgcttgacccgtagctaaacttgtacctgcgcactgtcaggtttcctggggctgccagcagtgccgctcctgagctctctaagagaaagcaccacaccagggatgtagagttcagagagccactgagcctgctttggagacagaggggttgatcttcattttaatgtagttccactgaactttccctcttacactgaagatggaaatgactcatgggaattcaatcatgcaaagcagcagtataaattagattggccagcctctgcacttggggcaagtcatgcaatctggcttgttatgcattattttcttcatctacaatcatggagagtaatgtgtgtgtgggtgtggctgacagcagggaaaggcaatatatttatgaaatatttcctcaaagctgccacatattttattaacacatctggaaaatactatttaatgcttactcctctttcttccttagggtttgttttgttttgttttgtttttgagatgaaatcttgctctgtcacccaggctggagtgcagttgcacagtcttggctcactgcaacctccaactcccaggttcaagtgattctgctgcctcagcctcctgagtagctgggactacaggtatctgccacaacacccggctaatttttgtatttttagtagagatggggtttcaccatgttggcgaggctggtctcgaactcctgacctcgtgatctgcccacctccgcctcccaaagtgctgggattacaggagtaagccaccgcgcccggcccccttatggtttttaagaaaagaaatcctagttttgctttagccatgactaaaagccccagacgcaaagaatatttgtttgtttgtttgttttgttttttgttttttgagacagagtcttgctttgttgcccaggctggagtgcagtggcgtgatcttggctcactgcaacctccaatccccggttcaagagattctcgtgcctcagcctcccaagcagctgggactgcaggcacacaccaccaatattttagttcttaatggtacaatcttacagttttaaaacgatgagtgactgcattcaagacaaaccaaaattgtgccttgtttttaactgatgcctgaggaacgtgccagcaggtaaagggagtgaagacgaaaacatcaattagcttagagtttatggtcacactcgatacttaaaataatttttaaatagatttaaacaagtaattctttctttctttcgctttggggcatggaggaagcagggtgctgggcaaagcctgcacagaggcgctggcatgcctggaagccaaaaaaatgggggctgggagcgggcagtggtgtggccgggagcctgattacagtgagcacatatgtgcacatatggagagaaacaggagccaggtttctcactgtgggaaaagagatttacaaatacagcaaaggagcagtctagaaagaaccctaagatgttggattggaattggagactaacacaagatatatatatataaacacacacagaggtagatttagaaatagttatagatatgtatgtatgtggacacacacgtatacatacatgagcatacattatttcctagctctgtcttttgagggtgcctggaagcagggacagtacagtactgatgagaacccagatttccacttctaaatgccatcctccacaaaaagatgcccttgatccttggagaaatgcctggatctagggctaaatgaagggaaaattcaaaacgagcctggaatatcgtgttgtgctaaaaactatgaaaatggtcaaagggttataaggacatatcaaaagaatacaggagctagctcgaaaggcacctcactggccaaatctgtggcaactgcagcacccaaactattgatacaatctagggaataaaaagagaatcaattggccaggcatggtgtaatcacacctgtaatcccagcactttgggaggctgaggcgggcgaatcacctgaggtcaggagttcgagaccagcctggccaacatggtgaaaccctgtctgtaccaaaaatacaaaaatgttagctgggtgtggtggtgggcacctgtaatcccagctacttgggaggctgaggcaggagaatcacttgaacctgggaggcagaggttgcagtgagccaagaacatgccattgcactccagcctaggtgacaagaatgaaactccatctcaaaaaaaaaaaaaaaaaaagaaaggaatccacagagatacaaataaacaaacaaataaaagaagggagaacttccttacagtagaaggaatacatgccatttcattgtcagagttctcaacacaaagacacacacaaaattctcacttacaaaggggaaaaatagtgacctgaaggtagagaaactgggtagacaccaacttgatgaagtgaccagattagcatcaccagtgatgatgagacgtccgacggccttccttgtcataccctgatgggagcacaccaccatatcaacgattttcctacaaagaatgtgtgagtcaacatagacagaccagggtgtgggacattcttggcatgaaaggcctgcactctttaaaactataaaggttataagatagacagaaaaatatggaagacctttgataaataaatgtaacttgatcctgaattggatgttgggccagaaagagaaaagaggcattgttgaagcagcttgcaaaatttgaattgagtatgtggcttagatggtagtgacgtatggtagtaatgtcaatttcctaatttgtatggtatttgatggttttggggagagtgtccacattttaggggaatatacactggagtatttggagtaagtgatgagacattgtgccacagcttgctctcaaatgggtcagaaaaagactaatggcatgcatatatgcatatgatttaatatagaatatgtaacaatatatccatattacatatttatatagtatctatattaatatattatatactaatgtattctatgtttctattgttctgtgtatgtatatttagaaaagaagaatgagatggaacaaatgtgggaaaatgtttatttagatagagatggagcaaaagataaaatgctggtgaggcgcagtggctcacgcctgtaatcctagcactttggaaggtcaaggcaggtggatcacttgaggtcaggagttcgagactagcctggccaacatggtgaaaacctatctctactaaaaatataaaaattagcctggtgtggtggcgcaaacctgtaatcccggctactgaggaggctgaggcaggagaatcaagtgaacctgagaggtggaggttgcaatgagcccagatcacgccactgcactccagcctgtgcgacagtgagactccatctgaaaaaaaaagaaagctaacacagcagtctcagaaaaggtgatacagttctttgtgttattcttggaacttctctgcaagtttgacattatttcaaaataagtgattttaaaagaatatctgtgtatttatatagtggtataagtaacaaacactttcatttttagtggaatatgtagtatttcatatggaagatatttccatttttcaatactctctaggaattctggaacttggaaggaagggggtgagttatatagccctttttagcccctgtaaaaatgttatataaccagaaaatgtcaaaaagaaagagttatctattctctgtccaaattcccaaattctacttttagattagccactgaaataatcgattagctttactaacgtaatggaaacccagtaaatccatagtcattcctcataaaagtagaatctgcattcccctggatcaaaggtagggaccctctgtgcaataattaatttcaaataattttaaaaagggtttgctctataaaaaaatagcattccatttttacccaaagcagtatagtcttctttacagtccctgacttgcgttttatctcaatttgctatttttttctgtacagaaaattttctctaaatcattatatccctagacacacacacacacacacacacacacacacgcacacacagttttactcagcacttttactttacaaaggtgtctgtgatcatttttttcacttctttatctgacaaagatctgacattctccccttctttttttgggaaaattgagggtgaggacttgcaatttacctggtagcaagttattgaacaaccgagactagaatttagtcttttcactctacaacacaaagatctagcctaggttagtacatttgtgggttattcttcctttaaaatacttgataccagccacacttattgagattgtactctgcctctgtaagtctttaggagaagaatttaggcctacccatgtaaatacccatttgcaaagcatctctttgcattgcaaagatatactaatagaatattgaattctttgcaattgtatttttgcttgccggttgtaacagggttttagaaggttgacattcacaaaacaaagacttcttttaccaccagagtaaaaatgctcacattcaaatataactagaaaatgaacaataatttatagagaaatctctgaaagttttgctagtgtaagacaattttgattaaagtataacaatgttgttactagctatcatagatgttaacacatgatattatacattccatctagttgctataatgcatgtaccctcaacactgtggtagttttattttattttttctcacaatgttttcataagctaacatgcatttatttaatttaattttatttattaaatacctgtgtagaacttactatgtgcctggccctattataagtagtttatgaataattaattcatttcatcctcataaaactccctgaggtcattactattaccatcctccagttcacagatgaggtctaaagaagattaagcaacgtgtccaaggaatacaccactggtaaactgtagaactagaattccagcccaagcagttcaactccaaatatgtgttcataaccaatgtgtcatgctgtgccaagcctcagattcacagttgttggataattatttgtggattaaatgaacaaattactctcttgtctcttaggctgatttgaaagcattaagcaaattacccaattgttctgtaccttattttttcactttgtaaaacagaattgataatatttgccatccatttctcttccaaacaacaggaagaatggagagcatttactttacctacctgctgtatgtttttatgtctttaagactggatctgcagtgggtctagagtaggctaacagcttataccttaaacaggcaacaaaaccacaattcagtataattaagttgctttccatctgaatgagtgtgaagtagaggggcaaaagtttgagaacttcaacttccttacacatgagctttattcccatttaactctgaactgttctgtctttttttcagctgaatcagaatttgtttgtgtaaaataatagttaaatgaaatgttatctagggcttagattatatgatctaataaaaatatcaagttatagatcttctaaatgaaaatgctttcctcttacagcactgcatctctaatatttaaaaattatcaggacctagttagggataacactggaagtttctgtgccaagggtccttactccatctctgtctatccactgtctttattttgtccctgcgctttccattaggttctttattggctgtagacatggcatgaaaagaaattcaaaacaagacccactaatgttttgttttgttttttttagaaacaggatcttgctctcttgcccaggctggagtgcagtgatacagacatggctcattgcagcctccaactcctgaagacccactactgatagcagcaagggcagatagctggtccaagcactcttgtgtgcttttgagcaaatcatctgtcctttctcaatcttaatctcctcttctgaaaaatgaggctaataacaaaggctgcactgtctacctccagagctgtcaggagggtcagagaaattagtgaaactgctttgtaaactgtcctctaccattatgaagacgttaatactaaaggtcagtttcgaaaaattttccaaatatagacatttgcttttgcattatatccacatgcaaaattatccatttacattcttggcctggagctccaagtggaatcagttcagaaaagaaacagaatttgacttaatcctcaaaaaaggtggtatttcagatgctcaatgaatgtctggagactaaactcctggtgaatgagaaaaagaatatgacagacctgaagtcagatgaccacaggcctacacagatgtgtctgagatgagaacagtctttgctaaggtctacagaggtcattctcagtgcctttgctaaggtctacagaggtcattctcagtgccttgccttgtagggagatgaccttaggactccatccatgacagctgtaacagtatactgaagaatatattgaagaccagtgaattgcgtgggctctcaggacataaagatgaaatgtaccaaagaccctgtgttgttattaaagagtattgacagttttgcaaggtccaaaaagtggacagagaagaaaatttagttaacaggttaaccaaatactgactgcaaaggaatctagcaaggatccctaacattttctcttctgttcagaaactttggaagccaattcagataccctttcaaaatctgacatgtgtgtggctaaagttgtacaaaacagtgggtaatgagtgttgtcagaagtggcctgtcctatgccctatttaactttgatcacttccatgataacaaaatgcacaccttgccctaaccatctggcacaatccagccctgcttaccagggaaacttggcaagccagagttttcagggtggaaaggaaacctattatctctactagaaaaaaaaaatctcaaagcgcttgacctactgatgtcagcatcacctttacatgccaggaacaaattattacagaagaccatacctagaacacccagctggaagttaatgaatcagggaggaagactaatgacacggcacggtacattcctccgaggcagggaccgcgtctattctccttcgggtgggagtggaagtgctctgcgcacagtgggcacgctgctgataaggctgtctggtcaggtgaggacacaggtctccaaggaaagccctgccttctcctagggtgtggatggggaaagtgggagtaggagttcacctgcagcaccgagtgcatagaagctctgccgctattgaaatcccttttaaggctgaggggcagatctgaaaggggtgagcaagacagtactgtgtatgtgacgagtcctgggtgaggaacgggaccctctccctcattcccaacgccacctctccctggagtatgaggttccacagcccaggcaataaagggaagtagcccacacacctcaacccggggccacagttggaggtggggagatctaagaaacactccacggatgagtttctgaagagggaagtggaccgggaacagcgcatttcctgcttcgcctgtgcaaatcccaggcggggccaagcgggaacggggacacggtctaagagtcgcccgctgccagggaggggttggggggcagcctcgaggggacaccgcggaaccagggagggatgcgcatggagggagtgggagaaggcgtccaagtaaaatgcatgctccggtcatcgggggtaacgcgcgtccccaaatcccctctcgctgtcgccctttttttcagtcctcacggggagaggccggcgcagcagtggagcaccgcaggggctggatcggacccgcactgcagcatctgcagggctccgacctggtgcgggcctccaaggcagggggcgcgcggcggcacagccggtggccgcgattttccgggccactccttccccccttacactcccctcccgcccgcgaccttcgacctccatcctggacccacggggtactggcccggggacaaggaggagacgttaaaggtatcaaggggcgcggcaccgccgcctagacggcgccgggacgcgaggtgcgaatcggcggcgtccggctgcgctgccctacctgggaggtgcgggaccctcggccgcgctccaccgccgcgcgccacctcgtgctggcctccgggaggcagccgcccgcgcacgatttataaatgcaaaggccttattgttgttctttgttcagggataccattgtctagtcatccacgggcagcctggagttttcccagggtttgcggcgcgcactcccctcccccgcccccacagacttgctctccagcgccaacccggatctgcctaggtgcccacgggtccttcccgatcgacttgagtgtccttcctccagcccctgctttcccagcatcgaaaacacaaaagcctgccggaaatcacccagcctttgcctggtcactcaggggcccacggataagcgtggctctgattcctccaggtcagccccacggttcgccacctacccgagttaatttctgcgcccgctgaccaaaggccccaactggcaacgggcacagcttcttggtgcgctagtcgcttccttgcccagcctttagagcctcgggtccggcccaaggacccggggacgtgagcgcaattagtagccaggagccctgcgaccctggaccgtgcagtgctaacgcacccgaacggctatgcgagcggtgtactcggctcttacttgtgaaagttgtttcccccaaccccctgcgtaaatctcttgtgttgagaaaagcaaggcttgcaggaagccactccggatgtttgctgctttacatgtggcatctgtggctggctctgataacgtcccggggcaccacgtattaaagtgaagagactgaaatagaaggctccacacaccgcgcgcgggtcagcgacgtcgccgccctccacactgccccccgaaatataagacaagcgaatgatcagaagaaatgagatctaactaggtcacagtatgtaaaagggactagtcttggaaagccaccacaattcctcccctgtaaatttgtaaactgtgaatttatgatctcagggagggtgttataagaagtagggggaggggcgtcaaaatctgaagctcctactccaacctatgattgtgtactttcacctgatttctcttaccagaccaagatcagtccccaagaacaagggcaaataaaaatagggaaacccggccgggcgcggtggctcacgacggtaatcccagcactttgggagaccaaggcgggcggatcacctgaggtcaggagtttgagaccagcctgaccaatatgatgaaaccccgtctctactaaaaatacaaaaattagctaggcgtggtggcatgcgtctgtaatcccagctactcgggaggctgagacaggagaatcgcttgaatcggggaggcggaggttgcagcgagccgagatcgcgccattgcactccagcctgggcaacaagagggaaactctgtctcaataaatgaataagtaaataaatcaataaaatatggaaaccccacgttttcttccccatcattttctccaccttcttggctcccaagcgcacctctcccaataatgagctgggtgaggaagagcatgaggatgaagaaagtgtacagggctaaatctgtatatgtacattttttggactcacacctggattgtatttcctgtagtgttttttaaggaattagtcaaacagactagacagataaaaatgaattctggaccagatattgttttttaattttcaatgtttattctaggaaaactccttagctcataaaagatttagtgttaagagaaaattctgctttgagagctttgaaaaatatttattattatccagaaaagttagaaaagatctcaaaaaaaaaaaaaaaaaaaacagcaaaaaacaaggtactacggggttaatttgtagattgctctctctcctcctatagttttgttgcttatttaatcatttgcaatgtgcttttgctttatactgaagcccatttttttttcagaaaaaataaagctttaaaagtacatcatcatttaaatttgtctaaaatcaaccgctttcaaaactaccaactagaagtaacacctctctatgatttctttatgcagatttaattttttttcttgtttgaatcttagagacccaggaactagaaacactttcttaacttgtcccctagccaaggcttcacagatacttgcagaattaaagataagttggcttaaaacaattgtgtaagagttcttttgagaaaaagcaatgccagagaaactgaaggccaggagtttgcaaaagttttgtatttttatggatgccactaataagcaagactggacagacggtcttgttgttgtagtatcacactcaaagcagcagcattttacttctcagattccaggtgtaagctctacttttttatcacgccttcataataaagaaaatctgttctggagattcgtatattgatttctttgcaaagttatctctaattatgcaggaatggctgttagttgccctcaaaaaccaacacaaatacacaaacacaacagcctggcttagtgattattaagagctgcaagtctgaaggcggactgctgggtgtgaattccaccttctcaacgctgtagtctccagcaagttccttaacttctctgcctccgtttcctttcctgtaagatagagtctacctcagggttaatatgaggatatgcttctttgctaatgctggagggcgctaggaatagcagtggcaggctgtgtcatttctcagtgttgtataacggcttgttttaaaagtcccactgaaaactttttttttttccagatcgaaacacaagtttaatagtcattcagatttcattccagtctaaagaaacttatagaaatctaattatctgccagaataaccgctttaaactgactgtaagaaccacagttactttgcagctaaaacagattgttctcttcccccaaacaaactcggacatttagacaaatattgctgctgtctttacattttagaaatcagtattaaggctcacctgttactgaacacatacgagaaacagttttgttatgcgtatcttatatacatcatgtatacattttcgtactttcacatgatgtgtataataagatacacataaaaactggttggcttgtcatgagtaaatgctttattctttagagtgaaggaatattggatacagaacgtcgttccatatttaatcttgctttagaaaattaggatttatcttggacacagcattttgaatataacacaggcaagttgagtcctgggggaaaaattgtatttttaaatttattatcaacggtgtctttcgcatttgagaaaacacatttgaagatgcccatgcagttccttggaagtaaactaggtcacccaccactgaaacaccctcggcttctgcaaaaagatgtgctttaaagagaatagaatggacgctcggtatgttcatctaaacgaccttgggcaagtacgtcgattccaaggtacaatcagccctcccagacggcttttcgagtctccctaaccccggtgggagaggacgcggcgccagagcccagctccggctagttttcccgggggcaggtgtagccttgggcgcggggccgggggaggggcaaggggcgggcgtggggttggactgggacgtgggactcggaccacggcctgggcgtgggcctaacgacgcgggaccggcccgccctcgccgctccattggccacatctgtgcagaaaaggccccgcggcccaggggcgcccgcagtgtcactaggccggctgggggccctgggtacgctgtagaccagaccgcgacaggccagaacacgggcggcggcttcgggccgggagacccgcgcagccctcggggcatctcagtgcctcactccccaccccctcccccgggtcgggggaggcggcgcgtccggcggagggttgaggggagcggggcaggcctggagcgccatggtgagcaagggcgaggagctgttcaccggggtggtgcccatcctggtcgagctggacggcgacgtaaacggccacaagttcagcgtgtccggcgagggcgagggcgatgccacctacggcaagctgaccctgaagttcatctgcaccaccggcaagctgcccgtgccctggcccaccctcgtgaccaccctgacctacggcgtgcagtgcttcagccgctaccccgaccacatgaagcagcacgacttcttcaagtccgccatgcccgaaggctacgtccaggagcgcaccatcttcttcaaggacgacggcaactacaagacccgcgccgaggtgaagttcgagggcgacaccctggtgaaccgcatcgagctgaagggcatcgacttcaaggaggacggcaacatcctggggcacaagctggagtacaactacaacagccacaacgtctatatcatggccgacaagcagaagaacggcatcaaggtgaacttcaagatccgccacaacatcgaggacggcagcgtgcagctcgccgaccactaccagcagaacacccccatcggcgacggccccgtgctgctgcccgacaaccactacctgagcacccagtccgccctgagcaaagaccccaacgagaagcgcgatcacatggtcctgctggagttcgtgaccgccgccgggatcactctcggcatggacgagctgtacaagtaaagcggccgcgactctagatcataatcagccataccacatttgtagaggttttacttgctttaaaaaacctcccacacctccccctgaacctgaaacataaaatgaatgcaattgttgttgttaacttgtttattgcagcttataatggttacaaataaagcaatagcatcacaaatttcacaaataaagcatttttttcactgcattctagttgtggtttgtccaaactcatcaatgtatcttaaggcgtaaattgtaagcgttaatgggctgcaggaattcgattcaaggatccataacttcgtataatgtatgctatacgaagttatctcgagcgtcaggtggcacttttcggggaaatgtgcgcggaacccctatttgtttatttttctaaatacattcaaatatgtatccgctcatgagacaataaccctgataaatgcttcaataatattgaaaaaggaagagtcctgaggcggaaagaaccagctgtggaatgtgtgtcagttagggtgtggaaagtccccaggctccccagcaggcagaagtatgcaaagcatgcatctcaattagtcagcaaccaggtgtggaaagtccccaggctccccagcaggcagaagtatgcaaagcatgcatctcaattagtcagcaaccatagtcccgcccctaactccgcccatcccgcccctaactccgcccatcccgcccctaactccgcccagttccgcccattctccgccccatggctgactaattttttttatttatgcagaggccgaggccgcctcggcctctgagctattccagaagtagtgaggaggcttttttggaggcctaggcttttgcaaagatcgatcaagagacaggatgaggatcgtttcgcatgattgaacaagatggattgcacgcaggttctccggccgcttgggtggagaggctattcggctatgactgggcacaacagacaatcggctgctctgatgccgccgtgttccggctgtcagcgcaggggcgcccggttctttttgtcaagaccgacctgtccggtgccctgaatgaactgcaagacgaggcagcgcggctatcgtggctggccacgacgggcgttccttgcgcagctgtgctcgacgttgtcactgaagcgggaagggactggctgctattgggcgaagtgccggggcaggatctcctgtcatctcaccttgctcctgccgagaaagtatccatcatggctgatgcaatgcggcggctgcatacgcttgatccggctacctgcccattcgaccaccaagcgaaacatcgcatcgagcgagcacgtactcggatggaagccggtcttgtcgatcaggatgatctggacgaagagcatcaggggctcgcgccagccgaactgttcgccaggctcaaggcgagcatgcccgacggcgaggatctcgtcgtgacccatggcgatgcctgcttgccgaatatcatggtggaaaatggccgcttttctggattcatcgactgtggccggctgggtgtggcggaccgctatcaggacatagcgttggctacccgtgatattgctgaagagcttggcggcgaatgggctgaccgcttcctcgtgctttacggtatcgccgctcccgattcgcagcgcatcgccttctatcgccttcttgacgagttcttctgagcgggactctggggttcgaaatgaccgaccaagcgacgcccaacctgccatcacgagatttcgattccaccgccgccttctatgaaaggttgggcttcggaatcgttttccgggacgccggctggatgatcctccagcgcggggatctcatgctggagttcttcgcccaccctagggggaggctaactgaaacacggaaggagacaataccggaaggaacccgcgctatgacggcaataaaaagacagaataaaacgcacggtgttgggtcgtttgttcataaacgcggggttcggtcccagggctggcactctgtcgataccccaccgagaccccattggggccaatacgcccgcgtttcttccttttccccaccccaccccccaagttcgggtgaaggcccagggctcgcagccaacgtcggggcggcaggccctgccatagcctcaggttactcatatatacttagattgatttaaaacttcatttttaatttaaaaggatctaggtgaagatcctttttgataatctcatgaccaaaatcccttaacgtgagttttcgttccactgagcgtcagaccccgtagaaaagatctcgagataacttcgtataatgtatgctatacgaagttatgatccgccccagcctgcaggccagaagcagtgttacacacttcctggaggagctaaggaaatcctcagactcctgggtttttgttgttgctgttgttgttttttaaaaggtgtgttggcatataatttatggtaatttattttgtctgccacttgaacagtttgggggggtgaggtttcatttaaaatttgttcagagatttgtttcccatagttggattgtcaaaaccctatttccaagttcaagttaactagctttgaatgtgtcccaaaacagcttcctccatttcctgaaagtttattgatcaaagaaatgttgtcctgggtgtgttttttcaatcttctaaaaaataaaatctggaatcctgcttttttgctctactagtacctctgtcacactagtcttatcaaaaaccagttcttaagatcaatgttaagtttattagttaatgtaaatttctcatcctcgaaaagggtgaacataaatgcctttaaggagtatatctaaaaataaacattaggatatctaagtttgatgtaattgtttcaggaaggaaaaaagaaaagcattctggaatgagcctacttcaagtaatcttagtttctaaaactaacagttaatattttcaattccagtatatcactttaagtagaaggggatgtccaagtaattttggttttctaactgttgaatcataagcttgacctgcccccagaggctttttggatgtttttatctgtgttttgccatctctttacactcctcgacattcagtttaccttaatcttcacatttttacaccttgggaagtggcaagcatcgctgggtttaagataaaggagtcacaaaaactaatcaaaataaaatttgcattatgacaacttttaatacactttagcattttatttgattggttttttttttttttgcttttagatttaatacatatacggacgattgcacagacttaggggagaatccatgaatggtttgtgtgtagtgtccctatctatcaccattactttatcaagaagaaacagttacagggttgtgagtaaaagatggggatcagcccctgtaatctgccatactaatcgctgtggcacgtctcaccacatttgagattgagacataaatggaaacaggtgacttataatgggcatttcctgtgccagatgtttgttcaatgccattctaaacagtgtgagcctcaacaaacctgcaggtttaggtgctatttttcctattttgtaagaaaaggaggcaccaggccttcccctgccatgtatatgaaggcttgtattacaagttcttttgacatatttctcacctgttttcctctgggccagtatgtattcatgggcactgggagaatttacattctgttgatgagaaaccatataattatccttagcagcaagtgctatagaaaaaggaaaggcttggaggatagcttccagcatttacatgggagagatgtctgagctgaaatgattggctggattctcttgaaaaagggcatggaatatgttttttagaagggattcctggaatgtgaaggatagacagttttagtgaggaaaggtaagtttattctgtcaggcataacaggctgcctttaaaaaggttaaattctttctcttagctcagatgggttgtttctgcttccagcctgagctccttctgcagggtgtcccaagagttcccagtagataaagtggacagaagggctaccagcccaagttcagggctgtgctcagattacacttggcattttcatcatagtcagcccaagaagactcagttttacccttggctgccatctcttaacgatattaagataagtacagaaaagaaaaagaaaaagagttcttaggggaaagatctaaagtcctgtaaattacatctttaactactcactaggcgcaggtggaaaagcagtaagagctaaaattgttaagttaatgttcatgcatttacatggatggagggattggtgttcacaaataattttttttgggtaagaagcatcaagccaattccttctctttcctcaagcacacagatcaagtgactgcaggtagcagctagtgattttttttaattcctaattttagtttttatgggtacatagtaggggtatatatttatggggtacatgagatgttttgatacagatatgcaatgtgtaataatcacattatgtaaaatggggtatttattccctgcagcatttatcctttgtgttacaatccaatgatactcttagttattttaaaatgtacaattaaattaatattggctatagtcactctgttgtgctatcaaatactaggtcttattccttctatgtttttttttttttggtagttttaaattaccaaaacatttggtatccttaaaccctttctcattttaaagtacagggatgtgggccctggtggcaaaattagaaatagagctttggggtccattacagaccattatagttttaaagtgaacgacagaatgtaaaacttctgcctaggtcgaacgactctatgtcatcaccaagtgaacagacctccccccaccaccaggtatgacatcgccaaatgcataaatcccctctgtgacattaccaagtgcctggatacccccatgacatcaccaaatacgcagacctctgtttcctcaagtagattcagatgaagtgaccacaggtaccagctagtgaatttttgagacaaaatattaaatctgtctcaagtttttactgttttattttggagacaaatacacataaaggatacattgcttttctacccatgtctaatttggtactttagaattacattaggaggtaagaatccagctcttttatgagctaagatagccagacttgatgccagtacagaatgtgcatgcctttgagacatccggagcaataaggaagaggttattttttcccccatgagaatactgactacatctctattaaagctaccaggtgggtctgataaattacagataaacttgtaaatgacttacacaagcagctaagagataatattgcaatgaaacaatttacttattattcttatcagtagattattgcctctttagtttgaatcacgctgcagaagatatcagcttgaatttgtactgatattaggaaaagcacatacaagccaaaggaattcagataaaatggaaagggtgcaatgaaccaaaagacatcatctcagcctaacattttaaaatgtcccatttcattttgtttttaatactgtgcctgtcacataataaatgttcaacattcccttcctcctcctgttcctctttgatttgttttgacaatagtggacagggagaagtattttacatccattatttcagcacaaatttatttttcctgcttacaaggtgcttccttctgggtctacaatattcatctgaagaaaaatggcactgatgttcctacccagtccccatctggagtaggctcaagttcctccacagggtgggctcctaatggagagagtatttctttaggtcctctggcctgggatccagcagcatctcagtttttcaccataacacctatccctaccctccttctaatgagaaggtggctgtgtgctttctctggaattaccaagcagctttatgggaataattcagtttgcaccatcctccatatacaaacactgaaccctcaccactgatatttttcccaggttggttcaagacactggaaactacaatgtcttagtgcagcacttagtacacgcaagtgctaagtaagttgttgtgataatcatgatgttctttaatgtaaaaatttctctgtagctaagattcaagaaaccatttggctaaatattttaaaaatctcttcttgctgaagaaattttagctttgacaatctttttttccacttgaatcgaagtcttaaaccttttgccaaagttgacttcctaacaagtattccccaaattgatgttgctccaaaagatgatcttgtgaggatactctctgtgtgcaggttcagataacaaaaaaaataaacatcagtagctgtgctgtggatcccagttctgtaagtcagtgccttcccataagcctgataacttgttaggcaagaaaaagaactgtggtgcgtgtgaagttaaacccagcagttttctgctcttggttaaggactgtctcattttcagtattacctgacgttaccggttgctcagaaaactgactgaataacttgctggaagcaacttgctgggaagccccaaggaaactcaagagttcctgctttgcctctcttttctattagaggcagtcacctggtgactattattcctttctcttgaataatgtgtttgaacacaaaaatttaaccccagactgtaaactactggagcaaggattagagaatagctctatgaataaagctagcagtgtctgtcctccgtaagaagaaaaatctctgcagtttgaatcagaggttcacctggcttggaaacttagctctgtgagtttggagacatcaccgaccatttctgcactccagccagcttatctgtaaaaagcaggggtgacgg

SEQ ID NO: 7 - DNA, 12959 bp, Artificial sequence
  Sox17 GFP reporter plasmid and targeting construct 5' - arm
gtaggtcaccagcatggataggatatttacataggattaaatcaaaattgatgattgtgatgttatgcatgtacacaagaaagtgcaaggagcattcactaataaaatgtacctaaatcaaatgctaggcaaaaggttaaaaagtagctataagttaaccatctttataaatatgccattataattcatgtgttaaacagcataaaatatgtactggcaaaatcaaattagcataggccctccaactgttgaagacttagactgctcaagaattaaagcttcaattcgaacaaccaccctaaaactgagttgacatgttaggtatttgtggatcacactacatacaatgaccaaaccagttagtcatatacatatgattgctatttgttaaatcattcatgctcagagtctttgcttaaccagaggctgccccttctggctctgggatgtcctatcatcaccttttctgtagacacgaccctgtcagattttcctcctttagtcctggaaagggagaaaagatttgccaagaagagaagagcctgtttacgtgccctaggtcatccactgcagctaacttttggggtatctgtttgttttgttttttgaggcagggtctcgctctgttgcccaggctggagtgcagtggtgcaatcatgactcactgcagccttaacctcctgggctcaagtgatccttccacctcagcctctcgagtagctaggactacaggtgtgcaccaccacgcctggataataaaaaaaaaaaaaattgtagagacaggcactcactatgttgcccaggctggtctcgagctcctagtctcaagcaatcctccctcttctgcctcccaaagtgctgggactataggcatgagccaccgtgcttgacccgtagctaaacttgtacctgcgcactgtcaggtttcctggggctgccagcagtgccgctcctgagctctctaagagaaagcaccacaccagggatgtagagttcagagagccactgagcctgctttggagacagaggggttgatcttcattttaatgtagttccactgaactttccctcttacactgaagatggaaatgactcatgggaattcaatcatgcaaagcagcagtataaattagattggccagcctctgcacttggggcaagtcatgcaatctggcttgttatgcattattttcttcatctacaatcatggagagtaatgtgtgtgtgggtgtggctgacagcagggaaaggcaatatatttatgaaatatttcctcaaagctgccacatattttattaacacatctggaaaatactatttaatgcttactcctctttcttccttagggtttgttttgttttgttttgtttttgagatgaaatcttgctctgtcacccaggctggagtgcagttgcacagtcttggctcactgcaacctccaactcccaggttcaagtgattctgctgcctcagcctcctgagtagctgggactacaggtatctgccacaacacccggctaatttttgtatttttagtagagatggggtttcaccatgttggcgaggctggtctcgaactcctgacctcgtgatctgcccacctccgcctcccaaagtgctgggattacaggagtaagccaccgcgcccggcccccttatggtttttaagaaaagaaatcctagttttgctttagccatgactaaaagccccagacgcaaagaatatttgtttgtttgtttgttttgttttttgttttttgagacagagtcttgctttgttgcccaggctggagtgcagtggcgtgatcttggctcactgcaacctccaatccccggttcaagagattctcgtgcctcagcctcccaagcagctgggactgcaggcacacaccaccaatattttagttcttaatggtacaatcttacagttttaaaacgatgagtgactgcattcaagacaaaccaaaattgtgccttgtttttaactgatgcctgaggaacgtgccagcaggtaaagggagtgaagacgaaaacatcaattagcttagagtttatggtcacactcgatacttaaaataatttttaaatagatttaaacaagtaattctttctttctttcgctttggggcatggaggaagcagggtgctgggcaaagcctgcacagaggcgctggcatgcctggaagccaaaaaaatgggggctgggagcgggcagtggtgtggccgggagcctgattacagtgagcacatatgtgcacatatggagagaaacaggagccaggtttctcactgtgggaaaagagatttacaaatacagcaaaggagcagtctagaaagaaccctaagatgttggattggaattggagactaacacaagatatatatatataaacacacacagaggtagatttagaaatagttatagatatgtatgtatgtggacacacacgtatacatacatgagcatacattatttcctagctctgtcttttgagggtgcctggaagcagggacagtacagtactgatgagaacccagatttccacttctaaatgccatcctccacaaaaagatgcccttgatccttggagaaatgcctggatctagggctaaatgaagggaaaattcaaaacgagcctggaatatcgtgttgtgctaaaaactatgaaaatggtcaaagggttataaggacatatcaaaagaatacaggagctagctcgaaaggcacctcactggccaaatctgtggcaactgcagcacccaaactattgatacaatctagggaataaaaagagaatcaattggccaggcatggtgtaatcacacctgtaatcccagcactttgggaggctgaggcgggcgaatcacctgaggtcaggagttcgagaccagcctggccaacatggtgaaaccctgtctgtaccaaaaatacaaaaatgttagctgggtgtggtggtgggcacctgtaatcccagctacttgggaggctgaggcaggagaatcacttgaacctgggaggcagaggttgcagtgagccaagaacatgccattgcactccagcctaggtgacaagaatgaaactccatctcaaaaaaaaaaaaaaaaaaagaaaggaatccacagagatacaaataaacaaacaaataaaagaagggagaacttccttacagtagaaggaatacatgccatttcattgtcagagttctcaacacaaagacacacacaaaattctcacttacaaaggggaaaaatagtgacctgaaggtagagaaactgggtagacaccaacttgatgaagtgaccagattagcatcaccagtgatgatgagacgtccgacggccttccttgtcataccctgatgggagcacaccaccatatcaacgattttcctacaaagaatgtgtgagtcaacatagacagaccagggtgtgggacattcttggcatgaaaggcctgcactctttaaaactataaaggttataagatagacagaaaaatatggaagacctttgataaataaatgtaacttgatcctgaattggatgttgggccagaaagagaaaagaggcattgttgaagcagcttgcaaaatttgaattgagtatgtggcttagatggtagtgacgtatggtagtaatgtcaatttcctaatttgtatggtatttgatggttttggggagagtgtccacattttaggggaatatacactggagtatttggagtaagtgatgagacattgtgccacagcttgctctcaaatgggtcagaaaaagactaatggcatgcatatatgcatatgatttaatatagaatatgtaacaatatatccatattacatatttatatagtatctatattaatatattatatactaatgtattctatgtttctattgttctgtgtatgtatatttagaaaagaagaatgagatggaacaaatgtgggaaaatgtttatttagatagagatggagcaaaagataaaatgctggtgaggcgcagtggctcacgcctgtaatcctagcactttggaaggtcaaggcaggtggatcacttgaggtcaggagttcgagactagcctggccaacatggtgaaaacctatctctactaaaaatataaaaattagcctggtgtggtggcgcaaacctgtaatcccggctactgaggaggctgaggcaggagaatcaagtgaacctgagaggtggaggttgcaatgagcccagatcacgccactgcactccagcctgtgcgacagtgagactccatctgaaaaaaaaagaaagctaacacagcagtctcagaaaaggtgatacagttctttgtgttattcttggaacttctctgcaagtttgacattatttcaaaataagtgattttaaaagaatatctgtgtatttatatagtggtataagtaacaaacactttcatttttagtggaatatgtagtatttcatatggaagatatttccatttttcaatactctctaggaattctggaacttggaaggaagggggtgagttatatagccctttttagcccctgtaaaaatgttatataaccagaaaatgtcaaaaagaaagagttatctattctctgtccaaattcccaaattctacttttagattagccactgaaataatcgattagctttactaacgtaatggaaacccagtaaatccatagtcattcctcataaaagtagaatctgcattcccctggatcaaaggtagggaccctctgtgcaataattaatttcaaataattttaaaaagggtttgctctataaaaaaatagcattccatttttacccaaagcagtatagtcttctttacagtccctgacttgcgttttatctcaatttgctatttttttctgtacagaaaattttctctaaatcattatatccctagacacacacacacacacacacacacacacacgcacacacagttttactcagcacttttactttacaaaggtgtctgtgatcatttttttcacttctttatctgacaaagatctgacattctccccttctttttttgggaaaattgagggtgaggacttgcaatttacctggtagcaagttattgaacaaccgagactagaatttagtcttttcactctacaacacaaagatctagcctaggttagtacatttgtgggttattcttcctttaaaatacttgataccagccacacttattgagattgtactctgcctctgtaagtctttaggagaagaatttaggcctacccatgtaaatacccatttgcaaagcatctctttgcattgcaaagatatactaatagaatattgaattctttgcaattgtatttttgcttgccggttgtaacagggttttagaaggttgacattcacaaaacaaagacttcttttaccaccagagtaaaaatgctcacattcaaatataactagaaaatgaacaataatttatagagaaatctctgaaagttttgctagtgtaagacaattttgattaaagtataacaatgttgttactagctatcatagatgttaacacatgatattatacattccatctagttgctataatgcatgtaccctcaacactgtggtagttttattttattttttctcacaatgttttcataagctaacatgcatttatttaatttaattttatttattaaatacctgtgtagaacttactatgtgcctggccctattataagtagtttatgaataattaattcatttcatcctcataaaactccctgaggtcattactattaccatcctccagttcacagatgaggtctaaagaagattaagcaacgtgtccaaggaatacaccactggtaaactgtagaactagaattccagcccaagcagttcaactccaaatatgtgttcataaccaatgtgtcatgctgtgccaagcctcagattcacagttgttggataattatttgtggattaaatgaacaaattactctcttgtctcttaggctgatttgaaagcattaagcaaattacccaattgttctgtaccttattttttcactttgtaaaacagaattgataatatttgccatccatttctcttccaaacaacaggaagaatggagagcatttactttacctacctgctgtatgtttttatgtctttaagactggatctgcagtgggtctagagtaggctaacagcttataccttaaacaggcaacaaaaccacaattcagtataattaagttgctttccatctgaatgagtgtgaagtagaggggcaaaagtttgagaacttcaacttccttacacatgagctttattcccatttaactctgaactgttctgtctttttttcagctgaatcagaatttgtttgtgtaaaataatagttaaatgaaatgttatctagggcttagattatatgatctaataaaaatatcaagttatagatcttctaaatgaaaatgctttcctcttacagcactgcatctctaatatttaaaaattatcaggacctagttagggataacactggaagtttctgtgccaagggtccttactccatctctgtctatccactgtctttattttgtccctgcgctttccattaggttctttattggctgtagacatggcatgaaaagaaattcaaaacaagacccactaatgttttgttttgttttttttagaaacaggatcttgctctcttgcccaggctggagtgcagtgatacagacatggctcattgcagcctccaactcctgaagacccactactgatagcagcaagggcagatagctggtccaagcactcttgtgtgcttttgagcaaatcatctgtcctttctcaatcttaatctcctcttctgaaaaatgaggctaataacaaaggctgcactgtctacctccagagctgtcaggagggtcagagaaattagtgaaactgctttgtaaactgtcctctaccattatgaagacgttaatactaaaggtcagtttcgaaaaattttccaaatatagacatttgcttttgcattatatccacatgcaaaattatccatttacattcttggcctggagctccaagtggaatcagttcagaaaagaaacagaatttgacttaatcctcaaaaaaggtggtatttcagatgctcaatgaatgtctggagactaaactcctggtgaatgagaaaaagaatatgacagacctgaagtcagatgaccacaggcctacacagatgtgtctgagatgagaacagtctttgctaaggtctacagaggtcattctcagtgcctttgctaaggtctacagaggtcattctcagtgccttgccttgtagggagatgaccttaggactccatccatgacagctgtaacagtatactgaagaatatattgaagaccagtgaattgcgtgggctctcaggacataaagatgaaatgtaccaaagaccctgtgttgttattaaagagtattgacagttttgcaaggtccaaaaagtggacagagaagaaaatttagttaacaggttaaccaaatactgactgcaaaggaatctagcaaggatccctaacattttctcttctgttcagaaactttggaagccaattcagataccctttcaaaatctgacatgtgtgtggctaaagttgtacaaaacagtgggtaatgagtgttgtcagaagtggcctgtcctatgccctatttaactttgatcacttccatgataacaaaatgcacaccttgccctaaccatctggcacaatccagccctgcttaccagggaaacttggcaagccagagttttcagggtggaaaggaaacctattatctctactagaaaaaaaaaatctcaaagcgcttgacctactgatgtcagcatcacctttacatgccaggaacaaattattacagaagaccatacctagaacacccagctggaagttaatgaatcagggaggaagactaatgacacggcacggtacattcctccgaggcagggaccgcgtctattctccttcgggtgggagtggaagtgctctgcgcacagtgggcacgctgctgataaggctgtctggtcaggtgaggacacaggtctccaaggaaagccctgccttctcctagggtgtggatggggaaagtgggagtaggagttcacctgcagcaccgagtgcatagaagctctgccgctattgaaatcccttttaaggctgaggggcagatctgaaaggggtgagcaagacagtactgtgtatgtgacgagtcctgggtgaggaacgggaccctctccctcattcccaacgccacctctccctggagtatgaggttccacagcccaggcaataaagggaagtagcccacacacctcaacccggggccacagttggaggtggggagatctaagaaacactccacggatgagtttctgaagagggaagtggaccgggaacagcgcatttcctgcttcgcctgtgcaaatcccaggcggggccaagcgggaacggggacacggtctaagagtcgcccgctgccagggaggggttggggggcagcctcgaggggacaccgcggaaccagggagggatgcgcatggagggagtgggagaaggcgtccaagtaaaatgcatgctccggtcatcgggggtaacgcgcgtccccaaatcccctctcgctgtcgccctttttttcagtcctcacggggagaggccggcgcagcagtggagcaccgcaggggctggatcggacccgcactgcagcatctgcagggctccgacctggtgcgggcctccaaggcagggggcgcgcggcggcacagccggtggccgcgattttccgggccactccttccccccttacactcccctcccgcccgcgaccttcgacctccatcctggacccacggggtactggcccggggacaaggaggagacgttaaaggtatcaaggggcgcggcaccgccgcctagacggcgccgggacgcgaggtgcgaatcggcggcgtccggctgcgctgccctacctgggaggtgcgggaccctcggccgcgctccaccgccgcgcgccacctcgtgctggcctccgggaggcagccgcccgcgcacgatttataaatgcaaaggccttattgttgttctttgttcagggataccattgtctagtcatccacgggcagcctggagttttcccagggtttgcggcgcgcactcccctcccccgcccccacagacttgctctccagcgccaacccggatctgcctaggtgcccacgggtccttcccgatcgacttgagtgtccttcctccagcccctgctttcccagcatcgaaaacacaaaagcctgccggaaatcacccagcctttgcctggtcactcaggggcccacggataagcgtggctctgattcctccaggtcagccccacggttcgccacctacccgagttaatttctgcgcccgctgaccaaaggccccaactggcaacgggcacagcttcttggtgcgctagtcgcttccttgcccagcctttagagcctcgggtccggcccaaggacccggggacgtgagcgcaattagtagccaggagccctgcgaccctggaccgtgcagtgctaacgcacccgaacggctatgcgagcggtgtactcggctcttacttgtgaaagttgtttcccccaaccccctgcgtaaatctcttgtgttgagaaaagcaaggcttgcaggaagccactccggatgtttgctgctttacatgtggcatctgtggctggctctgataacgtcccggggcaccacgtattaaagtgaagagactgaaatagaaggctccacacaccgcgcgcgggtcagcgacgtcgccgccctccacactgccccccgaaatataagacaagcgaatgatcagaagaaatgagatctaactaggtcacagtatgtaaaagggactagtcttggaaagccaccacaattcctcccctgtaaatttgtaaactgtgaatttatgatctcagggagggtgttataagaagtagggggaggggcgtcaaaatctgaagctcctactccaacctatgattgtgtactttcacctgatttctcttaccagaccaagatcagtccccaagaacaagggcaaataaaaatagggaaacccggccgggcgcggtggctcacgacggtaatcccagcactttgggagaccaaggcgggcggatcacctgaggtcaggagtttgagaccagcctgaccaatatgatgaaaccccgtctctactaaaaatacaaaaattagctaggcgtggtggcatgcgtctgtaatcccagctactcgggaggctgagacaggagaatcgcttgaatcggggaggcggaggttgcagcgagccgagatcgcgccattgcactccagcctgggcaacaagagggaaactctgtctcaataaatgaataagtaaataaatcaataaaatatggaaaccccacgttttcttccccatcattttctccaccttcttggctcccaagcgcacctctcccaataatgagctgggtgaggaagagcatgaggatgaagaaagtgtacagggctaaatctgtatatgtacattttttggactcacacctggattgtatttcctgtagtgttttttaaggaattagtcaaacagactagacagataaaaatgaattctggaccagatattgttttttaattttcaatgtttattctaggaaaactccttagctcataaaagatttagtgttaagagaaaattctgctttgagagctttgaaaaatatttattattatccagaaaagttagaaaagatctcaaaaaaaaaaaaaaaaaaaacagcaaaaaacaaggtactacggggttaatttgtagattgctctctctcctcctatagttttgttgcttatttaatcatttgcaatgtgcttttgctttatactgaagcccatttttttttcagaaaaaataaagctttaaaagtacatcatcatttaaatttgtctaaaatcaaccgctttcaaaactaccaactagaagtaacacctctctatgatttctttatgcagatttaattttttttcttgtttgaatcttagagacccaggaactagaaacactttcttaacttgtcccctagccaaggcttcacagatacttgcagaattaaagataagttggcttaaaacaattgtgtaagagttcttttgagaaaaagcaatgccagagaaactgaaggccaggagtttgcaaaagttttgtatttttatggatgccactaataagcaagactggacagacggtcttgttgttgtagtatcacactcaaagcagcagcattttacttctcagattccaggtgtaagctctacttttttatcacgccttcataataaagaaaatctgttctggagattcgtatattgatttctttgcaaagttatctctaattatgcaggaatggctgttagttgccctcaaaaaccaacacaaatacacaaacacaacagcctggcttagtgattattaagagctgcaagtctgaaggcggactgctgggtgtgaattccaccttctcaacgctgtagtctccagcaagttccttaacttctctgcctccgtttcctttcctgtaagatagagtctacctcagggttaatatgaggatatgcttctttgctaatgctggagggcgctaggaatagcagtggcaggctgtgtcatttctcagtgttgtataacggcttgttttaaaagtcccactgaaaactttttttttttccagatcgaaacacaagtttaatagtcattcagatttcattccagtctaaagaaacttatagaaatctaattatctgccagaataaccgctttaaactgactgtaagaaccacagttactttgcagctaaaacagattgttctcttcccccaaacaaactcggacatttagacaaatattgctgctgtctttacattttagaaatcagtattaaggctcacctgttactgaacacatacgagaaacagttttgttatgcgtatcttatatacatcatgtatacattttcgtactttcacatgatgtgtataataagatacacataaaaactggttggcttgtcatgagtaaatgctttattctttagagtgaaggaatattggatacagaacgtcgttccatatttaatcttgctttagaaaattaggatttatcttggacacagcattttgaatataacacaggcaagttgagtcctgggggaaaaattgtatttttaaatttattatcaacggtgtctttcgcatttgagaaaacacatttgaagatgcccatgcagttccttggaagtaaactaggtcacccaccactgaaacaccctcggcttctgcaaaaagatgtgctttaaagagaatagaatggacgctcggtatgttcatctaaacgaccttgggcaagtacgtcgattccaaggtacaatcagccctcccagacggcttttcgagtctccctaaccccggtgggagaggacgcggcgccagagcccagctccggctagttttcccgggggcaggtgtagccttgggcgcggggccgggggaggggcaaggggcgggcgtggggttggactgggacgtgggactcggaccacggcctgggcgtgggcctaacgacgcgggaccggcccgccctcgccgctccattggccacatctgtgcagaaaaggccccgcggcccaggggcgcccgcagtgtcactaggccggctgggggccctgggtacgctgtagaccagaccgcgacaggccagaacacgggcggcggcttcgggccgggagacccgcgcagccctcggggcatctcagtgcctcactccccaccccctcccccgggtcgggggaggcggcgcgtccggcggagggttgaggggagcggggcaggcctggagcgcc

SEQ ID NO: 8 - DNA, 4583 bp, Artificial sequence
  Sox17 GFP reporter plasmid and targeting construct 3' - arm
gatccgccccagcctgcaggccagaagcagtgttacacacttcctggaggagctaaggaaatcctcagactcctgggtttttgttgttgctgttgttgttttttaaaaggtgtgttggcatataatttatggtaatttattttgtctgccacttgaacagtttgggggggtgaggtttcatttaaaatttgttcagagatttgtttcccatagttggattgtcaaaaccctatttccaagttcaagttaactagctttgaatgtgtcccaaaacagcttcctccatttcctgaaagtttattgatcaaagaaatgttgtcctgggtgtgttttttcaatcttctaaaaaataaaatctggaatcctgcttttttgctctactagtacctctgtcacactagtcttatcaaaaaccagttcttaagatcaatgttaagtttattagttaatgtaaatttctcatcctcgaaaagggtgaacataaatgcctttaaggagtatatctaaaaataaacattaggatatctaagtttgatgtaattgtttcaggaaggaaaaaagaaaagcattctggaatgagcctacttcaagtaatcttagtttctaaaactaacagttaatattttcaattccagtatatcactttaagtagaaggggatgtccaagtaattttggttttctaactgttgaatcataagcttgacctgcccccagaggctttttggatgtttttatctgtgttttgccatctctttacactcctcgacattcagtttaccttaatcttcacatttttacaccttgggaagtggcaagcatcgctgggtttaagataaaggagtcacaaaaactaatcaaaataaaatttgcattatgacaacttttaatacactttagcattttatttgattggttttttttttttttgcttttagatttaatacatatacggacgattgcacagacttaggggagaatccatgaatggtttgtgtgtagtgtccctatctatcaccattactttatcaagaagaaacagttacagggttgtgagtaaaagatggggatcagcccctgtaatctgccatactaatcgctgtggcacgtctcaccacatttgagattgagacataaatggaaacaggtgacttataatgggcatttcctgtgccagatgtttgttcaatgccattctaaacagtgtgagcctcaacaaacctgcaggtttaggtgctatttttcctattttgtaagaaaaggaggcaccaggccttcccctgccatgtatatgaaggcttgtattacaagttcttttgacatatttctcacctgttttcctctgggccagtatgtattcatgggcactgggagaatttacattctgttgatgagaaaccatataattatccttagcagcaagtgctatagaaaaaggaaaggcttggaggatagcttccagcatttacatgggagagatgtctgagctgaaatgattggctggattctcttgaaaaagggcatggaatatgttttttagaagggattcctggaatgtgaaggatagacagttttagtgaggaaaggtaagtttattctgtcaggcataacaggctgcctttaaaaaggttaaattctttctcttagctcagatgggttgtttctgcttccagcctgagctccttctgcagggtgtcccaagagttcccagtagataaagtggacagaagggctaccagcccaagttcagggctgtgctcagattacacttggcattttcatcatagtcagcccaagaagactcagttttacccttggctgccatctcttaacgatattaagataagtacagaaaagaaaaagaaaaagagttcttaggggaaagatctaaagtcctgtaaattacatctttaactactcactaggcgcaggtggaaaagcagtaagagctaaaattgttaagttaatgttcatgcatttacatggatggagggattggtgttcacaaataattttttttgggtaagaagcatcaagccaattccttctctttcctcaagcacacagatcaagtgactgcaggtagcagctagtgattttttttaattcctaattttagtttttatgggtacatagtaggggtatatatttatggggtacatgagatgttttgatacagatatgcaatgtgtaataatcacattatgtaaaatggggtatttattccctgcagcatttatcctttgtgttacaatccaatgatactcttagttattttaaaatgtacaattaaattaatattggctatagtcactctgttgtgctatcaaatactaggtcttattccttctatgtttttttttttttggtagttttaaattaccaaaacatttggtatccttaaaccctttctcattttaaagtacagggatgtgggccctggtggcaaaattagaaatagagctttggggtccattacagaccattatagttttaaagtgaacgacagaatgtaaaacttctgcctaggtcgaacgactctatgtcatcaccaagtgaacagacctccccccaccaccaggtatgacatcgccaaatgcataaatcccctctgtgacattaccaagtgcctggatacccccatgacatcaccaaatacgcagacctctgtttcctcaagtagattcagatgaagtgaccacaggtaccagctagtgaatttttgagacaaaatattaaatctgtctcaagtttttactgttttattttggagacaaatacacataaaggatacattgcttttctacccatgtctaatttggtactttagaattacattaggaggtaagaatccagctcttttatgagctaagatagccagacttgatgccagtacagaatgtgcatgcctttgagacatccggagcaataaggaagaggttattttttcccccatgagaatactgactacatctctattaaagctaccaggtgggtctgataaattacagataaacttgtaaatgacttacacaagcagctaagagataatattgcaatgaaacaatttacttattattcttatcagtagattattgcctctttagtttgaatcacgctgcagaagatatcagcttgaatttgtactgatattaggaaaagcacatacaagccaaaggaattcagataaaatggaaagggtgcaatgaaccaaaagacatcatctcagcctaacattttaaaatgtcccatttcattttgtttttaatactgtgcctgtcacataataaatgttcaacattcccttcctcctcctgttcctctttgatttgttttgacaatagtggacagggagaagtattttacatccattatttcagcacaaatttatttttcctgcttacaaggtgcttccttctgggtctacaatattcatctgaagaaaaatggcactgatgttcctacccagtccccatctggagtaggctcaagttcctccacagggtgggctcctaatggagagagtatttctttaggtcctctggcctgggatccagcagcatctcagtttttcaccataacacctatccctaccctccttctaatgagaaggtggctgtgtgctttctctggaattaccaagcagctttatgggaataattcagtttgcaccatcctccatatacaaacactgaaccctcaccactgatatttttcccaggttggttcaagacactggaaactacaatgtcttagtgcagcacttagtacacgcaagtgctaagtaagttgttgtgataatcatgatgttctttaatgtaaaaatttctctgtagctaagattcaagaaaccatttggctaaatattttaaaaatctcttcttgctgaagaaattttagctttgacaatctttttttccacttgaatcgaagtcttaaaccttttgccaaagttgacttcctaacaagtattccccaaattgatgttgctccaaaagatgatcttgtgaggatactctctgtgtgcaggttcagataacaaaaaaaataaacatcagtagctgtgctgtggatcccagttctgtaagtcagtgccttcccataagcctgataacttgttaggcaagaaaaagaactgtggtgcgtgtgaagttaaacccagcagttttctgctcttggttaaggactgtctcattttcagtattacctgacgttaccggttgctcagaaaactgactgaataacttgctggaagcaacttgctgggaagccccaaggaaactcaagagttcctgctttgcctctcttttctattagaggcagtcacctggtgactattattcctttctcttgaataatgtgtttgaacacaaaaatttaaccccagactgtaaactactggagcaaggattagagaatagctctatgaataaagctagcagtgtctgtcctccgtaagaagaaaaatctctgcagtttgaatcagaggttcacctggcttggaaacttagctctgtgagtttggagacatcaccgaccatttctgcactccagccagcttatctgtaaaaagcaggggtgacgg

SEQ ID NO: 9 - DNA, 895 bp, Artificial sequence
  Sox17 GFP reporter plasmid and targeting construct 3' external probe
tccggcttcctatcttttgattttatgtatctctctctatctcagctgacttggggaatttaatttcattcttccattgggaaagaaaaaacaacaggaactcgccttccccgggtgctttccttagtggaatgagaattttacagccctataagatggtctgtgtttgctggagacacagcatctgtgttttactttgtgctttggacagcttagtctctttgattataaaatgagaaaaaaataattgtcagttggagaactttgtatagaatgtcttaatacacaagaactcccatcctgcatgaaaatcttaagatctttataaaagggacagttaattgggacatactgaatgcgatatcaagtttgccaacatttatctttctgttagcccctcctcccaccagtatggtttctgaagtcctgaatcgatttccataccgtttactttttgagaactgaacagggtctgaattcttgaggaggaataagcagagtgtaatggggaaaaaggcaaattaagaaaagattctggcttccagtagttccaggtaatactgaaacgcgatccgcaggcttttaaatccctcagtcctcagaagttatttctgtgaactgatggatatggacggactgatagaagaaaattagtagacaccagcaaaatggaaggagcaattttatagctgccccctatatagtggatttttctgctttttaaaataaatatttgtttggacgtttgaatacaatagtaaggatcagaggtgcacacatgcgcaccaagaatattgacctgaaaaagcttactgagataacaggaaggaaaaatagaaaataaaaatttaggtttgtagtttcaataacgagactgtggatatagaaaacatta

SEQ ID NO: 10 - DNA, 1130 bp, Artificial sequence
  Sox17 GFP reporter plasmid and targeting construct 3' external probe
ttgttttattcatttaaaaataattttaaaaatgtaaatgatgcacacgcttacaacaactcaaacaacattgcagacgggcttgtaatataaacagagttgtcagaagtttccatctctccccagccccagtgccacaggtcagaatcaattccttttttcttccccctactgggcattacctacattaataattctgcttgtctagtggttaattaattaatgtacctgcatggctaattttaggcttatgagttttagacatttactttctgctacgacagctaagaatttcctgcccgctcttcctcggaatatagttacatccttatttccacttctgttaattgtcttttaaagtccaggactacatacccttttctagttccatcgcgaaggcgggaagtctcgattcctcactgggaaaggtgaggacatggatgcctccacccttccctgaagcactcctctcctcttctgcggaggtggatttttaaaaacagattggggttggggtgggggagggacagcacgcagaatattgatgcaaacgtcatatgaaaaaaaatacatataatatatatgtatgtatacctgcaaagtgctgttacatatacgtgtgtatattaacagcattatgaatcccagacaattggggccgcttaccgccgtggctgtgactttaaattcactcacttcttacatccactaggaaaagaggatttgtttccctaaagcctataaaaggggaaaggcttaggcgcagtggcagccccgttccccgcaccctcctgccctcgggtcccgggcgggctgcgggagttcctcctgcgcgggcgtctgaggcgctagaggtcaccggagcgcgctcccctcgccagggacctacactcttcccgctgctacattaggccgcattaacaaggatctggattcactttaatttaaaaggtaaaagatcttaggtctgatgggggagtgcggcgaggagagctcggaccgcgacgtcgcgcgcccgcttcgaggagttttgagctcttagcttggtgccggggcccgcccggcgctagatgaagtgctcgtttactcggcctaagccacggtgactcgaaggtgagaatgcaacttcg

SEQ ID NO: 11 - DNA, 23 bp, Artificial sequence
  Single strand DNA oligonucleotide
ggataacggcgaaagcttcactg

SEQ ID NO: 12 - DNA, 24 bp, Artificial sequence
  Single strand DNA oligonucleotide
gcttcagtgccacagaaagtgatc

SEQ ID NO: 13 - DNA, 24 bp, Artificial sequence
  Single strand DNA oligonucleotide
ccagaagcagtgttacacacttcc

SEQ ID NO: 14 - DNA, 25 bp, Artificial sequence
  Single strand DNA oligonucleotide
gctggctggagtgcagaaatggtcg

SEQ ID NO: 15 - DNA, 30972 bp, Artificial sequence
  Recombinant Bac RP11-322 P28 PDX1-GFP
  misc_feature (8541)..(8640): 5' UTR
  misc_feature (11728)..(12164): 3' UTR
  misc_feature (30934)..(30972): 3' UTR
caggcaagggttgtttaagttactagataacaaagttgttattgattctagtatttttactcttcctgattccctgcagtccaaagggagtttgtcagaccaggagtgatttttattaaaaaaaaaaaaaaaagagtagttgctattgttgtaactggcctcattgtgacagatgggatcctagtgttttctcgctgccctttactcaggagctaggagaacagaaagcaaataaccaagaaaccaacacactcagtaatctggatttctcagagttgagccacagcacttggaaatcaaatattggctcctcctgaacgccccttttagcctggtgttgttaaccagtttaacattcccttatcacatgctcatgtgggcagaattaaatggaattagctgcaaattatataaaattcatttacctttaaaggaagctatttggtcatgttcagtgtagacagagcattgcattaagacacaagttaatggtactgcctggagatgaatcaatttgctttggttttattacctccctttatttgttcttatgtggtagctactgtgactggaaatgctcagctcaggttcacagagcccatgtcagagccacattaacatctcaaggagagtcccactctttctaaagagctcagtccaagtaaacacagtagcaaagtaagatcatgctgatcctcccttaatacttagtcacaaagaatggatgctgaacaaggtggcttatgcctgtaatcctagcactttaggaggcctaggtgggaggatcgcttgaggccaggagttcaagaccagcccggacaacatagcaagaccttgcctttacaaaaaaaaaagaaaaaagaaaaagttagccgggcatggtggagcatgcctgtagtcccagctactccaaaggccgaggagaaaagattgtttgagcccaggaggttgaggctgtagtgaggtaagattgtgccactgcactccagcctgggtgacagagggaaaccctgtctcaattaagaagataaataaattttaaaatgggtgatgtctaagagagaaaggcaaacctatgagaatgttgaggattgataagcatcttgtccatataggggttcaaataacatctattgaacttctgctttctgcactgacttaggcatttttctaagatttcttcatttcgacctcaccacaacctcatgatgcacaggtatatttttatttgaaagtgcatgcttcatgagttctttaagagagtatataaatctctatataacaaataaattatgcttgaggtgtctattgttgttctcaatttataatgttgataagaatgactgtgggcaggcgcagtggctcacgcctataatctcagcactttgggaggccagcgtggacagatcaagagatcaggagttcaataccagcctggccaacatagtgaaaccccatctctactaaaaatacaaaaaaattagccaggcatggtggcatgtgcctgtagtcccagctacttgggaggctgaagcaggagaattgcttgaacccagcaggtggaggttgcagtgagccgagattgggccactgcaccccagcttaggcaacagagtgagactttgtctcaacaacaacaacaaaaaaaaaaacaaaaaaaagaatgactgtgtacatgtttaaaatgcagactccccagtctcactcacccccatatcgttattcagaaggtctggggttgggctcagatattttcattttataagcatcccagtgattcttgatatacacagttcatgagtcacacttccaggaacacttccctataaatccatgttacttcattgattagtaagagtttgtatttttctgagatttgcctgaaggtaaatgtgttgcaatatgtaactggagaaaatataaaaaataaatgtatccaaatactgtgtctctgttcacaacaatacactcctaagagatatctaccacaggaagaattcctaattggcaaatatgataaagttgagaccacagtcagttagccttttactttaatctttgcaagagaggctgtggacctagcctaggctgtcaaaagagaaggcttcacttgtgctgctctgagtttagcattgactctcccatcttaaccccatcgatttctaattttaacgtggatttgatttggggggacacacagaggaatcactttgacggcagtgttcctgcaccctcacaaagacaaccagggttgaccatgaccgtttttctgatgtggaaaaagcaggaatggggcaggattccagctctgctctggcctagagactagaatgactcctttccctccctagacattttaaggtttcctctgagtttatgatgacagcttcatctccaacccacgaaagcaagaaccacagacaatgctagtgggggtgctctctggccagaacacactacttagatgctgggttccacacctactgggatagctaaggcattttgagttgtgattagttcacctgctcaagtctttattttggctttcctggctgtgaaaaagaaggccctgccccttctccacacctgtggggtctctctgtggtgtgctgatggcggacatgagagttctccagcaatccacctcctccagcccttttaagcaggactgtacctgggggcacattcccctaaaacactgagtaatatacctactaagtacttcctcccagtgttcctgaatatacctttccaggtctacccatctggaaatatctttagacatcagctcatggtgatagtctgtcattcttctggatgcagtaatagccaatagttcaatgtttatatgcacattaaaagcaatgctgggggagaaaggaagagatgaccatttattgaatgctttcaaagtgccaaaaacattagatgttttgtctcattaaatcctcacaaaaacaataaaaaatattttttgagtgcctactatatagtaagatagtacagtgtcacagccaacagaatggattttaaggccacatcaaggccaggtgtggtggctcatgcttgtaatcccagcactttgggaggccgaggtgggcagataacttgaagtcaggacttcgagaccagcctggccaacaggaaaaaccctgtctctactaacaatacaaaaattagccgggcatggtggtgcgtgcctgtaatcccagctactagagaggctaaggcaggagaatcgcttgaaccccagaggcagaggttgcggtgagccgagatcatgccactgcactccagcctaggcgacagagcaagactcagtctcaaaaaaaaaaaacaaaaaacaaaaaaccaggcatggtggcctgtaatcccagtactttgggaggccaaggtgggtggatagtctgaggtcaggagttcgagaccagcctgaccaacatggtgaaacccgtctctactaaaaatacaaaattagccaggcatggtggcacatgtctgtaatcccagctacttgggagtctgaggctggagtatcgcttgaacccaggaggtggaggttgcggtaagccaagatcatgccatggcactctggcctgggcgacagagcaaaactctatctggaaaaaaaaaaaaaaaaaagccacatcatctctgcttggatctaggctctgccacttactagctatataattctaggcaagtaacttaccatcactgggcctcaatttcctccactggaaaatgggataacagtaattggctcatggggttaacattggaaaatatttaaacaacgcctggctccatgcatttgccattacgattactatgtgcaacggggccagcttatggaacagtgctagtatttccattttacaaataagggcagggaagcttagtgaagtcatgtaacttggcaagggacacacagcttgtgcagggcagagcctgatgtggaggacaggtgtatgcagctcctgacctttctatggcccgccaaagccagcgcatatttctaccaatgagttttggttactcaaagagtgtgcaggcaggtgcacagtgagagatctacaggcatttgatcagtatatgttaccgaaaatctgggtccttcaaagcataaaccatgtgaaatgtaggatggttgaggaaggaagctggagggtagtgtgggtcaagccttctttaggctgcagcaggaacctggaggtaaggagaggctcctaggagaacaaaggattagtcataggaaatggtggtgggaggaggaggtggaaggcaaagaaaaggaactgtgtggaagcaaggagctggttacctaggactaagctcagaagggaagcagcagggatttctggagactgcacatctggaaggtagaaccagagatgagacaaccaaaggggtgagtccagagctgtagggggtgagccaccgggaacaccaggagtggggagcaacagctgacctcagatcctttggagcctgaaagtcctttcatacttttcctttcatcagcagagtgaactgaggaccacggaaggattaaaccaaaagtggaaagagctcgtgcctgggggccccactcccagggaggaagcgttgagcagtggctggaggaagcagcagacagttctggggcacacggagtcccccctcctgcccttctactcctcttacaccagagagagctaacaaggtagggaataagacaattacccaattcaattcggtttttaagctgcttttatctttacagttcagggatcactgaatcatctggaaaataatttcagctctctgcttattttcactagattgcttagccctaggaatattggaaaacccttcattcaaagtctgaggtcctttcctctctccaatccccacaacccaagctgggtttccctggcccctctcagacctggataccaaattctgggtatttatttatatatatatatatatttttaattttttgagacggagcctcgctctgtctcccaggctggagggcagtggcgcgatctcggatcactgcaagctccgcctcctgggttcacgccattctccttcctcagcctcccaagtagctggaactacaggcgcccgccaccacgcccggctaaatttttttgtaggtttagtagagacggggtttcatcatgttagccaggatggtctcgatctcctgacctcatgatccgcctgtctcagcctcccaaagtgctgggattacaggcgtgagccaccgccctcggccaattctgggtattcataaaccagcaggagggaaacattgattcgacttaggaaaatgaaaacctgcctgcattagtgctcattgaaggaaatgctaatgaactaaagtgcaatcaattatagaagtattctcattccacacatcacatcgtttgctttacagaattttccaactcaagaaacaatttttattttcaacagagatttaattataaaatgaatataaattccacgtgcattcatgatgtataccttggagttaagtgggattcatctgtttttttcatttataatgggatgcagtggcttaaaaatcctatcaccaagccaaattcagcccttagcatgcctctgaaaccaccgaggaagacttagccacttaccaagaacaaggtaacctgtgttctcccgggtgtaaaccgcgtctctgtgaagggaaagggggaagagggccggcaaggacctccagtatcagcgaggactatcaggacgtccagctaataaacgactttttcactgtccacactttaattggtttacagccttttttgtttatttatccataagagctgctgttaaatggctcgggaaggtgctcgcctaatggctcggtatcgctgccgggcctgttgtgggcgaggcggcttggagggggcgcaggcgtcagcggggattcagagcggaaacgcatttcgcctgtaatggactcggcgattttacgataccaggagctagatccacggggaagtacaacacacgaccttactaagcggagggttccgcttgatgcgttttttatacggctgtacgtgataaaattccagataactttgtttcatctaataataataataacaataataaatggttgtttgacctttgctccctgggtcccttctataggtcgcaggcagcagaaaatgctaattgtgaaagtgagaacgcgcctccatggaatacccccggcgatcccctcctcctcccccacagccgcgggtacccgggtttttgccggcgaccgcaaccggcggatttgctttctgctgagagcctcttttctttctgcagggccgagcaaaaatattaaatggaagcaaatgaagcatcgaaatggagaccaatttacagaaatgtgcaattagttgagaagtgcaaagtaaacactccgggggtggcaggcgaggcagggagcaggggagggagagtggggcgcagactgagtccagagtgggtgtaggggtgcccagggaggaggggaagggggaggaaaaggagggggaggggaaaagtggccgatctttgtcctgagcggagcttgccgtccgctcataaccgcgtcgccaagtcaaccctcggcgactcggcagattatctccaagggtcaacacgccgcggccaggcaaccccctccagcctgccctcctgatcgatgtggtcactcgcggccagggtgatagggtagagttctccgcggccgcagacaatggactcattgacgcgggcgcacagagattaggtgcccgggccccacggcctttcactctctgcccccaccaaaactgcaggtggcacttttccctgaagaaatcaccgaaactctccccgcccgccgccgtgcttcccttggcctgtcttcggtgacagcaagggcatctacaagccagggagccacacatcagagccacacacatgaggccacaggccaggaagccacacacatgagttctcacacatcgaagcaaatgctgagactataccggcctcccgcaagagaaggaatctgcagagaagtccacattcccgactggcttttttgtcttttaataaaaataaagagtcctcagaatagagcactcaatccgcacttaaaacacaaatatttccagtaggaagaaagaaatacattaagattgactctcaaaggtctggatgttggtgcgttgtttaggaaaggcggagcagtgatttttctctggcttggttctttgtggttcaagctctctcttgctgagacgtttctgcaaagctgtctagtttttctaaaacccacggtggcgtttcgagaaacgtcctcatttcgggagtatccagtcagaggctggtcaggccgccaggcctagcggatcatgcccaggcagggggttggacgtcaccgccacccggaggtcatccatccgcgtcagtgggtgcagaaaaagtggccctgtttaagtcaggaccccagaatgcccagaagttactgaatggtttgaagccaagcacagatgttatcatggaaaatgcagcgtttttatttctttttctaaatatgtaactcttcctccacttccccctctcctgcttgccttatttcaattgcaagcagaagagagtgagtgttctctgccggcaaactccgccagggtcccggcccgtagagagtcgtcaagggtctggaacccccgtgccaacacctgcccctgcttcgcagccccaagaggaaggccgcgtctttccccctcgctgtattgggaagctacgttccgggctggccaaatgggccccaattttccaaaacccaaatttgtaatacccttcaattttttaaaaaaaagaatttaaaaaagtctctgtgaatgcttcagaagttaccgtttacaccccagaagtacttgcagcacatccacaagtaaaaacacacaacgaatgccagagtttcgtgtgttttttaaccgacatctttgtggctgtgaacaaacttcataaataaaatagaatcaaatgcttctgacctagagagctgggtctgcaaactttttttttatcgtattccgcaacagttaaataaaaaattaaaaactcaacatgtctccttgtaaactacatcaattaacaaacacactatgtccattatcaaatataatagaaaaaatataggaaaatagaaaatagaaaaatataggaaaatagaaacttttaagccacggtgaaaatgtttctataaatgagtggttctaatgttttcgtgagcgcccattttggggagcaccgccagctgcccgttcaggagtgtgcagcaaactcagctgagagagaaaattggaacaaaagcaggtgctcgcgggtacctgggcctagcctcttagtgcggccagccaggccaatcacggcccccggctgaaccacgtggggccccgcggagcctatggtgcggcggccggcccgccggtccgcgctggctgtgggttccctctgagatcagtgcggagctgtcaaagcgagcaggggtggcgccgggagtgggaacgccacacagtgccaaatccccggctccagctcccgactcccggctcccggctcccggctcccggtgcccaatcccgggccgcagccatggtgagcaagggcgaggagctgttcaccggggtggtgcccatcctggtcgagctggacggcgacgtaaacggccacaagttcagcgtgtccggcgagggcgagggcgatgccacctacggcaagctgaccctgaagttcatctgcaccaccggcaagctgcccgtgccctggcccaccctcgtgaccaccctgacctacggcgtgcagtgcttcagccgctaccccgaccacatgaagcagcacgacttcttcaagtccgccatgcccgaaggctacgtccaggagcgcaccatcttcttcaaggacgacggcaactacaagacccgcgccgaggtgaagttcgagggcgacaccctggtgaaccgcatcgagctgaagggcatcgacttcaaggaggacggcaacatcctggggcacaagctggagtacaactacaacagccacaacgtctatatcatggccgacaagcagaagaacggcatcaaggtgaacttcaagatccgccacaacatcgaggacggcagcgtgcagctcgccgaccactaccagcagaacacccccatcggcgacggccccgtgctgctgcccgacaaccactacctgagcacccagtccgccctgagcaaagaccccaacgagaagcgcgatcacatggtcctgctggagttcgtgaccgccgccgggatcactctcggcatggacgagctgtacaagtaaagcggccgcgactctagatcataatcagccataccacatttgtagaggttttacttgctttaaaaaacctcccacacctccccctgaacctgaaacataaaatgaatgcaattgttgttgttaacttgtttattgcagcttataatggttacaaataaagcaatagcatcacaaatttcacaaataaagcatttttttcactgcattctagttgtggtttgtccaaactcatcaatgtatcttaaggcgtaaattgtaagcgttaatgggctgcaggaattcgattcaaggatccataacttcgtataatgtatgctatacgaagttatctcgagcgtcaggtggcacttttcggggaaatgtgcgcggaacccctatttgtttatttttctaaatacattcaaatatgtatccgctcatgagacaataaccctgataaatgcttcaataatattgaaaaaggaagagtcctgaggcggaaagaaccagctgtggaatgtgtgtcagttagggtgtggaaagtccccaggctccccagcaggcagaagtatgcaaagcatgcatctcaattagtcagcaaccaggtgtggaaagtccccaggctccccagcaggcagaagtatgcaaagcatgcatctcaattagtcagcaaccatagtcccgcccctaactccgcccatcccgcccctaactccgcccatcccgcccctaactccgcccagttccgcccattctccgccccatggctgactaattttttttatttatgcagaggccgaggccgcctcggcctctgagctattccagaagtagtgaggaggcttttttggaggcctaggcttttgcaaagatcgatcaagagacaggatgaggatcgtttcgcatgattgaacaagatggattgcacgcaggttctccggccgcttgggtggagaggctattcggctatgactgggcacaacagacaatcggctgctctgatgccgccgtgttccggctgtcagcgcaggggcgcccggttctttttgtcaagaccgacctgtccggtgccctgaatgaactgcaagacgaggcagcgcggctatcgtggctggccacgacgggcgttccttgcgcagctgtgctcgacgttgtcactgaagcgggaagggactggctgctattgggcgaagtgccggggcaggatctcctgtcatctcaccttgctcctgccgagaaagtatccatcatggctgatgcaatgcggcggctgcatacgcttgatccggctacctgcccattcgaccaccaagcgaaacatcgcatcgagcgagcacgtactcggatggaagccggtcttgtcgatcaggatgatctggacgaagagcatcaggggctcgcgccagccgaactgttcgccaggctcaaggcgagcatgcccgacggcgaggatctcgtcgtgacccatggcgatgcctgcttgccgaatatcatggtggaaaatggccgcttttctggattcatcgactgtggccggctgggtgtggcggaccgctatcaggacatagcgttggctacccgtgatattgctgaagagcttggcggcgaatgggctgaccgcttcctcgtgctttacggtatcgccgctcccgattcgcagcgcatcgccttctatcgccttcttgacgagttcttctgagcgggactctggggttcgaaatgaccgaccaagcgacgcccaacctgccatcacgagatttcgattccaccgccgccttctatgaaaggttgggcttcggaatcgttttccgggacgccggctggatgatcctccagcgcggggatctcatgctggagttcttcgcccaccctagggggaggctaactgaaacacggaaggagacaataccggaaggaacccgcgctatgacggcaataaaaagacagaataaaacgcacggtgttgggtcgtttgttcataaacgcggggttcggtcccagggctggcactctgtcgataccccaccgagaccccattggggccaatacgcccgcgtttcttccttttccccaccccaccccccaagttcgggtgaaggcccagggctcgcagccaacgtcggggcggcaggccctgccatagcctcaggttactcatatatacttagattgatttaaaacttcatttttaatttaaaaggatctaggtgaagatcctttttgataatctcatgaccaaaatcccttaacgtgagttttcgttccactgagcgtcagaccccgtagaaaagatctcgagataacttcgtataatgtatgctatacgaagttatgtcgacctcgagggggggcccggtacccaattcgccctatagtgagtcgtattaccggggcccaccttagaccgaaggggaaaacccgctctctcaggcgcatgtgccagttggggccccgcgggtagatgccggcaggccttccggaagaaaaagagccattggtttttgtagtattggggccctcttttagtgatactggattggcgttgtttgtggctgttgcgcacatccctgccctcctacagcactccaccttgggacctgtttagagaagccggctcttcaaagacaatggaaactgtaccatacacattggaaggctccctaacacacacagcggggaagctgggccgagtaccttaatctgccataaagccattcttactcgggcgacccctttaagtttagaaataattgaaaggaaatgtttgagttttcaaagatcccgtgaaattgatgccagtggaatacagtgagtcctcctcttcctcctcctcctcttccccctccccttcctcctcctcctcttcttttccctcctcttcctcttcctcctgctctcctttcctccccctcctcttttccctcctcttcctcttcctcctgctctcctttcctccccctcctctttctcctcctcctcctcttcttccccctcctctccctcctcctcttcttccccctcctctccctcctcctcttcttctccctcctcttcctcttcctcctcttccacgtgctctcctttcctccccctcctcttgctccccttcttccccgtcctcttcctcctcctcctcttcttctccctcctcttcctcctcctctttcttcctgacctctttctttctcctcctcctccttctacctccccttctcatccctcctcttcctcttctctagctgcacacttcactactgcacatcttataacttgcacccctttcttctgaggaagagaacatcttgcaaggcagggcgagcagcggcagggctggcttaggagcagtgcaagagtccctgtgctccagttccacactgctggcagggaaggcaaggggggacgggcctggatctgggggtgagggagaaagatggacccctgggtgaccactaaaccaaagatattcggaactttctatttaggatgtggacgtaattcctgttccgaggtagaggctgtgctgaagacaagcacagtggcctggtgcgccttggaaaccaacaactattcacgagccagtatgaccttcacatctttagaaattatgaaaacgtatgtgattggagggtttggaaaaccagttatcttatttaacattttaaaaattacctaacagttatttacaaacaggtctgtgcatcccaggtctgtcttcttttcaaggtctgggccttgtgctcgggttatgtttgtgggaaatgcttaataaatactgataatatgggaagagatgaaaactgattctcctcactttgtttcaaacctttctggcagtgggatgattcgaattcacttttaaaattaaattagcgtgttttgttttgttttgtttttgtttttgtttgagagggtctcattctgtcgttcctgggttcctctttttttcagggattctcctacctcagcctcctgagtagctgggattacaggcttacaccaccacgcccggctaatttttgtatttttagtagagacagggtttcgccatgatggccaggctgatcagggtctatttttttcggtactaatcaggaaaaatcaggtaattaagaaatagtgcacttgagttttgagttggagcaccctgtgaggggatgaatatccagttttgttttatttttaatttaagaatatcttctcatgatgactttctcgggtaatatagtctagagcgtgggagacagctcggagtactgctggccaatactgcttcctggcagagccaagcgccgcccacctgacgcctcagtgctgcgggtggtgagacccgtcgctggctcccaccatggtcaggtctcctctttcctcccaaagctgaggacgcaggcgaggccgttttctgtgacccttccaaaagaagcgttgttttggatgagtctctgtccccggaggccgagggccaaaagtgtcttatgttagaggcaaagatgcccggatttagagggcttccaacccctaggaccactttgctcttccctgcaggaagctctcagatgggcgccttagcccggtggtgcacccgacggccctccccggcgctccctgtgttcagtaccagtacctcactcccaggcgtcgctgcttttcttttactttttgcaaagatagacgctgtttgttgttgccgttttgttttgttttgttttactggagagagatatcgagtccctcgggataaaattaagtcccttggatcagaaaggggaacttgcgcatccttgagagtgctctttccttgcggttctccacacccgcctgggctctggggtggggcaaatctgcgctcgcatccttggtccctcaaatattggcccagcccgaagtcctgataaaatgattcgaactctcagtgactcagtttcttcatccagaaagtggaggcaaatactacttcatggagttgctgtgaggtttaaaccaagaaatacctgtaaaatgctaattcggcatctaggaatccctccacaaacagtagctattgttttaggctgtcatcgtcgtcgtcgtcagaggcaatcgggagctgctgttgtggagtttctaaagtcccccaccagtcccccggcagcccctcccctctggcaaacccccacactgtcgctgttgatatgagttttattcctctacccactcatctttcccgaacactgcctagtttcaggatgcccttcctcataaataaactccctaggttttccacagcaaacttcaccaggcaaagaactgcagctccgccgaccagttagttggtggaggcgcagaaacttgtcctcggaccccacgcagaagccgccgccctctccaaggctccggccccgacttcgctctgcgaattgggccagccgctgcttttccgcgagacccgagggttcgccaaggagaggagaagaggcacaggctgcctgagactggtcttcgggcagccgagggcgcgggatgactcgggcaggcgtgtggcctccgactgaccagggttgggcccgggatcagagctttgcttggaagttctctgggtggcagagactcgggcaaccggagcctgagcctcccgcggggaagagctcggactccggaggtcgcgccgccttgggcttgaattcagtccttccttactactcgtggctttgcttacatcatttaactctccatttccttgtctatacagtgggctcataaggaggcggtaaggagatgatgatgtctttgaagagtttaggacaggacctggtgtctcccgtacgcttggtgggggtggcggaggtgatgcgttgttaacaggagaaaccgaccttccagggaggcccagggaggcagcggagagcgaagtcctgctcggcggagagacctcgaggagagtatggggaaaggaatgaatgctgcggagcgcccctctgggctccacccaagcctcggaggcgggacggtgggctccgtcccgaccccttaggcagctggaccgatacctcctggatcagaccccacaggaagactcgcgtggggcccgatatgtgtacttcaaactctgagcggccaccctcagccaactggccagtggatgcgaatcgtgggccctgaggggcgagggcgctcggaactgcatgcctgtgcacggtgccgggctctccagagtgagggggccgtaaggagatctccaaggaagccgaaaaaagcagccagttgggcttcgggaaagacttttctgcaaaggaagtgatctggtcccagaactccagggttgaccccagtacctgacttctccgggagctgtcagctctcctctgttcttcgggcttggcgcgctcctttcataatggacagacaccagtggccttcaaaaggtctggggtgggggaacggaggaagtggccttgggtgcagaggaagagcagagctcctgccaaagctgaacgcagttagccctacccaagtgcgcgctggctcggcatatgcgctccagagccggcaggacagcccggccctgctcaccccgaggagaaatccaacagcgcagcctcctgcacctccttgccccagagaccgtccgagctggagccacaagccctccattcctcttggaatcttcaaccccaaggtaaggtaagttcaccgagcaccgcccagcgatgcgcaggatccgggggggatcacgcgcggcgaccctaccgagcgctccgtgcgcgcccccatctctcggatcgtgttcctggctctgtcgaagctgctgagtcccgcgattcgggaaatccggcacttgtttctcaccctacaccatcacgtggaaatcattgaaaatgggaaccctggtggagtatctgggagagcacgcttgtgccgaggggcctgagctatgggacttcctccaggtccctctgtttcctgccggcgtaggggactcgtagtgtcggatcgcatagtgccaaaaaatagtgcatgggaaacaaacaaaaacacctctcattttcttccgcaatatagtttttcctgtaggtgggctaacatagtacctgaagaagttctcaccttgaagagctaaatccataccatacaatatctgagagttggtgatgatttcgggtcatgcatattgtttttaacagggatgatgtccataaataacttgctcttcgctccagtactggggcgtgaacgcattcagcaacatatgttggattcctgctttgctgcggcacgcaggaagcctcacagtgcttgccctggaagcactcacagtttttacaagacaaatcacatcttcccacttgatggtcaataccgtcatggagattgaattgattatcagtgactgaatttaccagagtaaacagaagtcactatgattccccaaaatgaatgctccttttgaacaagggcatttcatttcttaattttggcctccttagtctagcactgccaccctctccatatcctctccttcaaccagttcagttcaatgcatttaagtttgactgaaatttaagtattgtactttccttttcaaattggtgaatctacctgttctattttcatctccccaccacccattctctgtctcattctctctctctctctctctctttctctctctctctgtctgctctctctctctctctctgtaggtgtggtttgtgtctgagggtgagtctccccatctttgtgtttctgaggatgcctgtgtaacctatgtgcctatgtgtgtttgtgtgcatgggtttagggtggtcttattgggttgccatagtgataatgatcagctgtgtctagggaccaaggaaaccttcctatatactttttgttttatgtgtgtatttatttacttgtttatttttgcgacggagtcttactctgccgctcaggctggagtgcagtggcacgatctcgggttactacaacctccacctcccaggttcaagtgattctcctgcctcagctccccgggtagctgggattacaggcaccagcctccatgcctggtgaatttttgtattttagtacagatggggttttgacacattggccaggctggtcttgaactcctgacctcaagtgatccacccactttggcctcccaaagtgcttggattacagcacagccatctcacaggtgtctgatggcattgctgatgatgaaaactgtccgctcaggttactgtctcaattctttgaattggcacaacgttagaaggcaagaagtgctgtctttagaataacacaaagttgaaactttggtagaagctgacagattgctaaagtactaccataaggaactttaaaatcttctctgtctaaaaaagaagttcacaactaaggtatttcatgacttcaacaaatttacctataaagcctcctgaaaattaagtagttacaaatgtcagaagaaggaaattctgagttgatattgaatcaagctttactccaacccagctctaacaggctagatgtgggaacaataaacctaatgggaaactgaggcagggcagcaggaagcagaaggcctccttgcaaaagaaatgggaatgatgcatcctcttatctggcagccagccatcaagaaattgcttcccatggtcagcttgagcagtgggaagagactggcaggaaacactgggtaggaaggggaggtcaaggtctgcagataatagcagctaaaaataggtgatttcagagtgaaagtggctggctgaaagggatgaggctcataggttacctagtgataacctgtcaatgccagattcccatattaaagtatggtatatttacacatctgtaagatggaatgcacatgataaaattatattccttccaggtgcggtggctcatgcctgtaatcccagcactttgggaggccaaggcgggcagatcacctgaggtcgggagttcgagaccaacctgaccaacacggagaaactctgtgtctactaaaaatacaaaattagccaggtgtggtggtgcatgcatgtaatcccagctactcatgaggctgaggcagaagaatcgcttgaacctgggaggcacaggtttcagtgagccgagattgtgccattgcactccagcctgggctacaagagtgaaactctgcctcaaaaaaaaaaaaaaaaatcatagtcctgatgtttcattaaaattatttcctctgtaaatgagatcccatggcttttgaaagcataaatagctctaactttaagcagtattctatcattcaacttcaagttgaacaccttggagtccttccctgaacatagagcatatagaaaccttaaatatatgccatatcatcagcacgcattcaagattcttgtctacattgtggaatactctgaaatctcacttctaatgataattacacatctaaaaagcgtaaagaacctgatctgatcatcacacataatatggagtaaaacatcactatgtaccccatgtatatgtacaagtaatacttgtcaatttaaaaaaatttatgtgtaacaatatttttgctgctaattatttacatcattgaataaattctatctctcctctttcagaattctcaatgagcctgatttccaaaaggtatgacattttgaaagtaatttctcttatttacatatgctcttagaaaattcagaagtcccacacttctaaatctgtctggaaatactgctgatttgaaatcgacatattacatggaattatttccacttcatagttctagaaacaaacaaaaaaaaatgtacaaaataaggccgggcactgtggctcatgcctataatctcagcactttgggaggccgaggtgggtggatcacaaggtcaggagtttgagaccagcctggccaatatggtgaaacccggaaaccccgtctctactaaaaatacaaaaattagccaggcctagtggcaggtgcctatagtcccagctacttgggaggctgaggcaggagaatcacttgaacctgggaggcagaggttgcagtgagccaagatcacatcactgcactccagcctgggccacagattgagattctgtctcaaaaaacaaaaacaaaagtacaaaatagagttgggcaaggtggctcatgcctgtaatcctagcactttgaaaggctgaggagagaggattgcttgagcctaggagtttaggactatgattgtagtgagctatgattgtgccaatacactccagcttgggtgacagagcaataccttgtctctaaataaagcatttttaaatgttcaaaataatctctaagaaataaacaattggccagcagggtggctaatgcctgtaatcccagcactttgggaggccgaggtgggcggatcacttgaggtcaggagtttgggaccagcctgagcaacatggtgaaaccctgtctccactaaaaacacaaaaattagtcaggcgtggtggcgagcacctgtagtccctgctagcagggaggctgaggcaggagaattgcttgaacccggagaggttgcagtgagccgagatcgcaccactgcactccagcctgggcaacaagagccacactccatctcaaaaaataataaatacatacataaataaataaatataaaatattatataattggatttattgcaatcaatgaacatgtggtttatttttatttaatattgaaagactacgtttctaggccagaaggacaggagagtggataatttctcctgtggatgattgggcctttccacagaaacacaaacagagattgtataaagcacaaggcattattcatgctaccctttgtcctccagtccagtggaggagaaaaggaacaatccctggccaaatgtgcaaattgaaagtgctgtttttcactaccttgggcagggtttagcttccggttttgtgttccctatttactgcccttctgaactagggcaaataacttgatccatttgagcttgtctactcccctgtgaattagggataatcccatctcatgtgactattgtgagagttaagtaagataaggtatgtgaagagcacatacttgggtgagtggaaacctttatttttatttattaggtacaaggtctcactctgttgcccaggcttgagtgcagtggtgtggtcctatcatctcactgtagcctcaaaccctgggctcaaagcaatcttcccacctcagccccacaagtagctgagactacaggccagtaccaccaagcccagctttttacattttttttttagacatagggatcttgctaagttacccaggctagtctcaaactcctgggcttgagcaatccccttgccttagcctcctgtggctgggattgcaggtgacagccacctcacctggctgagtgccacctcacctggctgagtggagccctttagaaggatgtggtttttccagaagctgaggtctttcttgccctactaaatcacagacagctctttgctcaatggacctcagggaaggcaacaactgccacaccaattgaatgtatgcccttttccctggagccctggagtcctccctcagatggggacagctaggtcttgtcctggctcttcacaagagaatttctggactgcaaagtcacattgaagttgaccaggtaggagcaaaaataagctaccactgtataaagcagagaggcaaaagccagctgtactgactgaagtcacacgtcaaacagcattgatacccacatgcaactagctttacttgtaaggcacaagcatttcagccaatttaaggatagtctgatgaccaaagatagaaagtctcttgacaaactagaatttttttaaggatctctaggcctccgctcaaagaataggagattgttctaagaccttcttaataagtcatttccctagatgttactatattgattagtattaatacatatttatatatagatgtattatgtataatatatatttatataatacatattattataaataatatatattgatgcatattgacatgattaatacatatttatatataaatgtattatgtataatatatatttatataatacatattattatacgtaatatatattgatactaatcaatatagtaacatctagggaaatgacttattaagaaggtcttggaactgtctcctattctttgaggaggggctagagatccctaaaaattcctactatgtattatacataatacatataatatgtaatattctattgtgtattatatatattatatataatatattatatattatgtattgtatataatatattatgtattatatattatatgtattatgtattatatatgtattatatataatgtattatgtgttatatattatgtattatatatattatatgtgtaatatatatttatgtatatatatttatatataaatgcattatgtataatatatatttatataatacatattatacaaaatatatagatacatattgatatgattaatacatatttatatataaatgtattatgtataatatatttatataatacatattattatacataatatatattgatactaatcaatatagtaacatctaaggaaatgacttactaagaaggtcttggaacaatctcctattctttgagggggggtctagataatatgttatatattttgtattatatataatacataatatgttatatattatgtattatatataatacataatatgttatatattatgtataatatattatatattatgtattatatataatacataatatattatgtattatgtataatatattatatgtgtaatatatttatgtatatataatacatatattatatattatatattatatgtataatatattataagtataatatatattatatgtataatttatgtataatatatattatacataaatatgtataatatatattatacataaatatgtataatatatatgtaattatatatattatatgtatattatattatatatatgtatattatatgtaattatatatattatatatgcatataatatatgtgtaattatataatattatgtaaatatatattacacataaatatatattatacataaatatatattatacatataatatatattatacataattatgtataatatatattatatgtataatatatattatatattttcaaaaagtaggttgcaactgattagtcaataaagtcaagttagccaggctcggtggttcacacctgtaatcccagcactttgggaggccgaggcacttaaggtcaggagttcgagaccagcctggccaacatggtgaaaccccgtctccacaaaaaatacgaaaaaaattacccgggcgtagtggcgcgcccctgtaatcccagatactcaggaggcagagacaggagaatcgcttgaaaccaggaggtgaaggttgcagtgagccaagatcactccagcctgggcaactccatctcaaaaaaaaaaaaaaaagtccatttagtgggttgttaccagatttttattttatatatatatatatttattgtatataaaaaatatatatgtggaacccaagaggttttgacatttgattctgccatccctaagtgttgtggacctccctagtcccttagagcactccagccaatacacttactttctcagcagcaggggaaaagagacaaatcagaaggatatgcatctatggtagacagaataatggtccctgaaaagttgaaaggtgtctacattgcaattcctgaaacctgtgtctatgttcccttacagggcaaaagggatttttagagatataattagattaggtacttaaaataaacagattattctagattatccttgtgggcccaatctaatcatacaagtccttgaaagcaaataactttctctagctagaattcaagagctacagcagaaagaaaagttgaagagattccaaatatgaggaggctttactgagccattgctgcctctgagatgagggagtccattgacaaggacccaagagaggctggtaagggctaacgaccacccccaggcgacagacagcaaggaaactgggggcagccacaaggacgtggcctctccaacactggaccagagaaactgctgagccaagggggactttgacagacagaaacagtgaaataataaatttaataaccctagaagaaaacctaggcaataccattcaagacataggcatgacaaggacttcatgactaaaacaccaaaagcaatggcaacaaaacccaaaatagacaaatgggatctaattaaactaaagagcttctgcacagcaaaagaaactaccatcagagtgaaaaggcaacctacagaatgggagaaaatttttgcaatctacttatctgacaaagggctaatatccagaatctacaaaggacttaaacaaatttacaagaaaaaaactaacaaccccatcaaaaagtgggcaaaggatatgaacagacaattctcaaaagaagacatttatgcagccaacacacacttgaaaaaatgctcatcataactggtcatcagagaaatgcaaaccaaaaccacaatgagataccatctcacgccagttagaatggcgatcattaaaaagtcaggaaacaacagatgctggagaggatgtggataaataggaacgtttttacactgttggtgggactgtaaattagttcacccattgcggaagacagtgtggccattcctcaaggatctagaactagaaataccatttgactcaactggggtattactgggtatatacccagaggattataaataatgctactataaagacacatgtacacgtatgtttattgcagcactattcacaatagcaaagacttggaaccaacccaaatgtccatcaatgatagactggattaagaaaatgtggcacatatacacaatggaatactatgcagccataaaaaaggatgagttcatgtcctttgccgggacatggatgaaactggaaaccatcattctcagcaaactatcacaaggacagaaaaccaaacactatatgttctcactcataggtgggaattgaagaatgagaacacttggacacagtgtggggaacatcacatactggggcctgtaggggggtgggggggctgggggagggacagcattaggagaagtatctaatgtaaatgacaagttgacgggtgcagcaaaccaacatggcacatgtatacctatgtaacaaacctgcatattgtgcacatgtaccctagaacttaaagtataataataaaataaaaacgaaaaaaataaatttcatgttgtgtttagctgctgcatttgtggtgattcgtaattgcagcaattgaaaatgaatatagtttcctttacttgaatgacacttttggagttacacgatgcctgcttacacctcattcacagaacttagctgcatgaaagcatctagctacacagcaggtgggaaaatgtagcctttattctggacaaccagttgtctaatgaaaaatgggaggaagtacatcactaaaaagggaagtgtccagtggatactggggacaactagcagcctccatgacagttaccaaggatctatataaaaaattgtcctaataggcagggcgtggcggctcacgcctgtaatcccagcactttgggaggccaaagcaggcagatcacttgaggtcagaaattcgaggccagcctggccaacatggtgaacccccatctctactaaaaatacaaaattagccgggcgtggtggcacatgcctgtaatcccaactacttgggaggctgaggcgggagaatcacttgaacccagaaggcagaggttacgatgagccgagatcacgccattacactccagcctgggtgacagagcaggactccatcttaaaagaaaaaaaaaattgttataataatctggtgttttctgaaaagccacagatgaaaacaatactcattattatacaacagccatatatgaagcccatgtcctggaatttaattctagaaggaagtttgttcagacaaacttgtgtgctttcatcaaacgatgtacatgatacaacatccagtgttagccttttctatcagacaactctgaactaaagttagtattcaattaacactcaactatgtgtctcatcctagcataggctattgaggaaggccgagattttcaatcagaaacattggcttccagttctgcattgaccatttatgccccttctgaactagggcaaatgacttagtgtctttgacagtctatttttcttattagtcaattgggagaaatatcaacctcataggactgttatgagggttaaataaggtatgtgaaagatactttttgagatgaaaaagagccctatacatgtatttatagaattaaaacatataacatttatacatttatatgaaatgtataaaacattggatcttcccttcctctaagtcagtgtttttcgaacagtaggttgcaactgattagtcaatgaagtcaacttagtgggttattaccagatttttttaagttagataaaatataatagaaaatatcagagtgcattatgcacagcgaggataaagattgcttcatgtaactttttttagttatacatgcatatgcctaacagatcaaaatacaaaatatattttgactttgtaactttgttagaaagttttgaaaacactgctttaaaaacactgcttggaatggtgtgatcttcattttatctgtgttaaacatttggttttttgttttgtttttagcgctctattcatcatgtgcttttattagaaaccaactcacatctattttggagagagaaagttgagctaggagagagagagactgagggccagggtaaaactcatgttaaatgcttttcaaacaagatataattgttaaacttttatttatttatttatttatttttttttttgagacagaatctcactgtcgcctaggccggagtgcagtggtgcaatctcagctcactgcagcctctgcctcccgggttcaagcgattctcctgcctcagcctcccgaatagttgggactacaggcacacgccactgcgccaggctaattttctgtattttcagtagagatggggtttcaccgtgttagccaggatggtctcaatcttctgacctcgtgatctgcccgcctcggcctcccaaagtgctggattacaggcatgagccaccgcgcccaacctaattgttaaactcttaatctcagcctcagagtcagtcttccactctttgtgatgctggaagtgggctgaggcgctgaaaatgacattctcctttggcaacgggctattggtcaggctctgctactcagcacgggccaggagggaggcttcaaggtgcaaggccagtggaagaacttgcttcttcctttctgcttccagttcgcttcagttgcgagccaggccgtgtttctcccggtagtggcaatttattccattagcagcagtttattctggtttgcagtttcttccgaatcggcaccacctcaaagatatcaacaccagttggccagcaaccccttctcagcggtgtgagtcccagctctgtggagcccctccttcaagcttctacattttcatatttacaacctctttattttgttgcctcagccctgggggctggtagctgcattttgcaatcactccctgatgccttagtacaagcttgtccaatccctggccgtggccacatgtggcccaggacagctttggatgtggcccaatacaaattcgtaactttcttataacattatgagatttttttgcaattttcttttttaattcatcagcttcattagtgttagtgtgttttatgtgtggcccaggacaattattcttcttccaatggggcccagggaagtcaaaagattggacacccctgccttagtgcctctgactggaagggcctaccagcttatacttcctatgtttgcctgcctgccttttttttcttctgtcttgccttctcttaaaatgtactgagtggagagccgcagtggctcaggcctgttgtcctggtgcataaggaggcgaggctaggcgttccaggccagcctgggcaacatagaaacctctcatctatgtaacaaaaaaataataataataaaatgtactgagtaactgtactaggatctggactgggctctgggtcctctgtaaagtctgtgagcacacaaccatggaaccaatgagtttcatgttctctgtgaaacttcccaaacatcccaagtacccctctgtggtgtctaccttctaagatggcccccaataaattgtgccttttggtttccacacctttatgtcctcccctcccacaatgaatctgggctgagcctgtgactcactttaaccagtaaactgcagcaaaactgatgctgtgccccttccgggcctaacatcttttttttctttttttgacacaaggtctcattctgttgcccaggctagagtgcagcggtgcaatcacagttcgctgaagccttgacctccctggctcaagtgatcctcctatgtcagcctcccaagtagctgggaacacaggcacacaccaacatgcccagctaatttttttttttctttttttgttgagacaggttctcactatgttgcctagactggtctcaaactcctgagctcaagcaatccacctgccttggcctttcaaagtgctggcattacaggcatgagtcactatgcccagcctgagcctaaaatcaaagaaggcctcatatcttccacatttgtgctttgggaatcctggaccaccacgttaaaataataaaaaaacccagctgcctcgctggagagactatatcacgatgtcctcacaggaagatactgcatggagaaaagaaaccctgagaacacctgagaagagaggcccaggcatcccagcatctcatcccagcatctcatcccagctctagccatcatctgactgcaattatatgaagccagcaaaggaactgcccagctgaacccagttaatctacaaaatgtgagagataattaacccctaagttttggaggtggtttgctatgcagtaacagataattgaaatgccccttccctgttctatgttcttactctttaatcccataacaccttgtccctttgtacctctatcatattcttactcaagttgcattgtctgtctcccctaagagatggcaagtttctaaagggtggtgattgcatctttatttattttatcagaaaaagttcagtaaagaaaacagaaaccactcaaggcatttcaagcaaaaggagattaggtattcacaagattattgaaaggcacagcacgaggcttttggcttcaaggtcatatcaccatggttgtaatgcataggtctaaaaactgctgctactaccacagctctgccctatatccaagaaaatgatgtccggacagtggaatgtggatttggccatgcaaatacatctgccagaaccagccagccactatgacaagaacaatgacttctgtcttctttctgtcctccagatatttcatgaattcatctaattgacagaaccttcattgcacctagaagtcttgtgctaaaaggtctggaaaagccaggcttggcagcatacaccagtagttccagctactcaggaggttgaggcaggaggataactggaatccaggagtttgaggccatagtgagctatgatcacaccactacacttcagcctgggcaacataggaagaacttgtctcaaaaaaagaaaagaaagaaagaaaccttccagaaactatagctttcagcattccagttaattctatacaggggagaatatagatggagtgagaaatggatgataagggccgattaacagcatgtagtgcatttctgaatccctagccctaacacaagctctgataagtaggaagtctgataggcctgttgaatgaattgatgaatgtacaaattaatttgttatccatcaggtagtgtagcatgcaattatagtcccctcctatcctagatgctaggaagacaaaggtgaataaatggtatttccaaaaagcaaaatccaggggtagagctgagttgtgagagcagtgggatacaagtatgaattttgtaagattctcagtgttatctgtggagcccttgtctttcactctctcatgaaagtaaataggcaaatacagaatccatctcagatgttaaccttttcaacatgttttgcaaatgtaagttgtttctccaggaaataataaggctgcttttccaaggtcagccctgtagctgagtcaagaaagcattcctaaagcatatgtaaagaaaagaactcagacacagtctacacgcttgagaatagacacaactaaggccatcttgacaggtaaattctatggcttccccttgctattcacacatactatttattttcccagctattacttaaagcaccacatagctctcaatcctcagtgatgagaaaaagtggaatagagaccagaaataggaactcgagagtccagtgttctttacttaggccagcaattaacttgtaaaggctgtcacaatctcattttcagctgtattagttttgccatttacaaaatacaggcattatgtaaataaccaaacaatgctgataaagtgctgagtcctcatcactacagttatccctgtctgctctgtactaaatctatgacaggatttgtgtaattatagggtgtgttccccttgctaagcatatctcccacacaatccatttagccactcataaaccaaacactaggatttttttaaaaaagaaattagttgatcttgctagggttagtggaatgttttttatttgtttccattcctattgttgagatttggtgctttttcaaacagttgcttatagtttaaaaaaaaaaaaagactagacaaagctacaaccaagcattaatagtagtagtgaactctggggagtccgactggctgttccttttattttactttatgtgctgcattgtttgtatttttcacaatgggaatgtattgattttaaaattaaaaataaactttgtggcctggcgtggtggctcacgcctgtaatcccagcactttgggaggccgaggcgggtggatcacgaggtcaggagatcgagaccatccaggcaaacacggtgaaaccccgtctctactaaaaaatacaaaaaattagccgtgcacggtggtgggcacctatagtcccagctactcgggaggctgagacaggagaatggcgtgaacctgggaggcggagcttgcagtgagcaaagatcgcgctactgcactccagcctgggcgacagagtgagactccgtctcaaaaataaataaataaataaaaagcaaactttgtaaatattaccaatgattaactttgagtagagggattacagatgattttttttattatttgaatatttatattgagaaaaataaccattatttaaaagaacatcgactacattgttgacactttttctgcagaaagtgcaacaagtgtatcaagtgacacgtaggcagtagaagacaacaggatacagaagaggttttcacag

SEQ ID NO: 16 - DNA, 8640 bp, Artificial sequence
  PDX1 upstream regulatory sequence from the recombinant BAC
caggcaagggttgtttaagttactagataacaaagttgttattgattctagtatttttactcttcctgattccctgcagtccaaagggagtttgtcagaccaggagtgatttttattaaaaaaaaaaaaaaaagagtagttgctattgttgtaactggcctcattgtgacagatgggatcctagtgttttctcgctgccctttactcaggagctaggagaacagaaagcaaataaccaagaaaccaacacactcagtaatctggatttctcagagttgagccacagcacttggaaatcaaatattggctcctcctgaacgccccttttagcctggtgttgttaaccagtttaacattcccttatcacatgctcatgtgggcagaattaaatggaattagctgcaaattatataaaattcatttacctttaaaggaagctatttggtcatgttcagtgtagacagagcattgcattaagacacaagttaatggtactgcctggagatgaatcaatttgctttggttttattacctccctttatttgttcttatgtggtagctactgtgactggaaatgctcagctcaggttcacagagcccatgtcagagccacattaacatctcaaggagagtcccactctttctaaagagctcagtccaagtaaacacagtagcaaagtaagatcatgctgatcctcccttaatacttagtcacaaagaatggatgctgaacaaggtggcttatgcctgtaatcctagcactttaggaggcctaggtgggaggatcgcttgaggccaggagttcaagaccagcccggacaacatagcaagaccttgcctttacaaaaaaaaaagaaaaaagaaaaagttagccgggcatggtggagcatgcctgtagtcccagctactccaaaggccgaggagaaaagattgtttgagcccaggaggttgaggctgtagtgaggtaagattgtgccactgcactccagcctgggtgacagagggaaaccctgtctcaattaagaagataaataaattttaaaatgggtgatgtctaagagagaaaggcaaacctatgagaatgttgaggattgataagcatcttgtccatataggggttcaaataacatctattgaacttctgctttctgcactgacttaggcatttttctaagatttcttcatttcgacctcaccacaacctcatgatgcacaggtatatttttatttgaaagtgcatgcttcatgagttctttaagagagtatataaatctctatataacaaataaattatgcttgaggtgtctattgttgttctcaatttataatgttgataagaatgactgtgggcaggcgcagtggctcacgcctataatctcagcactttgggaggccagcgtggacagatcaagagatcaggagttcaataccagcctggccaacatagtgaaaccccatctctactaaaaatacaaaaaaattagccaggcatggtggcatgtgcctgtagtcccagctacttgggaggctgaagcaggagaattgcttgaacccagcaggtggaggttgcagtgagccgagattgggccactgcaccccagcttaggcaacagagtgagactttgtctcaacaacaacaacaaaaaaaaaaacaaaaaaaagaatgactgtgtacatgtttaaaatgcagactccccagtctcactcacccccatatcgttattcagaaggtctggggttgggctcagatattttcattttataagcatcccagtgattcttgatatacacagttcatgagtcacacttccaggaacacttccctataaatccatgttacttcattgattagtaagagtttgtatttttctgagatttgcctgaaggtaaatgtgttgcaatatgtaactggagaaaatataaaaaataaatgtatccaaatactgtgtctctgttcacaacaatacactcctaagagatatctaccacaggaagaattcctaattggcaaatatgataaagttgagaccacagtcagttagccttttactttaatctttgcaagagaggctgtggacctagcctaggctgtcaaaagagaaggcttcacttgtgctgctctgagtttagcattgactctcccatcttaaccccatcgatttctaattttaacgtggatttgatttggggggacacacagaggaatcactttgacggcagtgttcctgcaccctcacaaagacaaccagggttgaccatgaccgtttttctgatgtggaaaaagcaggaatggggcaggattccagctctgctctggcctagagactagaatgactcctttccctccctagacattttaaggtttcctctgagtttatgatgacagcttcatctccaacccacgaaagcaagaaccacagacaatgctagtgggggtgctctctggccagaacacactacttagatgctgggttccacacctactgggatagctaaggcattttgagttgtgattagttcacctgctcaagtctttattttggctttcctggctgtgaaaaagaaggccctgccccttctccacacctgtggggtctctctgtggtgtgctgatggcggacatgagagttctccagcaatccacctcctccagcccttttaagcaggactgtacctgggggcacattcccctaaaacactgagtaatatacctactaagtacttcctcccagtgttcctgaatatacctttccaggtctacccatctggaaatatctttagacatcagctcatggtgatagtctgtcattcttctggatgcagtaatagccaatagttcaatgtttatatgcacattaaaagcaatgctgggggagaaaggaagagatgaccatttattgaatgctttcaaagtgccaaaaacattagatgttttgtctcattaaatcctcacaaaaacaataaaaaatattttttgagtgcctactatatagtaagatagtacagtgtcacagccaacagaatggattttaaggccacatcaaggccaggtgtggtggctcatgcttgtaatcccagcactttgggaggccgaggtgggcagataacttgaagtcaggacttcgagaccagcctggccaacaggaaaaaccctgtctctactaacaatacaaaaattagccgggcatggtggtgcgtgcctgtaatcccagctactagagaggctaaggcaggagaatcgcttgaaccccagaggcagaggttgcggtgagccgagatcatgccactgcactccagcctaggcgacagagcaagactcagtctcaaaaaaaaaaaacaaaaaacaaaaaaccaggcatggtggcctgtaatcccagtactttgggaggccaaggtgggtggatagtctgaggtcaggagttcgagaccagcctgaccaacatggtgaaacccgtctctactaaaaatacaaaattagccaggcatggtggcacatgtctgtaatcccagctacttgggagtctgaggctggagtatcgcttgaacccaggaggtggaggttgcggtaagccaagatcatgccatggcactctggcctgggcgacagagcaaaactctatctggaaaaaaaaaaaaaaaaaagccacatcatctctgcttggatctaggctctgccacttactagctatataattctaggcaagtaacttaccatcactgggcctcaatttcctccactggaaaatgggataacagtaattggctcatggggttaacattggaaaatatttaaacaacgcctggctccatgcatttgccattacgattactatgtgcaacggggccagcttatggaacagtgctagtatttccattttacaaataagggcagggaagcttagtgaagtcatgtaacttggcaagggacacacagcttgtgcagggcagagcctgatgtggaggacaggtgtatgcagctcctgacctttctatggcccgccaaagccagcgcatatttctaccaatgagttttggttactcaaagagtgtgcaggcaggtgcacagtgagagatctacaggcatttgatcagtatatgttaccgaaaatctgggtccttcaaagcataaaccatgtgaaatgtaggatggttgaggaaggaagctggagggtagtgtgggtcaagccttctttaggctgcagcaggaacctggaggtaaggagaggctcctaggagaacaaaggattagtcataggaaatggtggtgggaggaggaggtggaaggcaaagaaaaggaactgtgtggaagcaaggagctggttacctaggactaagctcagaagggaagcagcagggatttctggagactgcacatctggaaggtagaaccagagatgagacaaccaaaggggtgagtccagagctgtagggggtgagccaccgggaacaccaggagtggggagcaacagctgacctcagatcctttggagcctgaaagtcctttcatacttttcctttcatcagcagagtgaactgaggaccacggaaggattaaaccaaaagtggaaagagctcgtgcctgggggccccactcccagggaggaagcgttgagcagtggctggaggaagcagcagacagttctggggcacacggagtcccccctcctgcccttctactcctcttacaccagagagagctaacaaggtagggaataagacaattacccaattcaattcggtttttaagctgcttttatctttacagttcagggatcactgaatcatctggaaaataatttcagctctctgcttattttcactagattgcttagccctaggaatattggaaaacccttcattcaaagtctgaggtcctttcctctctccaatccccacaacccaagctgggtttccctggcccctctcagacctggataccaaattctgggtatttatttatatatatatatatatttttaattttttgagacggagcctcgctctgtctcccaggctggagggcagtggcgcgatctcggatcactgcaagctccgcctcctgggttcacgccattctccttcctcagcctcccaagtagctggaactacaggcgcccgccaccacgcccggctaaatttttttgtaggtttagtagagacggggtttcatcatgttagccaggatggtctcgatctcctgacctcatgatccgcctgtctcagcctcccaaagtgctgggattacaggcgtgagccaccgccctcggccaattctgggtattcataaaccagcaggagggaaacattgattcgacttaggaaaatgaaaacctgcctgcattagtgctcattgaaggaaatgctaatgaactaaagtgcaatcaattatagaagtattctcattccacacatcacatcgtttgctttacagaattttccaactcaagaaacaatttttattttcaacagagatttaattataaaatgaatataaattccacgtgcattcatgatgtataccttggagttaagtgggattcatctgtttttttcatttataatgggatgcagtggcttaaaaatcctatcaccaagccaaattcagcccttagcatgcctctgaaaccaccgaggaagacttagccacttaccaagaacaaggtaacctgtgttctcccgggtgtaaaccgcgtctctgtgaagggaaagggggaagagggccggcaaggacctccagtatcagcgaggactatcaggacgtccagctaataaacgactttttcactgtccacactttaattggtttacagccttttttgtttatttatccataagagctgctgttaaatggctcgggaaggtgctcgcctaatggctcggtatcgctgccgggcctgttgtgggcgaggcggcttggagggggcgcaggcgtcagcggggattcagagcggaaacgcatttcgcctgtaatggactcggcgattttacgataccaggagctagatccacggggaagtacaacacacgaccttactaagcggagggttccgcttgatgcgttttttatacggctgtacgtgataaaattccagataactttgtttcatctaataataataataacaataataaatggttgtttgacctttgctccctgggtcccttctataggtcgcaggcagcagaaaatgctaattgtgaaagtgagaacgcgcctccatggaatacccccggcgatcccctcctcctcccccacagccgcgggtacccgggtttttgccggcgaccgcaaccggcggatttgctttctgctgagagcctcttttctttctgcagggccgagcaaaaatattaaatggaagcaaatgaagcatcgaaatggagaccaatttacagaaatgtgcaattagttgagaagtgcaaagtaaacactccgggggtggcaggcgaggcagggagcaggggagggagagtggggcgcagactgagtccagagtgggtgtaggggtgcccagggaggaggggaagggggaggaaaaggagggggaggggaaaagtggccgatctttgtcctgagcggagcttgccgtccgctcataaccgcgtcgccaagtcaaccctcggcgactcggcagattatctccaagggtcaacacgccgcggccaggcaaccccctccagcctgccctcctgatcgatgtggtcactcgcggccagggtgatagggtagagttctccgcggccgcagacaatggactcattgacgcgggcgcacagagattaggtgcccgggccccacggcctttcactctctgcccccaccaaaactgcaggtggcacttttccctgaagaaatcaccgaaactctccccgcccgccgccgtgcttcccttggcctgtcttcggtgacagcaagggcatctacaagccagggagccacacatcagagccacacacatgaggccacaggccaggaagccacacacatgagttctcacacatcgaagcaaatgctgagactataccggcctcccgcaagagaaggaatctgcagagaagtccacattcccgactggcttttttgtcttttaataaaaataaagagtcctcagaatagagcactcaatccgcacttaaaacacaaatatttccagtaggaagaaagaaatacattaagattgactctcaaaggtctggatgttggtgcgttgtttaggaaaggcggagcagtgatttttctctggcttggttctttgtggttcaagctctctcttgctgagacgtttctgcaaagctgtctagtttttctaaaacccacggtggcgtttcgagaaacgtcctcatttcgggagtatccagtcagaggctggtcaggccgccaggcctagcggatcatgcccaggcagggggttggacgtcaccgccacccggaggtcatccatccgcgtcagtgggtgcagaaaaagtggccctgtttaagtcaggaccccagaatgcccagaagttactgaatggtttgaagccaagcacagatgttatcatggaaaatgcagcgtttttatttctttttctaaatatgtaactcttcctccacttccccctctcctgcttgccttatttcaattgcaagcagaagagagtgagtgttctctgccggcaaactccgccagggtcccggcccgtagagagtcgtcaagggtctggaacccccgtgccaacacctgcccctgcttcgcagccccaagaggaaggccgcgtctttccccctcgctgtattgggaagctacgttccgggctggccaaatgggccccaattttccaaaacccaaatttgtaatacccttcaattttttaaaaaaaagaatttaaaaaagtctctgtgaatgcttcagaagttaccgtttacaccccagaagtacttgcagcacatccacaagtaaaaacacacaacgaatgccagagtttcgtgtgttttttaaccgacatctttgtggctgtgaacaaacttcataaataaaatagaatcaaatgcttctgacctagagagctgggtctgcaaactttttttttatcgtattccgcaacagttaaataaaaaattaaaaactcaacatgtctccttgtaaactacatcaattaacaaacacactatgtccattatcaaatataatagaaaaaatataggaaaatagaaaatagaaaaatataggaaaatagaaacttttaagccacggtgaaaatgtttctataaatgagtggttctaatgttttcgtgagcgcccattttggggagcaccgccagctgcccgttcaggagtgtgcagcaaactcagctgagagagaaaattggaacaaaagcaggtgctcgcgggtacctgggcctagcctcttagtgcggccagccaggccaatcacggcccccggctgaaccacgtggggccccgcggagcctatggtgcggcggccggcccgccggtccgcgctggctgtgggttccctctgagatcagtgcggagctgtcaaagcgagcaggggtggcgccgggagtgggaacgccacacagtgccaaatccccggctccagctcccgactcccggctcccggctcccggctcccggtgcccaatcccgggccgcagcc

SEQ ID NO: 17 - DNA, 19245 bp, Artificial sequence
  PDX1 downstream regulatory sequence from the recombinant BAC
cggggcccaccttagaccgaaggggaaaacccgctctctcaggcgcatgtgccagttggggccccgcgggtagatgccggcaggccttccggaagaaaaagagccattggtttttgtagtattggggccctcttttagtgatactggattggcgttgtttgtggctgttgcgcacatccctgccctcctacagcactccaccttgggacctgtttagagaagccggctcttcaaagacaatggaaactgtaccatacacattggaaggctccctaacacacacagcggggaagctgggccgagtaccttaatctgccataaagccattcttactcgggcgacccctttaagtttagaaataattgaaaggaaatgtttgagttttcaaagatcccgtgaaattgatgccagtggaatacagtgagtcctcctcttcctcctcctcctcttccccctccccttcctcctcctcctcttcttttccctcctcttcctcttcctcctgctctcctttcctccccctcctcttttccctcctcttcctcttcctcctgctctcctttcctccccctcctctttctcctcctcctcctcttcttccccctcctctccctcctcctcttcttccccctcctctccctcctcctcttcttctccctcctcttcctcttcctcctcttccacgtgctctcctttcctccccctcctcttgctccccttcttccccgtcctcttcctcctcctcctcttcttctccctcctcttcctcctcctctttcttcctgacctctttctttctcctcctcctccttctacctccccttctcatccctcctcttcctcttctctagctgcacacttcactactgcacatcttataacttgcacccctttcttctgaggaagagaacatcttgcaaggcagggcgagcagcggcagggctggcttaggagcagtgcaagagtccctgtgctccagttccacactgctggcagggaaggcaaggggggacgggcctggatctgggggtgagggagaaagatggacccctgggtgaccactaaaccaaagatattcggaactttctatttaggatgtggacgtaattcctgttccgaggtagaggctgtgctgaagacaagcacagtggcctggtgcgccttggaaaccaacaactattcacgagccagtatgaccttcacatctttagaaattatgaaaacgtatgtgattggagggtttggaaaaccagttatcttatttaacattttaaaaattacctaacagttatttacaaacaggtctgtgcatcccaggtctgtcttcttttcaaggtctgggccttgtgctcgggttatgtttgtgggaaatgcttaataaatactgataatatgggaagagatgaaaactgattctcctcactttgtttcaaacctttctggcagtgggatgattcgaattcacttttaaaattaaattagcgtgttttgttttgttttgtttttgtttttgtttgagagggtctcattctgtcgttcctgggttcctctttttttcagggattctcctacctcagcctcctgagtagctgggattacaggcttacaccaccacgcccggctaatttttgtatttttagtagagacagggtttcgccatgatggccaggctgatcagggtctatttttttcggtactaatcaggaaaaatcaggtaattaagaaatagtgcacttgagttttgagttggagcaccctgtgaggggatgaatatccagttttgttttatttttaatttaagaatatcttctcatgatgactttctcgggtaatatagtctagagcgtgggagacagctcggagtactgctggccaatactgcttcctggcagagccaagcgccgcccacctgacgcctcagtgctgcgggtggtgagacccgtcgctggctcccaccatggtcaggtctcctctttcctcccaaagctgaggacgcaggcgaggccgttttctgtgacccttccaaaagaagcgttgttttggatgagtctctgtccccggaggccgagggccaaaagtgtcttatgttagaggcaaagatgcccggatttagagggcttccaacccctaggaccactttgctcttccctgcaggaagctctcagatgggcgccttagcccggtggtgcacccgacggccctccccggcgctccctgtgttcagtaccagtacctcactcccaggcgtcgctgcttttcttttactttttgcaaagatagacgctgtttgttgttgccgttttgttttgttttgttttactggagagagatatcgagtccctcgggataaaattaagtcccttggatcagaaaggggaacttgcgcatccttgagagtgctctttccttgcggttctccacacccgcctgggctctggggtggggcaaatctgcgctcgcatccttggtccctcaaatattggcccagcccgaagtcctgataaaatgattcgaactctcagtgactcagtttcttcatccagaaagtggaggcaaatactacttcatggagttgctgtgaggtttaaaccaagaaatacctgtaaaatgctaattcggcatctaggaatccctccacaaacagtagctattgttttaggctgtcatcgtcgtcgtcgtcagaggcaatcgggagctgctgttgtggagtttctaaagtcccccaccagtcccccggcagcccctcccctctggcaaacccccacactgtcgctgttgatatgagttttattcctctacccactcatctttcccgaacactgcctagtttcaggatgcccttcctcataaataaactccctaggttttccacagcaaacttcaccaggcaaagaactgcagctccgccgaccagttagttggtggaggcgcagaaacttgtcctcggaccccacgcagaagccgccgccctctccaaggctccggccccgacttcgctctgcgaattgggccagccgctgcttttccgcgagacccgagggttcgccaaggagaggagaagaggcacaggctgcctgagactggtcttcgggcagccgagggcgcgggatgactcgggcaggcgtgtggcctccgactgaccagggttgggcccgggatcagagctttgcttggaagttctctgggtggcagagactcgggcaaccggagcctgagcctcccgcggggaagagctcggactccggaggtcgcgccgccttgggcttgaattcagtccttccttactactcgtggctttgcttacatcatttaactctccatttccttgtctatacagtgggctcataaggaggcggtaaggagatgatgatgtctttgaagagtttaggacaggacctggtgtctcccgtacgcttggtgggggtggcggaggtgatgcgttgttaacaggagaaaccgaccttccagggaggcccagggaggcagcggagagcgaagtcctgctcggcggagagacctcgaggagagtatggggaaaggaatgaatgctgcggagcgcccctctgggctccacccaagcctcggaggcgggacggtgggctccgtcccgaccccttaggcagctggaccgatacctcctggatcagaccccacaggaagactcgcgtggggcccgatatgtgtacttcaaactctgagcggccaccctcagccaactggccagtggatgcgaatcgtgggccctgaggggcgagggcgctcggaactgcatgcctgtgcacggtgccgggctctccagagtgagggggccgtaaggagatctccaaggaagccgaaaaaagcagccagttgggcttcgggaaagacttttctgcaaaggaagtgatctggtcccagaactccagggttgaccccagtacctgacttctccgggagctgtcagctctcctctgttcttcgggcttggcgcgctcctttcataatggacagacaccagtggccttcaaaaggtctggggtgggggaacggaggaagtggccttgggtgcagaggaagagcagagctcctgccaaagctgaacgcagttagccctacccaagtgcgcgctggctcggcatatgcgctccagagccggcaggacagcccggccctgctcaccccgaggagaaatccaacagcgcagcctcctgcacctccttgccccagagaccgtccgagctggagccacaagccctccattcctcttggaatcttcaaccccaaggtaaggtaagttcaccgagcaccgcccagcgatgcgcaggatccgggggggatcacgcgcggcgaccctaccgagcgctccgtgcgcgcccccatctctcggatcgtgttcctggctctgtcgaagctgctgagtcccgcgattcgggaaatccggcacttgtttctcaccctacaccatcacgtggaaatcattgaaaatgggaaccctggtggagtatctgggagagcacgcttgtgccgaggggcctgagctatgggacttcctccaggtccctctgtttcctgccggcgtaggggactcgtagtgtcggatcgcatagtgccaaaaaatagtgcatgggaaacaaacaaaaacacctctcattttcttccgcaatatagtttttcctgtaggtgggctaacatagtacctgaagaagttctcaccttgaagagctaaatccataccatacaatatctgagagttggtgatgatttcgggtcatgcatattgtttttaacagggatgatgtccataaataacttgctcttcgctccagtactggggcgtgaacgcattcagcaacatatgttggattcctgctttgctgcggcacgcaggaagcctcacagtgcttgccctggaagcactcacagtttttacaagacaaatcacatcttcccacttgatggtcaataccgtcatggagattgaattgattatcagtgactgaatttaccagagtaaacagaagtcactatgattccccaaaatgaatgctccttttgaacaagggcatttcatttcttaattttggcctccttagtctagcactgccaccctctccatatcctctccttcaaccagttcagttcaatgcatttaagtttgactgaaatttaagtattgtactttccttttcaaattggtgaatctacctgttctattttcatctccccaccacccattctctgtctcattctctctctctctctctctctttctctctctctctgtctgctctctctctctctctctgtaggtgtggtttgtgtctgagggtgagtctccccatctttgtgtttctgaggatgcctgtgtaacctatgtgcctatgtgtgtttgtgtgcatgggtttagggtggtcttattgggttgccatagtgataatgatcagctgtgtctagggaccaaggaaaccttcctatatactttttgttttatgtgtgtatttatttacttgtttatttttgcgacggagtcttactctgccgctcaggctggagtgcagtggcacgatctcgggttactacaacctccacctcccaggttcaagtgattctcctgcctcagctccccgggtagctgggattacaggcaccagcctccatgcctggtgaatttttgtattttagtacagatggggttttgacacattggccaggctggtcttgaactcctgacctcaagtgatccacccactttggcctcccaaagtgcttggattacagcacagccatctcacaggtgtctgatggcattgctgatgatgaaaactgtccgctcaggttactgtctcaattctttgaattggcacaacgttagaaggcaagaagtgctgtctttagaataacacaaagttgaaactttggtagaagctgacagattgctaaagtactaccataaggaactttaaaatcttctctgtctaaaaaagaagttcacaactaaggtatttcatgacttcaacaaatttacctataaagcctcctgaaaattaagtagttacaaatgtcagaagaaggaaattctgagttgatattgaatcaagctttactccaacccagctctaacaggctagatgtgggaacaataaacctaatgggaaactgaggcagggcagcaggaagcagaaggcctccttgcaaaagaaatgggaatgatgcatcctcttatctggcagccagccatcaagaaattgcttcccatggtcagcttgagcagtgggaagagactggcaggaaacactgggtaggaaggggaggtcaaggtctgcagataatagcagctaaaaataggtgatttcagagtgaaagtggctggctgaaagggatgaggctcataggttacctagtgataacctgtcaatgccagattcccatattaaagtatggtatatttacacatctgtaagatggaatgcacatgataaaattatattccttccaggtgcggtggctcatgcctgtaatcccagcactttgggaggccaaggcgggcagatcacctgaggtcgggagttcgagaccaacctgaccaacacggagaaactctgtgtctactaaaaatacaaaattagccaggtgtggtggtgcatgcatgtaatcccagctactcatgaggctgaggcagaagaatcgcttgaacctgggaggcacaggtttcagtgagccgagattgtgccattgcactccagcctgggctacaagagtgaaactctgcctcaaaaaaaaaaaaaaaaatcatagtcctgatgtttcattaaaattatttcctctgtaaatgagatcccatggcttttgaaagcataaatagctctaactttaagcagtattctatcattcaacttcaagttgaacaccttggagtccttccctgaacatagagcatatagaaaccttaaatatatgccatatcatcagcacgcattcaagattcttgtctacattgtggaatactctgaaatctcacttctaatgataattacacatctaaaaagcgtaaagaacctgatctgatcatcacacataatatggagtaaaacatcactatgtaccccatgtatatgtacaagtaatacttgtcaatttaaaaaaatttatgtgtaacaatatttttgctgctaattatttacatcattgaataaattctatctctcctctttcagaattctcaatgagcctgatttccaaaaggtatgacattttgaaagtaatttctcttatttacatatgctcttagaaaattcagaagtcccacacttctaaatctgtctggaaatactgctgatttgaaatcgacatattacatggaattatttccacttcatagttctagaaacaaacaaaaaaaaatgtacaaaataaggccgggcactgtggctcatgcctataatctcagcactttgggaggccgaggtgggtggatcacaaggtcaggagtttgagaccagcctggccaatatggtgaaacccggaaaccccgtctctactaaaaatacaaaaattagccaggcctagtggcaggtgcctatagtcccagctacttgggaggctgaggcaggagaatcacttgaacctgggaggcagaggttgcagtgagccaagatcacatcactgcactccagcctgggccacagattgagattctgtctcaaaaaacaaaaacaaaagtacaaaatagagttgggcaaggtggctcatgcctgtaatcctagcactttgaaaggctgaggagagaggattgcttgagcctaggagtttaggactatgattgtagtgagctatgattgtgccaatacactccagcttgggtgacagagcaataccttgtctctaaataaagcatttttaaatgttcaaaataatctctaagaaataaacaattggccagcagggtggctaatgcctgtaatcccagcactttgggaggccgaggtgggcggatcacttgaggtcaggagtttgggaccagcctgagcaacatggtgaaaccctgtctccactaaaaacacaaaaattagtcaggcgtggtggcgagcacctgtagtccctgctagcagggaggctgaggcaggagaattgcttgaacccggagaggttgcagtgagccgagatcgcaccactgcactccagcctgggcaacaagagccacactccatctcaaaaaataataaatacatacataaataaataaatataaaatattatataattggatttattgcaatcaatgaacatgtggtttatttttatttaatattgaaagactacgtttctaggccagaaggacaggagagtggataatttctcctgtggatgattgggcctttccacagaaacacaaacagagattgtataaagcacaaggcattattcatgctaccctttgtcctccagtccagtggaggagaaaaggaacaatccctggccaaatgtgcaaattgaaagtgctgtttttcactaccttgggcagggtttagcttccggttttgtgttccctatttactgcccttctgaactagggcaaataacttgatccatttgagcttgtctactcccctgtgaattagggataatcccatctcatgtgactattgtgagagttaagtaagataaggtatgtgaagagcacatacttgggtgagtggaaacctttatttttatttattaggtacaaggtctcactctgttgcccaggcttgagtgcagtggtgtggtcctatcatctcactgtagcctcaaaccctgggctcaaagcaatcttcccacctcagccccacaagtagctgagactacaggccagtaccaccaagcccagctttttacattttttttttagacatagggatcttgctaagttacccaggctagtctcaaactcctgggcttgagcaatccccttgccttagcctcctgtggctgggattgcaggtgacagccacctcacctggctgagtgccacctcacctggctgagtggagccctttagaaggatgtggtttttccagaagctgaggtctttcttgccctactaaatcacagacagctctttgctcaatggacctcagggaaggcaacaactgccacaccaattgaatgtatgcccttttccctggagccctggagtcctccctcagatggggacagctaggtcttgtcctggctcttcacaagagaatttctggactgcaaagtcacattgaagttgaccaggtaggagcaaaaataagctaccactgtataaagcagagaggcaaaagccagctgtactgactgaagtcacacgtcaaacagcattgatacccacatgcaactagctttacttgtaaggcacaagcatttcagccaatttaaggatagtctgatgaccaaagatagaaagtctcttgacaaactagaatttttttaaggatctctaggcctccgctcaaagaataggagattgttctaagaccttcttaataagtcatttccctagatgttactatattgattagtattaatacatatttatatatagatgtattatgtataatatatatttatataatacatattattataaataatatatattgatgcatattgacatgattaatacatatttatatataaatgtattatgtataatatatatttatataatacatattattatacgtaatatatattgatactaatcaatatagtaacatctagggaaatgacttattaagaaggtcttggaactgtctcctattctttgaggaggggctagagatccctaaaaattcctactatgtattatacataatacatataatatgtaatattctattgtgtattatatatattatatataatatattatatattatgtattgtatataatatattatgtattatatattatatgtattatgtattatatatgtattatatataatgtattatgtgttatatattatgtattatatatattatatgtgtaatatatatttatgtatatatatttatatataaatgcattatgtataatatatatttatataatacatattatacaaaatatatagatacatattgatatgattaatacatatttatatataaatgtattatgtataatatatttatataatacatattattatacataatatatattgatactaatcaatatagtaacatctaaggaaatgacttactaagaaggtcttggaacaatctcctattctttgagggggggtctagataatatgttatatattttgtattatatataatacataatatgttatatattatgtattatatataatacataatatgttatatattatgtataatatattatatattatgtattatatataatacataatatattatgtattatgtataatatattatatgtgtaatatatttatgtatatataatacatatattatatattatatattatatgtataatatattataagtataatatatattatatgtataatttatgtataatatatattatacataaatatgtataatatatattatacataaatatgtataatatatatgtaattatatatattatatgtatattatattatatatatgtatattatatgtaattatatatattatatatgcatataatatatgtgtaattatataatattatgtaaatatatattacacataaatatatattatacataaatatatattatacatataatatatattatacataattatgtataatatatattatatgtataatatatattatatattttcaaaaagtaggttgcaactgattagtcaataaagtcaagttagccaggctcggtggttcacacctgtaatcccagcactttgggaggccgaggcacttaaggtcaggagttcgagaccagcctggccaacatggtgaaaccccgtctccacaaaaaatacgaaaaaaattacccgggcgtagtggcgcgcccctgtaatcccagatactcaggaggcagagacaggagaatcgcttgaaaccaggaggtgaaggttgcagtgagccaagatcactccagcctgggcaactccatctcaaaaaaaaaaaaaaaagtccatttagtgggttgttaccagatttttattttatatatatatatatttattgtatataaaaaatatatatgtggaacccaagaggttttgacatttgattctgccatccctaagtgttgtggacctccctagtcccttagagcactccagccaatacacttactttctcagcagcaggggaaaagagacaaatcagaaggatatgcatctatggtagacagaataatggtccctgaaaagttgaaaggtgtctacattgcaattcctgaaacctgtgtctatgttcccttacagggcaaaagggatttttagagatataattagattaggtacttaaaataaacagattattctagattatccttgtgggcccaatctaatcatacaagtccttgaaagcaaataactttctctagctagaattcaagagctacagcagaaagaaaagttgaagagattccaaatatgaggaggctttactgagccattgctgcctctgagatgagggagtccattgacaaggacccaagagaggctggtaagggctaacgaccacccccaggcgacagacagcaaggaaactgggggcagccacaaggacgtggcctctccaacactggaccagagaaactgctgagccaagggggactttgacagacagaaacagtgaaataataaatttaataaccctagaagaaaacctaggcaataccattcaagacataggcatgacaaggacttcatgactaaaacaccaaaagcaatggcaacaaaacccaaaatagacaaatgggatctaattaaactaaagagcttctgcacagcaaaagaaactaccatcagagtgaaaaggcaacctacagaatgggagaaaatttttgcaatctacttatctgacaaagggctaatatccagaatctacaaaggacttaaacaaatttacaagaaaaaaactaacaaccccatcaaaaagtgggcaaaggatatgaacagacaattctcaaaagaagacatttatgcagccaacacacacttgaaaaaatgctcatcataactggtcatcagagaaatgcaaaccaaaaccacaatgagataccatctcacgccagttagaatggcgatcattaaaaagtcaggaaacaacagatgctggagaggatgtggataaataggaacgtttttacactgttggtgggactgtaaattagttcacccattgcggaagacagtgtggccattcctcaaggatctagaactagaaataccatttgactcaactggggtattactgggtatatacccagaggattataaataatgctactataaagacacatgtacacgtatgtttattgcagcactattcacaatagcaaagacttggaaccaacccaaatgtccatcaatgatagactggattaagaaaatgtggcacatatacacaatggaatactatgcagccataaaaaaggatgagttcatgtcctttgccgggacatggatgaaactggaaaccatcattctcagcaaactatcacaaggacagaaaaccaaacactatatgttctcactcataggtgggaattgaagaatgagaacacttggacacagtgtggggaacatcacatactggggcctgtaggggggtgggggggctgggggagggacagcattaggagaagtatctaatgtaaatgacaagttgacgggtgcagcaaaccaacatggcacatgtatacctatgtaacaaacctgcatattgtgcacatgtaccctagaacttaaagtataataataaaataaaaacgaaaaaaataaatttcatgttgtgtttagctgctgcatttgtggtgattcgtaattgcagcaattgaaaatgaatatagtttcctttacttgaatgacacttttggagttacacgatgcctgcttacacctcattcacagaacttagctgcatgaaagcatctagctacacagcaggtgggaaaatgtagcctttattctggacaaccagttgtctaatgaaaaatgggaggaagtacatcactaaaaagggaagtgtccagtggatactggggacaactagcagcctccatgacagttaccaaggatctatataaaaaattgtcctaataggcagggcgtggcggctcacgcctgtaatcccagcactttgggaggccaaagcaggcagatcacttgaggtcagaaattcgaggccagcctggccaacatggtgaacccccatctctactaaaaatacaaaattagccgggcgtggtggcacatgcctgtaatcccaactacttgggaggctgaggcgggagaatcacttgaacccagaaggcagaggttacgatgagccgagatcacgccattacactccagcctgggtgacagagcaggactccatcttaaaagaaaaaaaaaattgttataataatctggtgttttctgaaaagccacagatgaaaacaatactcattattatacaacagccatatatgaagcccatgtcctggaatttaattctagaaggaagtttgttcagacaaacttgtgtgctttcatcaaacgatgtacatgatacaacatccagtgttagccttttctatcagacaactctgaactaaagttagtattcaattaacactcaactatgtgtctcatcctagcataggctattgaggaaggccgagattttcaatcagaaacattggcttccagttctgcattgaccatttatgccccttctgaactagggcaaatgacttagtgtctttgacagtctatttttcttattagtcaattgggagaaatatcaacctcataggactgttatgagggttaaataaggtatgtgaaagatactttttgagatgaaaaagagccctatacatgtatttatagaattaaaacatataacatttatacatttatatgaaatgtataaaacattggatcttcccttcctctaagtcagtgtttttcgaacagtaggttgcaactgattagtcaatgaagtcaacttagtgggttattaccagatttttttaagttagataaaatataatagaaaatatcagagtgcattatgcacagcgaggataaagattgcttcatgtaactttttttagttatacatgcatatgcctaacagatcaaaatacaaaatatattttgactttgtaactttgttagaaagttttgaaaacactgctttaaaaacactgcttggaatggtgtgatcttcattttatctgtgttaaacatttggttttttgttttgtttttagcgctctattcatcatgtgcttttattagaaaccaactcacatctattttggagagagaaagttgagctaggagagagagagactgagggccagggtaaaactcatgttaaatgcttttcaaacaagatataattgttaaacttttatttatttatttatttatttttttttttgagacagaatctcactgtcgcctaggccggagtgcagtggtgcaatctcagctcactgcagcctctgcctcccgggttcaagcgattctcctgcctcagcctcccgaatagttgggactacaggcacacgccactgcgccaggctaattttctgtattttcagtagagatggggtttcaccgtgttagccaggatggtctcaatcttctgacctcgtgatctgcccgcctcggcctcccaaagtgctggattacaggcatgagccaccgcgcccaacctaattgttaaactcttaatctcagcctcagagtcagtcttccactctttgtgatgctggaagtgggctgaggcgctgaaaatgacattctcctttggcaacgggctattggtcaggctctgctactcagcacgggccaggagggaggcttcaaggtgcaaggccagtggaagaacttgcttcttcctttctgcttccagttcgcttcagttgcgagccaggccgtgtttctcccggtagtggcaatttattccattagcagcagtttattctggtttgcagtttcttccgaatcggcaccacctcaaagatatcaacaccagttggccagcaaccccttctcagcggtgtgagtcccagctctgtggagcccctccttcaagcttctacattttcatatttacaacctctttattttgttgcctcagccctgggggctggtagctgcattttgcaatcactccctgatgccttagtacaagcttgtccaatccctggccgtggccacatgtggcccaggacagctttggatgtggcccaatacaaattcgtaactttcttataacattatgagatttttttgcaattttcttttttaattcatcagcttcattagtgttagtgtgttttatgtgtggcccaggacaattattcttcttccaatggggcccagggaagtcaaaagattggacacccctgccttagtgcctctgactggaagggcctaccagcttatacttcctatgtttgcctgcctgccttttttttcttctgtcttgccttctcttaaaatgtactgagtggagagccgcagtggctcaggcctgttgtcctggtgcataaggaggcgaggctaggcgttccaggccagcctgggcaacatagaaacctctcatctatgtaacaaaaaaataataataataaaatgtactgagtaactgtactaggatctggactgggctctgggtcctctgtaaagtctgtgagcacacaaccatggaaccaatgagtttcatgttctctgtgaaacttcccaaacatcccaagtacccctctgtggtgtctaccttctaagatggcccccaataaattgtgccttttggtttccacacctttatgtcctcccctcccacaatgaatctgggctgagcctgtgactcactttaaccagtaaactgcagcaaaactgatgctgtgccccttccgggcctaacatcttttttttctttttttgacacaaggtctcattctgttgcccaggctagagtgcagcggtgcaatcacagttcgctgaagccttgacctccctggctcaagtgatcctcctatgtcagcctcccaagtagctgggaacacaggcacacaccaacatgcccagctaatttttttttttctttttttgttgagacaggttctcactatgttgcctagactggtctcaaactcctgagctcaagcaatccacctgccttggcctttcaaagtgctggcattacaggcatgagtcactatgcccagcctgagcctaaaatcaaagaaggcctcatatcttccacatttgtgctttgggaatcctggaccaccacgttaaaataataaaaaaacccagctgcctcgctggagagactatatcacgatgtcctcacaggaagatactgcatggagaaaagaaaccctgagaacacctgagaagagaggcccaggcatcccagcatctcatcccagcatctcatcccagctctagccatcatctgactgcaattatatgaagccagcaaaggaactgcccagctgaacccagttaatctacaaaatgtgagagataattaacccctaagttttggaggtggtttgctatgcagtaacagataattgaaatgccccttccctgttctatgttcttactctttaatcccataacaccttgtccctttgtacctctatcatattcttactcaagttgcattgtctgtctcccctaagagatggcaagtttctaaagggtggtgattgcatctttatttattttatcagaaaaagttcagtaaagaaaacagaaaccactcaaggcatttcaagcaaaaggagattaggtattcacaagattattgaaaggcacagcacgaggcttttggcttcaaggtcatatcaccatggttgtaatgcataggtctaaaaactgctgctactaccacagctctgccctatatccaagaaaatgatgtccggacagtggaatgtggatttggccatgcaaatacatctgccagaaccagccagccactatgacaagaacaatgacttctgtcttctttctgtcctccagatatttcatgaattcatctaattgacagaaccttcattgcacctagaagtcttgtgctaaaaggtctggaaaagccaggcttggcagcatacaccagtagttccagctactcaggaggttgaggcaggaggataactggaatccaggagtttgaggccatagtgagctatgatcacaccactacacttcagcctgggcaacataggaagaacttgtctcaaaaaaagaaaagaaagaaagaaaccttccagaaactatagctttcagcattccagttaattctatacaggggagaatatagatggagtgagaaatggatgataagggccgattaacagcatgtagtgcatttctgaatccctagccctaacacaagctctgataagtaggaagtctgataggcctgttgaatgaattgatgaatgtacaaattaatttgttatccatcaggtagtgtagcatgcaattatagtcccctcctatcctagatgctaggaagacaaaggtgaataaatggtatttccaaaaagcaaaatccaggggtagagctgagttgtgagagcagtgggatacaagtatgaattttgtaagattctcagtgttatctgtggagcccttgtctttcactctctcatgaaagtaaataggcaaatacagaatccatctcagatgttaaccttttcaacatgttttgcaaatgtaagttgtttctccaggaaataataaggctgcttttccaaggtcagccctgtagctgagtcaagaaagcattcctaaagcatatgtaaagaaaagaactcagacacagtctacacgcttgagaatagacacaactaaggccatcttgacaggtaaattctatggcttccccttgctattcacacatactatttattttcccagctattacttaaagcaccacatagctctcaatcctcagtgatgagaaaaagtggaatagagaccagaaataggaactcgagagtccagtgttctttacttaggccagcaattaacttgtaaaggctgtcacaatctcattttcagctgtattagttttgccatttacaaaatacaggcattatgtaaataaccaaacaatgctgataaagtgctgagtcctcatcactacagttatccctgtctgctctgtactaaatctatgacaggatttgtgtaattatagggtgtgttccccttgctaagcatatctcccacacaatccatttagccactcataaaccaaacactaggatttttttaaaaaagaaattagttgatcttgctagggttagtggaatgttttttatttgtttccattcctattgttgagatttggtgctttttcaaacagttgcttatagtttaaaaaaaaaaaaagactagacaaagctacaaccaagcattaatagtagtagtgaactctggggagtccgactggctgttccttttattttactttatgtgctgcattgtttgtatttttcacaatgggaatgtattgattttaaaattaaaaataaactttgtggcctggcgtggtggctcacgcctgtaatcccagcactttgggaggccgaggcgggtggatcacgaggtcaggagatcgagaccatccaggcaaacacggtgaaaccccgtctctactaaaaaatacaaaaaattagccgtgcacggtggtgggcacctatagtcccagctactcgggaggctgagacaggagaatggcgtgaacctgggaggcggagcttgcagtgagcaaagatcgcgctactgcactccagcctgggcgacagagtgagactccgtctcaaaaataaataaataaataaaaagcaaactttgtaaatattaccaatgattaactttgagtagagggattacagatgattttttttattatttgaatatttatattgagaaaaataaccattatttaaaagaacatcgactacattgttgacactttttctgcagaaagtgcaacaagtgtatcaagtgacacgtaggcagtagaagacaacaggatacagaagaggttttcacag

SEQ ID NO: 18 - DNA, 15837 bp, Artificial sequence
  PDX1_GFP  recombinant plasmid
agatgggatcctagtgttttctcgctgccctttactcaggagctaggagaacagaaagcaaataaccaagaaaccaacacactcagtaatctggatttctcagagttgagccacagcacttggaaatcaaatattggctcctcctgaacgccccttttagcctggtgttgttaaccagtttaacattcccttatcacatgctcatgtgggcagaattaaatggaattagctgcaaattatataaaattcatttacctttaaaggaagctatttggtcatgttcagtgtagacagagcattgcattaagacacaagttaatggtactgcctggagatgaatcaatttgctttggttttattacctccctttatttgttcttatgtggtagctactgtgactggaaatgctcagctcaggttcacagagcccatgtcagagccacattaacatctcaaggagagtcccactctttctaaagagctcagtccaagtaaacacagtagcaaagtaagatcatgctgatcctcccttaatacttagtcacaaagaatggatgctgaacaaggtggcttatgcctgtaatcctagcactttaggaggcctaggtgggaggatcgcttgaggccaggagttcaagaccagcccggacaacatagcaagaccttgcctttacaaaaaaaaaagaaaaaagaaaaagttagccgggcatggtggagcatgcctgtagtcccagctactccaaaggccgaggagaaaagattgtttgagcccaggaggttgaggctgtagtgaggtaagattgtgccactgcactccagcctgggtgacagagggaaaccctgtctcaattaagaagataaataaattttaaaatgggtgatgtctaagagagaaaggcaaacctatgagaatgttgaggattgataagcatcttgtccatataggggttcaaataacatctattgaacttctgctttctgcactgacttaggcatttttctaagatttcttcatttcgacctcaccacaacctcatgatgcacaggtatatttttatttgaaagtgcatgcttcatgagttctttaagagagtatataaatctctatataacaaataaattatgcttgaggtgtctattgttgttctcaatttataatgttgataagaatgactgtgggcaggcgcagtggctcacgcctataatctcagcactttgggaggccagcgtggacagatcaagagatcaggagttcaataccagcctggccaacatagtgaaaccccatctctactaaaaatacaaaaaaattagccaggcatggtggcatgtgcctgtagtcccagctacttgggaggctgaagcaggagaattgcttgaacccagcaggtggaggttgcagtgagccgagattgggccactgcaccccagcttaggcaacagagtgagactttgtctcaacaacaacaacaaaaaaaaaaacaaaaaaaagaatgactgtgtacatgtttaaaatgcagactccccagtctcactcacccccatatcgttattcagaaggtctggggttgggctcagatattttcattttataagcatcccagtgattcttgatatacacagttcatgagtcacacttccaggaacacttccctataaatccatgttacttcattgattagtaagagtttgtatttttctgagatttgcctgaaggtaaatgtgttgcaatatgtaactggagaaaatataaaaaataaatgtatccaaatactgtgtctctgttcacaacaatacactcctaagagatatctaccacaggaagaattcctaattggcaaatatgataaagttgagaccacagtcagttagccttttactttaatctttgcaagagaggctgtggacctagcctaggctgtcaaaagagaaggcttcacttgtgctgctctgagtttagcattgactctcccatcttaaccccatcgatttctaattttaacgtggatttgatttggggggacacacagaggaatcactttgacggcagtgttcctgcaccctcacaaagacaaccagggttgaccatgaccgtttttctgatgtggaaaaagcaggaatggggcaggattccagctctgctctggcctagagactagaatgactcctttccctccctagacattttaaggtttcctctgagtttatgatgacagcttcatctccaacccacgaaagcaagaaccacagacaatgctagtgggggtgctctctggccagaacacactacttagatgctgggttccacacctactgggatagctaaggcattttgagttgtgattagttcacctgctcaagtctttattttggctttcctggctgtgaaaaagaaggccctgccccttctccacacctgtggggtctctctgtggtgtgctgatggcggacatgagagttctccagcaatccacctcctccagcccttttaagcaggactgtacctgggggcacattcccctaaaacactgagtaatatacctactaagtacttcctcccagtgttcctgaatatacctttccaggtctacccatctggaaatatctttagacatcagctcatggtgatagtctgtcattcttctggatgcagtaatagccaatagttcaatgtttatatgcacattaaaagcaatgctgggggagaaaggaagagatgaccatttattgaatgctttcaaagtgccaaaaacattagatgttttgtctcattaaatcctcacaaaaacaataaaaaatattttttgagtgcctactatatagtaagatagtacagtgtcacagccaacagaatggattttaaggccacatcaaggccaggtgtggtggctcatgcttgtaatcccagcactttgggaggccgaggtgggcagataacttgaagtcaggacttcgagaccagcctggccaacaggaaaaaccctgtctctactaacaatacaaaaattagccgggcatggtggtgcgtgcctgtaatcccagctactagagaggctaaggcaggagaatcgcttgaaccccagaggcagaggttgcggtgagccgagatcatgccactgcactccagcctaggcgacagagcaagactcagtctcaaaaaaaaaaaacaaaaaacaaaaaaccaggcatggtggcctgtaatcccagtactttgggaggccaaggtgggtggatagtctgaggtcaggagttcgagaccagcctgaccaacatggtgaaacccgtctctactaaaaatacaaaattagccaggcatggtggcacatgtctgtaatcccagctacttgggagtctgaggctggagtatcgcttgaacccaggaggtggaggttgcggtaagccaagatcatgccatggcactctggcctgggcgacagagcaaaactctatctggaaaaaaaaaaaaaaaaaagccacatcatctctgcttggatctaggctctgccacttactagctatataattctaggcaagtaacttaccatcactgggcctcaatttcctccactggaaaatgggataacagtaattggctcatggggttaacattggaaaatatttaaacaacgcctggctccatgcatttgccattacgattactatgtgcaacggggccagcttatggaacagtgctagtatttccattttacaaataagggcagggaagcttagtgaagtcatgtaacttggcaagggacacacagcttgtgcagggcagagcctgatgtggaggacaggtgtatgcagctcctgacctttctatggcccgccaaagccagcgcatatttctaccaatgagttttggttactcaaagagtgtgcaggcaggtgcacagtgagagatctacaggcatttgatcagtatatgttaccgaaaatctgggtccttcaaagcataaaccatgtgaaatgtaggatggttgaggaaggaagctggagggtagtgtgggtcaagccttctttaggctgcagcaggaacctggaggtaaggagaggctcctaggagaacaaaggattagtcataggaaatggtggtgggaggaggaggtggaaggcaaagaaaaggaactgtgtggaagcaaggagctggttacctaggactaagctcagaagggaagcagcagggatttctggagactgcacatctggaaggtagaaccagagatgagacaaccaaaggggtgagtccagagctgtagggggtgagccaccgggaacaccaggagtggggagcaacagctgacctcagatcctttggagcctgaaagtcctttcatacttttcctttcatcagcagagtgaactgaggaccacggaaggattaaaccaaaagtggaaagagctcgtgcctgggggccccactcccagggaggaagcgttgagcagtggctggaggaagcagcagacagttctggggcacacggagtcccccctcctgcccttctactcctcttacaccagagagagctaacaaggtagggaataagacaattacccaattcaattcggtttttaagctgcttttatctttacagttcagggatcactgaatcatctggaaaataatttcagctctctgcttattttcactagattgcttagccctaggaatattggaaaacccttcattcaaagtctgaggtcctttcctctctccaatccccacaacccaagctgggtttccctggcccctctcagacctggataccaaattctgggtatttatttatatatatatatatatttttaattttttgagacggagcctcgctctgtctcccaggctggagggcagtggcgcgatctcggatcactgcaagctccgcctcctgggttcacgccattctccttcctcagcctcccaagtagctggaactacaggcgcccgccaccacgcccggctaaatttttttgtaggtttagtagagacggggtttcatcatgttagccaggatggtctcgatctcctgacctcatgatccgcctgtctcagcctcccaaagtgctgggattacaggcgtgagccaccgccctcggccaattctgggtattcataaaccagcaggagggaaacattgattcgacttaggaaaatgaaaacctgcctgcattagtgctcattgaaggaaatgctaatgaactaaagtgcaatcaattatagaagtattctcattccacacatcacatcgtttgctttacagaattttccaactcaagaaacaatttttattttcaacagagatttaattataaaatgaatataaattccacgtgcattcatgatgtataccttggagttaagtgggattcatctgtttttttcatttataatgggatgcagtggcttaaaaatcctatcaccaagccaaattcagcccttagcatgcctctgaaaccaccgaggaagacttagccacttaccaagaacaaggtaacctgtgttctcccgggtgtaaaccgcgtctctgtgaagggaaagggggaagagggccggcaaggacctccagtatcagcgaggactatcaggacgtccagctaataaacgactttttcactgtccacactttaattggtttacagccttttttgtttatttatccataagagctgctgttaaatggctcgggaaggtgctcgcctaatggctcggtatcgctgccgggcctgttgtgggcgaggcggcttggagggggcgcaggcgtcagcggggattcagagcggaaacgcatttcgcctgtaatggactcggcgattttacgataccaggagctagatccacggggaagtacaacacacgaccttactaagcggagggttccgcttgatgcgttttttatacggctgtacgtgataaaattccagataactttgtttcatctaataataataataacaataataaatggttgtttgacctttgctccctgggtcccttctataggtcgcaggcagcagaaaatgctaattgtgaaagtgagaacgcgcctccatggaatacccccggcgatcccctcctcctcccccacagccgcgggtacccgggtttttgccggcgaccgcaaccggcggatttgctttctgctgagagcctcttttctttctgcagggccgagcaaaaatattaaatggaagcaaatgaagcatcgaaatggagaccaatttacagaaatgtgcaattagttgagaagtgcaaagtaaacactccgggggtggcaggcgaggcagggagcaggggagggagagtggggcgcagactgagtccagagtgggtgtaggggtgcccagggaggaggggaagggggaggaaaaggagggggaggggaaaagtggccgatctttgtcctgagcggagcttgccgtccgctcataaccgcgtcgccaagtcaaccctcggcgactcggcagattatctccaagggtcaacacgccgcggccaggcaaccccctccagcctgccctcctgatcgatgtggtcactcgcggccagggtgatagggtagagttctccgcggccgcagacaatggactcattgacgcgggcgcacagagattaggtgcccgggccccacggcctttcactctctgcccccaccaaaactgcaggtggcacttttccctgaagaaatcaccgaaactctccccgcccgccgccgtgcttcccttggcctgtcttcggtgacagcaagggcatctacaagccagggagccacacatcagagccacacacatgaggccacaggccaggaagccacacacatgagttctcacacatcgaagcaaatgctgagactataccggcctcccgcaagagaaggaatctgcagagaagtccacattcccgactggcttttttgtcttttaataaaaataaagagtcctcagaatagagcactcaatccgcacttaaaacacaaatatttccagtaggaagaaagaaatacattaagattgactctcaaaggtctggatgttggtgcgttgtttaggaaaggcggagcagtgatttttctctggcttggttctttgtggttcaagctctctcttgctgagacgtttctgcaaagctgtctagtttttctaaaacccacggtggcgtttcgagaaacgtcctcatttcgggagtatccagtcagaggctggtcaggccgccaggcctagcggatcatgcccaggcagggggttggacgtcaccgccacccggaggtcatccatccgcgtcagtgggtgcagaaaaagtggccctgtttaagtcaggaccccagaatgcccagaagttactgaatggtttgaagccaagcacagatgttatcatggaaaatgcagcgtttttatttctttttctaaatatgtaactcttcctccacttccccctctcctgcttgccttatttcaattgcaagcagaagagagtgagtgttctctgccggcaaactccgccagggtcccggcccgtagagagtcgtcaagggtctggaacccccgtgccaacacctgcccctgcttcgcagccccaagaggaaggccgcgtctttccccctcgctgtattgggaagctacgttccgggctggccaaatgggccccaattttccaaaacccaaatttgtaatacccttcaattttttaaaaaaaagaatttaaaaaagtctctgtgaatgcttcagaagttaccgtttacaccccagaagtacttgcagcacatccacaagtaaaaacacacaacgaatgccagagtttcgtgtgttttttaaccgacatctttgtggctgtgaacaaacttcataaataaaatagaatcaaatgcttctgacctagagagctgggtctgcaaactttttttttatcgtattccgcaacagttaaataaaaaattaaaaactcaacatgtctccttgtaaactacatcaattaacaaacacactatgtccattatcaaatataatagaaaaaatataggaaaatagaaaatagaaaaatataggaaaatagaaacttttaagccacggtgaaaatgtttctataaatgagtggttctaatgttttcgtgagcgcccattttggggagcaccgccagctgcccgttcaggagtgtgcagcaaactcagctgagagagaaaattggaacaaaagcaggtgctcgcgggtacctgggcctagcctcttagtgcggccagccaggccaatcacggcccccggctgaaccacgtggggccccgcggagcctatggtgcggcggccggcccgccggtccgcgctggctgtgggttccctctgagatcagtgcggagctgtcaaagcgagcaggggtggcgccgggagtgggaacgccacacagtgccaaatccccggctccagctcccgactcccggctcccggctcccggctcccggtgcccaatcccgggccgcagccatggtgagcaagggcgaggagctgttcaccggggtggtgcccatcctggtcgagctggacggcgacgtaaacggccacaagttcagcgtgtccggcgagggcgagggcgatgccacctacggcaagctgaccctgaagttcatctgcaccaccggcaagctgcccgtgccctggcccaccctcgtgaccaccctgacctacggcgtgcagtgcttcagccgctaccccgaccacatgaagcagcacgacttcttcaagtccgccatgcccgaaggctacgtccaggagcgcaccatcttcttcaaggacgacggcaactacaagacccgcgccgaggtgaagttcgagggcgacaccctggtgaaccgcatcgagctgaagggcatcgacttcaaggaggacggcaacatcctggggcacaagctggagtacaactacaacagccacaacgtctatatcatggccgacaagcagaagaacggcatcaaggtgaacttcaagatccgccacaacatcgaggacggcagcgtgcagctcgccgaccactaccagcagaacacccccatcggcgacggccccgtgctgctgcccgacaaccactacctgagcacccagtccgccctgagcaaagaccccaacgagaagcgcgatcacatggtcctgctggagttcgtgaccgccgccgggatcactctcggcatggacgagctgtacaagtaaagcggccgcgactctagatcataatcagccataccacatttgtagaggttttacttgctttaaaaaacctcccacacctccccctgaacctgaaacataaaatgaatgcaattgttgttgttaacttgtttattgcagcttataatggttacaaataaagcaatagcatcacaaatttcacaaataaagcatttttttcactgcattctagttgtggtttgtccaaactcatcaatgtatcttaaggcgtaaattgtaagcgttaatgggctgcaggaattcgattcaaggatccataacttcgtataatgtatgctatacgaagttatctcgagcgtcaggtggcacttttcggggaaatgtgcgcggaacccctatttgtttatttttctaaatacattcaaatatgtatccgctcatgagacaataaccctgataaatgcttcaataatattgaaaaaggaagagtcctgaggcggaaagaaccagctgtggaatgtgtgtcagttagggtgtggaaagtccccaggctccccagcaggcagaagtatgcaaagcatgcatctcaattagtcagcaaccaggtgtggaaagtccccaggctccccagcaggcagaagtatgcaaagcatgcatctcaattagtcagcaaccatagtcccgcccctaactccgcccatcccgcccctaactccgcccatcccgcccctaactccgcccagttccgcccattctccgccccatggctgactaattttttttatttatgcagaggccgaggccgcctcggcctctgagctattccagaagtagtgaggaggcttttttggaggcctaggcttttgcaaagatcgatcaagagacaggatgaggatcgtttcgcatgattgaacaagatggattgcacgcaggttctccggccgcttgggtggagaggctattcggctatgactgggcacaacagacaatcggctgctctgatgccgccgtgttccggctgtcagcgcaggggcgcccggttctttttgtcaagaccgacctgtccggtgccctgaatgaactgcaagacgaggcagcgcggctatcgtggctggccacgacgggcgttccttgcgcagctgtgctcgacgttgtcactgaagcgggaagggactggctgctattgggcgaagtgccggggcaggatctcctgtcatctcaccttgctcctgccgagaaagtatccatcatggctgatgcaatgcggcggctgcatacgcttgatccggctacctgcccattcgaccaccaagcgaaacatcgcatcgagcgagcacgtactcggatggaagccggtcttgtcgatcaggatgatctggacgaagagcatcaggggctcgcgccagccgaactgttcgccaggctcaaggcgagcatgcccgacggcgaggatctcgtcgtgacccatggcgatgcctgcttgccgaatatcatggtggaaaatggccgcttttctggattcatcgactgtggccggctgggtgtggcggaccgctatcaggacatagcgttggctacccgtgatattgctgaagagcttggcggcgaatgggctgaccgcttcctcgtgctttacggtatcgccgctcccgattcgcagcgcatcgccttctatcgccttcttgacgagttcttctgagcgggactctggggttcgaaatgaccgaccaagcgacgcccaacctgccatcacgagatttcgattccaccgccgccttctatgaaaggttgggcttcggaatcgttttccgggacgccggctggatgatcctccagcgcggggatctcatgctggagttcttcgcccaccctagggggaggctaactgaaacacggaaggagacaataccggaaggaacccgcgctatgacggcaataaaaagacagaataaaacgcacggtgttgggtcgtttgttcataaacgcggggttcggtcccagggctggcactctgtcgataccccaccgagaccccattggggccaatacgcccgcgtttcttccttttccccaccccaccccccaagttcgggtgaaggcccagggctcgcagccaacgtcggggcggcaggccctgccatagcctcaggttactcatatatacttagattgatttaaaacttcatttttaatttaaaaggatctaggtgaagatcctttttgataatctcatgaccaaaatcccttaacgtgagttttcgttccactgagcgtcagaccccgtagaaaagatctcgagataacttcgtataatgtatgctatacgaagttatgtcgacctcgagggggggcccggtacccaattcgccctatagtgagtcgtattaccggggcccaccttagaccgaaggggaaaacccgctctctcaggcgcatgtgccagttggggccccgcgggtagatgccggcaggccttccggaagaaaaagagccattggtttttgtagtattggggccctcttttagtgatactggattggcgttgtttgtggctgttgcgcacatccctgccctcctacagcactccaccttgggacctgtttagagaagccggctcttcaaagacaatggaaactgtaccatacacattggaaggctccctaacacacacagcggggaagctgggccgagtaccttaatctgccataaagccattcttactcgggcgacccctttaagtttagaaataattgaaaggaaatgtttgagttttcaaagatcccgtgaaattgatgccagtggaatacagtgagtcctcctcttcctcctcctcctcttccccctccccttcctcctcctcctcttcttttccctcctcttcctcttcctcctgctctcctttcctccccctcctcttttccctcctcttcctcttcctcctgctctcctttcctccccctcctctttctcctcctcctcctcttcttccccctcctctccctcctcctcttcttccccctcctctccctcctcctcttcttctccctcctcttcctcttcctcctcttccacgtgctctcctttcctccccctcctcttgctccccttcttccccgtcctcttcctcctcctcctcttcttctccctcctcttcctcctcctctttcttcctgacctctttctttctcctcctcctccttctacctccccttctcatccctcctcttcctcttctctagctgcacacttcactactgcacatcttataacttgcacccctttcttctgaggaagagaacatcttgcaaggcagggcgagcagcggcagggctggcttaggagcagtgcaagagtccctgtgctccagttccacactgctggcagggaaggcaaggggggacgggcctggatctgggggtgagggagaaagatggacccctgggtgaccactaaaccaaagatattcggaactttctatttaggatgtggacgtaattcctgttccgaggtagaggctgtgctgaagacaagcacagtggcctggtgcgccttggaaaccaacaactattcacgagccagtatgaccttcacatctttagaaattatgaaaacgtatgtgattggagggtttggaaaaccagttatcttatttaacattttaaaaattacctaacagttatttacaaacaggtctgtgcatcccaggtctgtcttcttttcaaggtctgggccttgtgctcgggttatgtttgtgggaaatgcttaataaatactgataatatgggaagagatgaaaactgattctcctcactttgtttcaaacctttctggcagtgggatgattcgaattcacttttaaaattaaattagcgtgttttgttttgttttgtttttgtttttgtttgagagggtctcattctgtcgttcctgggttcctctttttttcagggattctcctacctcagcctcctgagtagctgggattacaggcttacaccaccacgcccggctaatttttgtatttttagtagagacagggtttcgccatgatggccaggctgatcagggtctatttttttcggtactaatcaggaaaaatcaggtaattaagaaatagtgcacttgagttttgagttggagcaccctgtgaggggatgaatatccagttttgttttatttttaatttaagaatatcttctcatgatgactttctcgggtaatatagtctagagcgtgggagacagctcggagtactgctggccaatactgcttcctggcagagccaagcgccgcccacctgacgcctcagtgctgcgggtggtgagacccgtcgctggctcccaccatggtcaggtctcctctttcctcccaaagctgaggacgcaggcgaggccgttttctgtgacccttccaaaagaagcgttgttttggatgagtctctgtccccggaggccgagggccaaaagtgtcttatgttagaggcaaagatgcccggatttagagggcttccaacccctaggaccactttgctcttccctgcaggaagctctcagatgggcgccttagcccggtggtgcacccgacggccctccccggcgctccctgtgttcagtaccagtacctcactcccaggcgtcgctgcttttcttttactttttgcaaagatagacgctgtttgttgttgccgttttgttttgttttgttttactggagagagatatcgagtccctcgggataaaattaagtcccttggatcagaaaggggaacttgcgcatccttgagagtgctctttccttgcggttctccacacccgcctgggctctggggtggggcaaatctgcgctcgcatccttggtccctcaaatattggcccagcccgaagtcctgataaaatgattcgaactctcagtgactcagtttcttcatccagaaagtggaggcaaatactacttcatggagttgctgtgaggtttaaaccaagaaatacctgtaaaatgctaattcggcatctaggaatccctccacaaacagtagctattgttttaggctgtcatcgtcgtcgtcgtcagaggcaatcgggagctgctgttgtggagtttctaaagtcccccaccagtcccccggcagcccctcccctctggcaaacccccacactgtcgctgttgatatgagttttattcctctacccactcatctttcccgaacactgcctagtttcaggatgcccttcctcataaataaactccctaggttttccacagcaaacttcaccaggcaaagaactgcagctccgccgaccagttagttggtggaggcgcagaaacttgtcctcggaccccacgcagaagccgccgccctctccaaggctccggccccgacttcgctctgcgaattgggccagccgctgcttttccgcgagacccgagggttcgccaaggagaggagaagaggcacaggctgcctgagactggtcttcgggcagccgagggcgcgggatgactcgggcaggcgtgtggcctccgactgaccagggttgggcccgggatcagagctttgcttggaagttctctgggtggcagagactcgggcaaccggagcctgagcctcccgcggggaagagctcggactccggaggtcgcgccgccttgggcttgaattcagtccttccttactactcgtggctttgcttacatcatttaactctccatttccttgtctatacagtgggctcataaggaggcggtaaggagatgatgatgtctttgaagagtttaggacaggacctggtgtctcccgtacgcttggtgggggtggcggaggtgatgcgttgttaacaggagaaaccgaccttccagggaggcccagggaggcagcggagagcgaagtcctgctcggcggagagacctcgaggagagtatggggaaaggaatgaatgctgcggagcgcccctctgggctccacccaagcctcggaggcgggacggtgggctccgtcccgaccccttaggcagctggaccgatacctcctggatcagaccccacaggaagactcgcgtggggcccgatatgtgtacttcaaactctgagcggccaccctcagccaactggccagtggatgcgaatcgtgggccctgaggggcgagggcgctcggaactgcatgcctgtgcacggtgccgggctctccagagtgagggggccgtaaggagatctccaaggaagccgaaaaaagcagccagttgggcttcgggaaagacttttctgcaaaggaagtgatctggtcccagaactccagggttgaccccagtacctgacttctccgggagctgtcagctctcctctgttcttcgggcttggcgcgctcctttcataatggacagacaccagtggccttcaaaaggtctggggtgggggaacggaggaagtggccttgggtgcagaggaagagcagagctcctgccaaagctgaacgcagttagccctacccaagtgcgcgctggctcggcatatgcgctccagagccggcaggacagcccggccctgctcaccccgaggagaaatccaacagcgcagcctcctgcacctccttgccccagagaccgtccgagctggagccacaagccctccattcctcttggaatcttcaaccccaaggtaaggtaagttcacc

SEQ ID NO: 19 - DNA, 8470 bp, Artificial sequence
  PDX1 ATG-GFP-knockin plasmid 5' arm
agatgggatcctagtgttttctcgctgccctttactcaggagctaggagaacagaaagcaaataaccaagaaaccaacacactcagtaatctggatttctcagagttgagccacagcacttggaaatcaaatattggctcctcctgaacgccccttttagcctggtgttgttaaccagtttaacattcccttatcacatgctcatgtgggcagaattaaatggaattagctgcaaattatataaaattcatttacctttaaaggaagctatttggtcatgttcagtgtagacagagcattgcattaagacacaagttaatggtactgcctggagatgaatcaatttgctttggttttattacctccctttatttgttcttatgtggtagctactgtgactggaaatgctcagctcaggttcacagagcccatgtcagagccacattaacatctcaaggagagtcccactctttctaaagagctcagtccaagtaaacacagtagcaaagtaagatcatgctgatcctcccttaatacttagtcacaaagaatggatgctgaacaaggtggcttatgcctgtaatcctagcactttaggaggcctaggtgggaggatcgcttgaggccaggagttcaagaccagcccggacaacatagcaagaccttgcctttacaaaaaaaaaagaaaaaagaaaaagttagccgggcatggtggagcatgcctgtagtcccagctactccaaaggccgaggagaaaagattgtttgagcccaggaggttgaggctgtagtgaggtaagattgtgccactgcactccagcctgggtgacagagggaaaccctgtctcaattaagaagataaataaattttaaaatgggtgatgtctaagagagaaaggcaaacctatgagaatgttgaggattgataagcatcttgtccatataggggttcaaataacatctattgaacttctgctttctgcactgacttaggcatttttctaagatttcttcatttcgacctcaccacaacctcatgatgcacaggtatatttttatttgaaagtgcatgcttcatgagttctttaagagagtatataaatctctatataacaaataaattatgcttgaggtgtctattgttgttctcaatttataatgttgataagaatgactgtgggcaggcgcagtggctcacgcctataatctcagcactttgggaggccagcgtggacagatcaagagatcaggagttcaataccagcctggccaacatagtgaaaccccatctctactaaaaatacaaaaaaattagccaggcatggtggcatgtgcctgtagtcccagctacttgggaggctgaagcaggagaattgcttgaacccagcaggtggaggttgcagtgagccgagattgggccactgcaccccagcttaggcaacagagtgagactttgtctcaacaacaacaacaaaaaaaaaaacaaaaaaaagaatgactgtgtacatgtttaaaatgcagactccccagtctcactcacccccatatcgttattcagaaggtctggggttgggctcagatattttcattttataagcatcccagtgattcttgatatacacagttcatgagtcacacttccaggaacacttccctataaatccatgttacttcattgattagtaagagtttgtatttttctgagatttgcctgaaggtaaatgtgttgcaatatgtaactggagaaaatataaaaaataaatgtatccaaatactgtgtctctgttcacaacaatacactcctaagagatatctaccacaggaagaattcctaattggcaaatatgataaagttgagaccacagtcagttagccttttactttaatctttgcaagagaggctgtggacctagcctaggctgtcaaaagagaaggcttcacttgtgctgctctgagtttagcattgactctcccatcttaaccccatcgatttctaattttaacgtggatttgatttggggggacacacagaggaatcactttgacggcagtgttcctgcaccctcacaaagacaaccagggttgaccatgaccgtttttctgatgtggaaaaagcaggaatggggcaggattccagctctgctctggcctagagactagaatgactcctttccctccctagacattttaaggtttcctctgagtttatgatgacagcttcatctccaacccacgaaagcaagaaccacagacaatgctagtgggggtgctctctggccagaacacactacttagatgctgggttccacacctactgggatagctaaggcattttgagttgtgattagttcacctgctcaagtctttattttggctttcctggctgtgaaaaagaaggccctgccccttctccacacctgtggggtctctctgtggtgtgctgatggcggacatgagagttctccagcaatccacctcctccagcccttttaagcaggactgtacctgggggcacattcccctaaaacactgagtaatatacctactaagtacttcctcccagtgttcctgaatatacctttccaggtctacccatctggaaatatctttagacatcagctcatggtgatagtctgtcattcttctggatgcagtaatagccaatagttcaatgtttatatgcacattaaaagcaatgctgggggagaaaggaagagatgaccatttattgaatgctttcaaagtgccaaaaacattagatgttttgtctcattaaatcctcacaaaaacaataaaaaatattttttgagtgcctactatatagtaagatagtacagtgtcacagccaacagaatggattttaaggccacatcaaggccaggtgtggtggctcatgcttgtaatcccagcactttgggaggccgaggtgggcagataacttgaagtcaggacttcgagaccagcctggccaacaggaaaaaccctgtctctactaacaatacaaaaattagccgggcatggtggtgcgtgcctgtaatcccagctactagagaggctaaggcaggagaatcgcttgaaccccagaggcagaggttgcggtgagccgagatcatgccactgcactccagcctaggcgacagagcaagactcagtctcaaaaaaaaaaaacaaaaaacaaaaaaccaggcatggtggcctgtaatcccagtactttgggaggccaaggtgggtggatagtctgaggtcaggagttcgagaccagcctgaccaacatggtgaaacccgtctctactaaaaatacaaaattagccaggcatggtggcacatgtctgtaatcccagctacttgggagtctgaggctggagtatcgcttgaacccaggaggtggaggttgcggtaagccaagatcatgccatggcactctggcctgggcgacagagcaaaactctatctggaaaaaaaaaaaaaaaaaagccacatcatctctgcttggatctaggctctgccacttactagctatataattctaggcaagtaacttaccatcactgggcctcaatttcctccactggaaaatgggataacagtaattggctcatggggttaacattggaaaatatttaaacaacgcctggctccatgcatttgccattacgattactatgtgcaacggggccagcttatggaacagtgctagtatttccattttacaaataagggcagggaagcttagtgaagtcatgtaacttggcaagggacacacagcttgtgcagggcagagcctgatgtggaggacaggtgtatgcagctcctgacctttctatggcccgccaaagccagcgcatatttctaccaatgagttttggttactcaaagagtgtgcaggcaggtgcacagtgagagatctacaggcatttgatcagtatatgttaccgaaaatctgggtccttcaaagcataaaccatgtgaaatgtaggatggttgaggaaggaagctggagggtagtgtgggtcaagccttctttaggctgcagcaggaacctggaggtaaggagaggctcctaggagaacaaaggattagtcataggaaatggtggtgggaggaggaggtggaaggcaaagaaaaggaactgtgtggaagcaaggagctggttacctaggactaagctcagaagggaagcagcagggatttctggagactgcacatctggaaggtagaaccagagatgagacaaccaaaggggtgagtccagagctgtagggggtgagccaccgggaacaccaggagtggggagcaacagctgacctcagatcctttggagcctgaaagtcctttcatacttttcctttcatcagcagagtgaactgaggaccacggaaggattaaaccaaaagtggaaagagctcgtgcctgggggccccactcccagggaggaagcgttgagcagtggctggaggaagcagcagacagttctggggcacacggagtcccccctcctgcccttctactcctcttacaccagagagagctaacaaggtagggaataagacaattacccaattcaattcggtttttaagctgcttttatctttacagttcagggatcactgaatcatctggaaaataatttcagctctctgcttattttcactagattgcttagccctaggaatattggaaaacccttcattcaaagtctgaggtcctttcctctctccaatccccacaacccaagctgggtttccctggcccctctcagacctggataccaaattctgggtatttatttatatatatatatatatttttaattttttgagacggagcctcgctctgtctcccaggctggagggcagtggcgcgatctcggatcactgcaagctccgcctcctgggttcacgccattctccttcctcagcctcccaagtagctggaactacaggcgcccgccaccacgcccggctaaatttttttgtaggtttagtagagacggggtttcatcatgttagccaggatggtctcgatctcctgacctcatgatccgcctgtctcagcctcccaaagtgctgggattacaggcgtgagccaccgccctcggccaattctgggtattcataaaccagcaggagggaaacattgattcgacttaggaaaatgaaaacctgcctgcattagtgctcattgaaggaaatgctaatgaactaaagtgcaatcaattatagaagtattctcattccacacatcacatcgtttgctttacagaattttccaactcaagaaacaatttttattttcaacagagatttaattataaaatgaatataaattccacgtgcattcatgatgtataccttggagttaagtgggattcatctgtttttttcatttataatgggatgcagtggcttaaaaatcctatcaccaagccaaattcagcccttagcatgcctctgaaaccaccgaggaagacttagccacttaccaagaacaaggtaacctgtgttctcccgggtgtaaaccgcgtctctgtgaagggaaagggggaagagggccggcaaggacctccagtatcagcgaggactatcaggacgtccagctaataaacgactttttcactgtccacactttaattggtttacagccttttttgtttatttatccataagagctgctgttaaatggctcgggaaggtgctcgcctaatggctcggtatcgctgccgggcctgttgtgggcgaggcggcttggagggggcgcaggcgtcagcggggattcagagcggaaacgcatttcgcctgtaatggactcggcgattttacgataccaggagctagatccacggggaagtacaacacacgaccttactaagcggagggttccgcttgatgcgttttttatacggctgtacgtgataaaattccagataactttgtttcatctaataataataataacaataataaatggttgtttgacctttgctccctgggtcccttctataggtcgcaggcagcagaaaatgctaattgtgaaagtgagaacgcgcctccatggaatacccccggcgatcccctcctcctcccccacagccgcgggtacccgggtttttgccggcgaccgcaaccggcggatttgctttctgctgagagcctcttttctttctgcagggccgagcaaaaatattaaatggaagcaaatgaagcatcgaaatggagaccaatttacagaaatgtgcaattagttgagaagtgcaaagtaaacactccgggggtggcaggcgaggcagggagcaggggagggagagtggggcgcagactgagtccagagtgggtgtaggggtgcccagggaggaggggaagggggaggaaaaggagggggaggggaaaagtggccgatctttgtcctgagcggagcttgccgtccgctcataaccgcgtcgccaagtcaaccctcggcgactcggcagattatctccaagggtcaacacgccgcggccaggcaaccccctccagcctgccctcctgatcgatgtggtcactcgcggccagggtgatagggtagagttctccgcggccgcagacaatggactcattgacgcgggcgcacagagattaggtgcccgggccccacggcctttcactctctgcccccaccaaaactgcaggtggcacttttccctgaagaaatcaccgaaactctccccgcccgccgccgtgcttcccttggcctgtcttcggtgacagcaagggcatctacaagccagggagccacacatcagagccacacacatgaggccacaggccaggaagccacacacatgagttctcacacatcgaagcaaatgctgagactataccggcctcccgcaagagaaggaatctgcagagaagtccacattcccgactggcttttttgtcttttaataaaaataaagagtcctcagaatagagcactcaatccgcacttaaaacacaaatatttccagtaggaagaaagaaatacattaagattgactctcaaaggtctggatgttggtgcgttgtttaggaaaggcggagcagtgatttttctctggcttggttctttgtggttcaagctctctcttgctgagacgtttctgcaaagctgtctagtttttctaaaacccacggtggcgtttcgagaaacgtcctcatttcgggagtatccagtcagaggctggtcaggccgccaggcctagcggatcatgcccaggcagggggttggacgtcaccgccacccggaggtcatccatccgcgtcagtgggtgcagaaaaagtggccctgtttaagtcaggaccccagaatgcccagaagttactgaatggtttgaagccaagcacagatgttatcatggaaaatgcagcgtttttatttctttttctaaatatgtaactcttcctccacttccccctctcctgcttgccttatttcaattgcaagcagaagagagtgagtgttctctgccggcaaactccgccagggtcccggcccgtagagagtcgtcaagggtctggaacccccgtgccaacacctgcccctgcttcgcagccccaagaggaaggccgcgtctttccccctcgctgtattgggaagctacgttccgggctggccaaatgggccccaattttccaaaacccaaatttgtaatacccttcaattttttaaaaaaaagaatttaaaaaagtctctgtgaatgcttcagaagttaccgtttacaccccagaagtacttgcagcacatccacaagtaaaaacacacaacgaatgccagagtttcgtgtgttttttaaccgacatctttgtggctgtgaacaaacttcataaataaaatagaatcaaatgcttctgacctagagagctgggtctgcaaactttttttttatcgtattccgcaacagttaaataaaaaattaaaaactcaacatgtctccttgtaaactacatcaattaacaaacacactatgtccattatcaaatataatagaaaaaatataggaaaatagaaaatagaaaaatataggaaaatagaaacttttaagccacggtgaaaatgtttctataaatgagtggttctaatgttttcgtgagcgcccattttggggagcaccgccagctgcccgttcaggagtgtgcagcaaactcagctgagagagaaaattggaacaaaagcaggtgctcgcgggtacctgggcctagcctcttagtgcggccagccaggccaatcacggcccccggctgaaccacgtggggccccgcggagcctatggtgcggcggccggcccgccggtccgcgctggctgtgggttccctctgagatcagtgcggagctgtcaaagcgagcaggggtggcgccgggagtgggaacgccacacagtgccaaatccccggctccagctcccgactcccggctcccggctcccggctcccggtgcccaatcccgggccgcagcc

SEQ ID NO: 20 - DNA, 4280 bp, Artificial sequence
  PDX1 ATG-GFP-knockin plasmid 3' arm
cggggcccaccttagaccgaaggggaaaacccgctctctcaggcgcatgtgccagttggggccccgcgggtagatgccggcaggccttccggaagaaaaagagccattggtttttgtagtattggggccctcttttagtgatactggattggcgttgtttgtggctgttgcgcacatccctgccctcctacagcactccaccttgggacctgtttagagaagccggctcttcaaagacaatggaaactgtaccatacacattggaaggctccctaacacacacagcggggaagctgggccgagtaccttaatctgccataaagccattcttactcgggcgacccctttaagtttagaaataattgaaaggaaatgtttgagttttcaaagatcccgtgaaattgatgccagtggaatacagtgagtcctcctcttcctcctcctcctcttccccctccccttcctcctcctcctcttcttttccctcctcttcctcttcctcctgctctcctttcctccccctcctcttttccctcctcttcctcttcctcctgctctcctttcctccccctcctctttctcctcctcctcctcttcttccccctcctctccctcctcctcttcttccccctcctctccctcctcctcttcttctccctcctcttcctcttcctcctcttccacgtgctctcctttcctccccctcctcttgctccccttcttccccgtcctcttcctcctcctcctcttcttctccctcctcttcctcctcctctttcttcctgacctctttctttctcctcctcctccttctacctccccttctcatccctcctcttcctcttctctagctgcacacttcactactgcacatcttataacttgcacccctttcttctgaggaagagaacatcttgcaaggcagggcgagcagcggcagggctggcttaggagcagtgcaagagtccctgtgctccagttccacactgctggcagggaaggcaaggggggacgggcctggatctgggggtgagggagaaagatggacccctgggtgaccactaaaccaaagatattcggaactttctatttaggatgtggacgtaattcctgttccgaggtagaggctgtgctgaagacaagcacagtggcctggtgcgccttggaaaccaacaactattcacgagccagtatgaccttcacatctttagaaattatgaaaacgtatgtgattggagggtttggaaaaccagttatcttatttaacattttaaaaattacctaacagttatttacaaacaggtctgtgcatcccaggtctgtcttcttttcaaggtctgggccttgtgctcgggttatgtttgtgggaaatgcttaataaatactgataatatgggaagagatgaaaactgattctcctcactttgtttcaaacctttctggcagtgggatgattcgaattcacttttaaaattaaattagcgtgttttgttttgttttgtttttgtttttgtttgagagggtctcattctgtcgttcctgggttcctctttttttcagggattctcctacctcagcctcctgagtagctgggattacaggcttacaccaccacgcccggctaatttttgtatttttagtagagacagggtttcgccatgatggccaggctgatcagggtctatttttttcggtactaatcaggaaaaatcaggtaattaagaaatagtgcacttgagttttgagttggagcaccctgtgaggggatgaatatccagttttgttttatttttaatttaagaatatcttctcatgatgactttctcgggtaatatagtctagagcgtgggagacagctcggagtactgctggccaatactgcttcctggcagagccaagcgccgcccacctgacgcctcagtgctgcgggtggtgagacccgtcgctggctcccaccatggtcaggtctcctctttcctcccaaagctgaggacgcaggcgaggccgttttctgtgacccttccaaaagaagcgttgttttggatgagtctctgtccccggaggccgagggccaaaagtgtcttatgttagaggcaaagatgcccggatttagagggcttccaacccctaggaccactttgctcttccctgcaggaagctctcagatgggcgccttagcccggtggtgcacccgacggccctccccggcgctccctgtgttcagtaccagtacctcactcccaggcgtcgctgcttttcttttactttttgcaaagatagacgctgtttgttgttgccgttttgttttgttttgttttactggagagagatatcgagtccctcgggataaaattaagtcccttggatcagaaaggggaacttgcgcatccttgagagtgctctttccttgcggttctccacacccgcctgggctctggggtggggcaaatctgcgctcgcatccttggtccctcaaatattggcccagcccgaagtcctgataaaatgattcgaactctcagtgactcagtttcttcatccagaaagtggaggcaaatactacttcatggagttgctgtgaggtttaaaccaagaaatacctgtaaaatgctaattcggcatctaggaatccctccacaaacagtagctattgttttaggctgtcatcgtcgtcgtcgtcagaggcaatcgggagctgctgttgtggagtttctaaagtcccccaccagtcccccggcagcccctcccctctggcaaacccccacactgtcgctgttgatatgagttttattcctctacccactcatctttcccgaacactgcctagtttcaggatgcccttcctcataaataaactccctaggttttccacagcaaacttcaccaggcaaagaactgcagctccgccgaccagttagttggtggaggcgcagaaacttgtcctcggaccccacgcagaagccgccgccctctccaaggctccggccccgacttcgctctgcgaattgggccagccgctgcttttccgcgagacccgagggttcgccaaggagaggagaagaggcacaggctgcctgagactggtcttcgggcagccgagggcgcgggatgactcgggcaggcgtgtggcctccgactgaccagggttgggcccgggatcagagctttgcttggaagttctctgggtggcagagactcgggcaaccggagcctgagcctcccgcggggaagagctcggactccggaggtcgcgccgccttgggcttgaattcagtccttccttactactcgtggctttgcttacatcatttaactctccatttccttgtctatacagtgggctcataaggaggcggtaaggagatgatgatgtctttgaagagtttaggacaggacctggtgtctcccgtacgcttggtgggggtggcggaggtgatgcgttgttaacaggagaaaccgaccttccagggaggcccagggaggcagcggagagcgaagtcctgctcggcggagagacctcgaggagagtatggggaaaggaatgaatgctgcggagcgcccctctgggctccacccaagcctcggaggcgggacggtgggctccgtcccgaccccttaggcagctggaccgatacctcctggatcagaccccacaggaagactcgcgtggggcccgatatgtgtacttcaaactctgagcggccaccctcagccaactggccagtggatgcgaatcgtgggccctgaggggcgagggcgctcggaactgcatgcctgtgcacggtgccgggctctccagagtgagggggccgtaaggagatctccaaggaagccgaaaaaagcagccagttgggcttcgggaaagacttttctgcaaaggaagtgatctggtcccagaactccagggttgaccccagtacctgacttctccgggagctgtcagctctcctctgttcttcgggcttggcgcgctcctttcataatggacagacaccagtggccttcaaaaggtctggggtgggggaacggaggaagtggccttgggtgcagaggaagagcagagctcctgccaaagctgaacgcagttagccctacccaagtgcgcgctggctcggcatatgcgctccagagccggcaggacagcccggccctgctcaccccgaggagaaatccaacagcgcagcctcctgcacctccttgccccagagaccgtccgagctggagccacaagccctccattcctcttggaatcttcaaccccaaggtaaggtaagttcacc

SEQ ID NO: 21 - DNA, 916 bp, Artificial sequence
  PDX1 ATG-GFP-knockin plasmid 3' external probe
gcccagcgatgcgcaggatccgggggggatcacgcgcggcgaccctaccgagcgctccgtgcgcgcccccatctctcggatcgtgttcctggctctgtcgaagctgctgagtcccgcgattcgggaaatccggcacttgtttctcaccctacaccatcacgtggaaatcattgaaaatgggaaccctggtggagtatctgggagagcacgcttgtgccgaggggcctgagctatgggacttcctccaggtccctctgtttcctgccggcgtaggggactcgtagtgtcggatcgcatagtgccaaaaaatagtgcatgggaaacaaacaaaaacacctctcattttcttccgcaatatagtttttcctgtaggtgggctaacatagtacctgaagaagttctcaccttgaagagctaaatccataccatacaatatctgagagttggtgatgatttcgggtcatgcatattgtttttaacagggatgatgtccataaataacttgctcttcgctccagtactggggcgtgaacgcattcagcaacatatgttggattcctgctttgctgcggcacgcaggaagcctcacagtgcttgccctggaagcactcacagtttttacaagacaaatcacatcttcccacttgatggtcaataccgtcatggagattgaattgattatcagtgactgaatttaccagagtaaacagaagtcactatgattccccaaaatgaatgctccttttgaacaagggcatttcatttcttaattttggcctccttagtctagcactgccaccctctccatatcctctccttcaaccagttcagttcaatgcatttaagtttgactgaaatttaagtattgtactttccttttcaaattggtgaatctacctgttctattttcatctcc

SEQ ID NO: 22 - DNA, 21183 bp, Artificial sequence
  PDX1-IRES-GFP recombinant plasmid
  5' UTR exon (8371)..(8470)
  coding sequence exon (8471)..(8880)
  coding sequence exon (12591)..(13033)
  3' UTR exon (13034)..(13150)
  3' UTR exon (16904)..(17340)
agatgggatcctagtgttttctcgctgccctttactcaggagctaggagaacagaaagcaaataaccaagaaaccaacacactcagtaatctggatttctcagagttgagccacagcacttggaaatcaaatattggctcctcctgaacgccccttttagcctggtgttgttaaccagtttaacattcccttatcacatgctcatgtgggcagaattaaatggaattagctgcaaattatataaaattcatttacctttaaaggaagctatttggtcatgttcagtgtagacagagcattgcattaagacacaagttaatggtactgcctggagatgaatcaatttgctttggttttattacctccctttatttgttcttatgtggtagctactgtgactggaaatgctcagctcaggttcacagagcccatgtcagagccacattaacatctcaaggagagtcccactctttctaaagagctcagtccaagtaaacacagtagcaaagtaagatcatgctgatcctcccttaatacttagtcacaaagaatggatgctgaacaaggtggcttatgcctgtaatcctagcactttaggaggcctaggtgggaggatcgcttgaggccaggagttcaagaccagcccggacaacatagcaagaccttgcctttacaaaaaaaaaagaaaaaagaaaaagttagccgggcatggtggagcatgcctgtagtcccagctactccaaaggccgaggagaaaagattgtttgagcccaggaggttgaggctgtagtgaggtaagattgtgccactgcactccagcctgggtgacagagggaaaccctgtctcaattaagaagataaataaattttaaaatgggtgatgtctaagagagaaaggcaaacctatgagaatgttgaggattgataagcatcttgtccatataggggttcaaataacatctattgaacttctgctttctgcactgacttaggcatttttctaagatttcttcatttcgacctcaccacaacctcatgatgcacaggtatatttttatttgaaagtgcatgcttcatgagttctttaagagagtatataaatctctatataacaaataaattatgcttgaggtgtctattgttgttctcaatttataatgttgataagaatgactgtgggcaggcgcagtggctcacgcctataatctcagcactttgggaggccagcgtggacagatcaagagatcaggagttcaataccagcctggccaacatagtgaaaccccatctctactaaaaatacaaaaaaattagccaggcatggtggcatgtgcctgtagtcccagctacttgggaggctgaagcaggagaattgcttgaacccagcaggtggaggttgcagtgagccgagattgggccactgcaccccagcttaggcaacagagtgagactttgtctcaacaacaacaacaaaaaaaaaaacaaaaaaaagaatgactgtgtacatgtttaaaatgcagactccccagtctcactcacccccatatcgttattcagaaggtctggggttgggctcagatattttcattttataagcatcccagtgattcttgatatacacagttcatgagtcacacttccaggaacacttccctataaatccatgttacttcattgattagtaagagtttgtatttttctgagatttgcctgaaggtaaatgtgttgcaatatgtaactggagaaaatataaaaaataaatgtatccaaatactgtgtctctgttcacaacaatacactcctaagagatatctaccacaggaagaattcctaattggcaaatatgataaagttgagaccacagtcagttagccttttactttaatctttgcaagagaggctgtggacctagcctaggctgtcaaaagagaaggcttcacttgtgctgctctgagtttagcattgactctcccatcttaaccccatcgatttctaattttaacgtggatttgatttggggggacacacagaggaatcactttgacggcagtgttcctgcaccctcacaaagacaaccagggttgaccatgaccgtttttctgatgtggaaaaagcaggaatggggcaggattccagctctgctctggcctagagactagaatgactcctttccctccctagacattttaaggtttcctctgagtttatgatgacagcttcatctccaacccacgaaagcaagaaccacagacaatgctagtgggggtgctctctggccagaacacactacttagatgctgggttccacacctactgggatagctaaggcattttgagttgtgattagttcacctgctcaagtctttattttggctttcctggctgtgaaaaagaaggccctgccccttctccacacctgtggggtctctctgtggtgtgctgatggcggacatgagagttctccagcaatccacctcctccagcccttttaagcaggactgtacctgggggcacattcccctaaaacactgagtaatatacctactaagtacttcctcccagtgttcctgaatatacctttccaggtctacccatctggaaatatctttagacatcagctcatggtgatagtctgtcattcttctggatgcagtaatagccaatagttcaatgtttatatgcacattaaaagcaatgctgggggagaaaggaagagatgaccatttattgaatgctttcaaagtgccaaaaacattagatgttttgtctcattaaatcctcacaaaaacaataaaaaatattttttgagtgcctactatatagtaagatagtacagtgtcacagccaacagaatggattttaaggccacatcaaggccaggtgtggtggctcatgcttgtaatcccagcactttgggaggccgaggtgggcagataacttgaagtcaggacttcgagaccagcctggccaacaggaaaaaccctgtctctactaacaatacaaaaattagccgggcatggtggtgcgtgcctgtaatcccagctactagagaggctaaggcaggagaatcgcttgaaccccagaggcagaggttgcggtgagccgagatcatgccactgcactccagcctaggcgacagagcaagactcagtctcaaaaaaaaaaaacaaaaaacaaaaaaccaggcatggtggcctgtaatcccagtactttgggaggccaaggtgggtggatagtctgaggtcaggagttcgagaccagcctgaccaacatggtgaaacccgtctctactaaaaatacaaaattagccaggcatggtggcacatgtctgtaatcccagctacttgggagtctgaggctggagtatcgcttgaacccaggaggtggaggttgcggtaagccaagatcatgccatggcactctggcctgggcgacagagcaaaactctatctggaaaaaaaaaaaaaaaaaagccacatcatctctgcttggatctaggctctgccacttactagctatataattctaggcaagtaacttaccatcactgggcctcaatttcctccactggaaaatgggataacagtaattggctcatggggttaacattggaaaatatttaaacaacgcctggctccatgcatttgccattacgattactatgtgcaacggggccagcttatggaacagtgctagtatttccattttacaaataagggcagggaagcttagtgaagtcatgtaacttggcaagggacacacagcttgtgcagggcagagcctgatgtggaggacaggtgtatgcagctcctgacctttctatggcccgccaaagccagcgcatatttctaccaatgagttttggttactcaaagagtgtgcaggcaggtgcacagtgagagatctacaggcatttgatcagtatatgttaccgaaaatctgggtccttcaaagcataaaccatgtgaaatgtaggatggttgaggaaggaagctggagggtagtgtgggtcaagccttctttaggctgcagcaggaacctggaggtaaggagaggctcctaggagaacaaaggattagtcataggaaatggtggtgggaggaggaggtggaaggcaaagaaaaggaactgtgtggaagcaaggagctggttacctaggactaagctcagaagggaagcagcagggatttctggagactgcacatctggaaggtagaaccagagatgagacaaccaaaggggtgagtccagagctgtagggggtgagccaccgggaacaccaggagtggggagcaacagctgacctcagatcctttggagcctgaaagtcctttcatacttttcctttcatcagcagagtgaactgaggaccacggaaggattaaaccaaaagtggaaagagctcgtgcctgggggccccactcccagggaggaagcgttgagcagtggctggaggaagcagcagacagttctggggcacacggagtcccccctcctgcccttctactcctcttacaccagagagagctaacaaggtagggaataagacaattacccaattcaattcggtttttaagctgcttttatctttacagttcagggatcactgaatcatctggaaaataatttcagctctctgcttattttcactagattgcttagccctaggaatattggaaaacccttcattcaaagtctgaggtcctttcctctctccaatccccacaacccaagctgggtttccctggcccctctcagacctggataccaaattctgggtatttatttatatatatatatatatttttaattttttgagacggagcctcgctctgtctcccaggctggagggcagtggcgcgatctcggatcactgcaagctccgcctcctgggttcacgccattctccttcctcagcctcccaagtagctggaactacaggcgcccgccaccacgcccggctaaatttttttgtaggtttagtagagacggggtttcatcatgttagccaggatggtctcgatctcctgacctcatgatccgcctgtctcagcctcccaaagtgctgggattacaggcgtgagccaccgccctcggccaattctgggtattcataaaccagcaggagggaaacattgattcgacttaggaaaatgaaaacctgcctgcattagtgctcattgaaggaaatgctaatgaactaaagtgcaatcaattatagaagtattctcattccacacatcacatcgtttgctttacagaattttccaactcaagaaacaatttttattttcaacagagatttaattataaaatgaatataaattccacgtgcattcatgatgtataccttggagttaagtgggattcatctgtttttttcatttataatgggatgcagtggcttaaaaatcctatcaccaagccaaattcagcccttagcatgcctctgaaaccaccgaggaagacttagccacttaccaagaacaaggtaacctgtgttctcccgggtgtaaaccgcgtctctgtgaagggaaagggggaagagggccggcaaggacctccagtatcagcgaggactatcaggacgtccagctaataaacgactttttcactgtccacactttaattggtttacagccttttttgtttatttatccataagagctgctgttaaatggctcgggaaggtgctcgcctaatggctcggtatcgctgccgggcctgttgtgggcgaggcggcttggagggggcgcaggcgtcagcggggattcagagcggaaacgcatttcgcctgtaatggactcggcgattttacgataccaggagctagatccacggggaagtacaacacacgaccttactaagcggagggttccgcttgatgcgttttttatacggctgtacgtgataaaattccagataactttgtttcatctaataataataataacaataataaatggttgtttgacctttgctccctgggtcccttctataggtcgcaggcagcagaaaatgctaattgtgaaagtgagaacgcgcctccatggaatacccccggcgatcccctcctcctcccccacagccgcgggtacccgggtttttgccggcgaccgcaaccggcggatttgctttctgctgagagcctcttttctttctgcagggccgagcaaaaatattaaatggaagcaaatgaagcatcgaaatggagaccaatttacagaaatgtgcaattagttgagaagtgcaaagtaaacactccgggggtggcaggcgaggcagggagcaggggagggagagtggggcgcagactgagtccagagtgggtgtaggggtgcccagggaggaggggaagggggaggaaaaggagggggaggggaaaagtggccgatctttgtcctgagcggagcttgccgtccgctcataaccgcgtcgccaagtcaaccctcggcgactcggcagattatctccaagggtcaacacgccgcggccaggcaaccccctccagcctgccctcctgatcgatgtggtcactcgcggccagggtgatagggtagagttctccgcggccgcagacaatggactcattgacgcgggcgcacagagattaggtgcccgggccccacggcctttcactctctgcccccaccaaaactgcaggtggcacttttccctgaagaaatcaccgaaactctccccgcccgccgccgtgcttcccttggcctgtcttcggtgacagcaagggcatctacaagccagggagccacacatcagagccacacacatgaggccacaggccaggaagccacacacatgagttctcacacatcgaagcaaatgctgagactataccggcctcccgcaagagaaggaatctgcagagaagtccacattcccgactggcttttttgtcttttaataaaaataaagagtcctcagaatagagcactcaatccgcacttaaaacacaaatatttccagtaggaagaaagaaatacattaagattgactctcaaaggtctggatgttggtgcgttgtttaggaaaggcggagcagtgatttttctctggcttggttctttgtggttcaagctctctcttgctgagacgtttctgcaaagctgtctagtttttctaaaacccacggtggcgtttcgagaaacgtcctcatttcgggagtatccagtcagaggctggtcaggccgccaggcctagcggatcatgcccaggcagggggttggacgtcaccgccacccggaggtcatccatccgcgtcagtgggtgcagaaaaagtggccctgtttaagtcaggaccccagaatgcccagaagttactgaatggtttgaagccaagcacagatgttatcatggaaaatgcagcgtttttatttctttttctaaatatgtaactcttcctccacttccccctctcctgcttgccttatttcaattgcaagcagaagagagtgagtgttctctgccggcaaactccgccagggtcccggcccgtagagagtcgtcaagggtctggaacccccgtgccaacacctgcccctgcttcgcagccccaagaggaaggccgcgtctttccccctcgctgtattgggaagctacgttccgggctggccaaatgggccccaattttccaaaacccaaatttgtaatacccttcaattttttaaaaaaaagaatttaaaaaagtctctgtgaatgcttcagaagttaccgtttacaccccagaagtacttgcagcacatccacaagtaaaaacacacaacgaatgccagagtttcgtgtgttttttaaccgacatctttgtggctgtgaacaaacttcataaataaaatagaatcaaatgcttctgacctagagagctgggtctgcaaactttttttttatcgtattccgcaacagttaaataaaaaattaaaaactcaacatgtctccttgtaaactacatcaattaacaaacacactatgtccattatcaaatataatagaaaaaatataggaaaatagaaaatagaaaaatataggaaaatagaaacttttaagccacggtgaaaatgtttctataaatgagtggttctaatgttttcgtgagcgcccattttggggagcaccgccagctgcccgttcaggagtgtgcagcaaactcagctgagagagaaaattggaacaaaagcaggtgctcgcgggtacctgggcctagcctcttagtgcggccagccaggccaatcacggcccccggctgaaccacgtggggccccgcggagcctatggtgcggcggccggcccgccggtccgcgctggctgtgggttccctctgagatcagtgcggagctgtcaaagcgagcaggggtggcgccgggagtgggaacgccacacagtgccaaatccccggctccagctcccgactcccggctcccggctcccggctcccggtgcccaatcccgggccgcagccatgaacggcgaggagcagtactacgcggccacgcagctttacaaggacccatgcgcgttccagcgaggcccggcgccggagttcagcgccagcccccctgcgtgcctgtacatgggccgccagcccccgccgccgccgccgcacccgttccctggcgccctgggcgcgctggagcagggcagccccccggacatctccccgtacgaggtgccccccctcgccgacgaccccgcggtggcgcaccttcaccaccacctcccggctcagctcgcgctcccccacccgcccgccgggcccttcccggagggagccgagccgggcgtcctggaggagcccaaccgcgtccagctgcctttcccatggatgaagtctaccaaagctcacgcgtggaaaggccagtgggcaggtaagcctggctccccacccctttctcctttccggttctcacccggccgccttacctccaagcgctcccaggagccttctctctgttcccggcgccttggattatcccgggtcggactaaactacatcagggagctaccgagcccatccctcacagcagtgcttctctagtccagtttgaagcatctttcccacccagctctcctgggagtgtacactccttccttccctgttcgctgagcccatcttcgccccaggagcccgcgctcccagcgccatccttagagagccgaggctgagtcctgctcagggcttcggacactacagatcctcctccagcaggggatccgggaacccaggactccttggtagtgcacatcgaggaagccgagtagggacatgggtgcctcggacccaggccccagatcgccttcggagccccggagcccctcacttcccgcgcttcgttaaggaagggcaggcatctaggggcgccaggtaggtgcagaaaggcagggagggaaaggaaactgcacccaacccagcagtgtccggctgccctggttgtggaaacaggataggagtaaagaggaaggggctggggcaaggcgggggctcaccgcgaggctgaaagccggcctctcaacgtcagagcctggcagctaggagagcaatctgagaagcgaattcgtttttcaccaaccgaaagcaattgaagctgtctccccgcaccgcttcccaggaagtaatttttcaggagatgggcgctccctgcctagctggtggggaggcgagaggcctggttcctgcggccctccgcgccggcagagaacagaaggtctttcccggagccgggagccggaggcacggggtagcccccgggtcctttgcggccccgcgcgagcggcaagttccggcgcggcctgtgtcgtcgccgctactcactgtcatcgctgccgtgcctcagccacttctggtcacacctgcaccgcaaatagttgccttttcctttcaactggcagccgggagtagggggaagcagctcgagccggcgtcccccggcccaccccgaaaatcctcagcgcccatctgcggggtctggccagccctgcctgacactgaccccaggcgcagccaggaggggctttgtgcgggagagggagggggaccccagcttgcctggggtccacgggactctcttcttcctagttcactttcttgctaaggcgaaggtcctgaggcaggacgagggctgaactgcgctgcaatcgtccccacctccagcgaaacccagttgacaggggcgccagaagctgccgcggcgcctctgcaaatttatccagctcgcgcagcccgggccaaaggccttgaagtctccggaaatgcggggttcttaggaggcgggaggacagtccctcgaacaaaggtggggggctcctcgtcctcacccagttttcttccagggctgcctcccctccagacctctcttctggcctcctaggccctcggagctcctgctttcccaccctgggccttcctcaggaaatgggcgacatcagggtcccgaaagaggatttgtgaggtggagtaacttccctatcccaacccaaggggtgatacctctgctctggaggacttgggcttaggctgacccaagaagccagaaagtaaaaccagaaggcaaatcagcagccttggcgagggttcggggacccaaggagggcgacactctcgggctggagttggccccaggcctttgctggcgccctctaacccgctgcatgctcgactctcggggaaggagacgacctcccctctcttcccctggaagccgtctgcggggccggctgctatccccgcgttcctctaggggaaacttcgatggagccgaaattcaaaaattgcaaacccacctgcccctgggaagagcgaagtgacaaaagggctctcactggcagtacgaatctgaatgctaatgacaacagaggttttgaaaaacattgacccccaaatgcttcagcagcgctgtccagctggcacctaaactgcatcactctgcgccttggggaagggcccaggcttggcgaccttgaccttttcccaccatcctcaacctccacccctgccgcgtcgcgctgagcacaggtcccccgggaatagtgcaccccaggaagtctctccctgagcagtctctcgcagggacttcacgaagccctctcgcagggactatacgaagcccgcagcctaaggcaggaacccagagacatgtcggtttaatgtaaaaactttggagagcctttcaaaatgtttattgaaggcccgtctcgcttctctcccaggcgtgggatgccaggtagattcggggatgcccccagggagtagaactctccctggactagggtttgagcctctgcttcagcttctggcgcctcttctcgacctggggggaaacccagtagggttccatcgcgaaattaaacccgcccccaacacacacacactcgcctttcaattccttaaggcttagccaacattcacaggagaaatgtcccctgcctttgctctaagacaagcctctccccggaactttggtggaacttcccgcgccagcgtccacagcctgggtgcagtcagtattttccacagaaaagaaaagattgggacctggctgagcgcagcggcaaacagtgaatgtgggtctccaacctcctgggccagggcgtcctgttgcctcttggagacacgagaggcttgtttctgcaccactaccacctcctccgtagggctgtcggttctgcagctgggctagggcccctgtgtctcccctcaacacctctgagggcatttgggatccagggcgtagagtctggagctgccagagttctgccctggccaacgtgacccccagaacaatattccttcacttcgcgggcagaagtccggctgaagttaaaacaattatggagaatttgctggctctcaggttgggactaattacgatataactatagagagaggaaacacatggtcagatataacaaaatgtgtcacagtctccattagcacaaagattttcaaactgcaggttgcacccattcgcaggtcataaaatcaatttactaggttgagattagtattttttaaacgaaatagcagataatggagagaaaagtagatagcatcatacgtggtaaacgtttgttttatgtccttaagatttgtcagtataactgacctgcagtgtccgtgtgtgaactacacaacgatccgaaatgtatttctcacatttgtgggtcaccatcaggaggttttttttagccctggattaaaggcgttttattgcctttgtaggatccagccggtttaactattatatacatttaaatcaacatcaatcagttgattaacaccgattatatgagcgcattcaaggaccactcattggcagagccaagcttaggctcacggcgagagctgactcgagtttggtctccaataaaaaggctatctttattaggaagggcttgagttactagggaagagcttcgcgcgcctacactaggcgctgaaatgggatgctggggcttggtggctccggcgggagcagctggtagggctagggctccctggccccccttgaaggggttgggctgcgtgggtgggggctgtgcggggctccgggggccacactcacgccctgtgtcgcccgcaggcggcgcctacgctgcggagccggaggagaacaagcggacgcgcacggcctacacgcgcgcacagctgctagagctggagaaggagttcctattcaacaagtacatctcacggccgcgccgggtggagctggctgtcatgttgaacttgaccgagagacacatcaagatctggttccaaaaccgccgcatgaagtggaaaaaggaggaggacaagaagcgcggcggcgggacagctgtcgggggtggcggggtcgcggagcctgagcaggactgcgccgtgacctccggcgaggagcttctggcgctgccgccgccgccgccccccggaggtgctgtgccgcccgctgcccccgttgccgcccgagagggccgcctgccgcctggccttagcgcgtcgccacagccctccagcgtcgcgcctcggcggccgcaggaaccacgatgagaggcaggagctgctcctggctgaggggcttcaaccactcgccgaggaggagcagagggcctaggaggaccccgggcgtggaccacccgccctggcagttgaatggggcggcaattggatccaattaaccctcactaaagggaacaaaagctggagctccaccgcggtggcggccgctctagaactagtggatccgcccctctccctcccccccccctaacgttactggccgaagccgcttggaataaggccggtgtgcgtttgtctatatgttattttccaccatattgccgtcttttggcaatgtgagggcccggaaacctggccctgtcttcttgacgagcattcctaggggtctttcccctctcgccaaaggaatgcaaggtctgttgaatgtcgtgaaggaagcagttcctctggaagcttcttgaagacaaacaacgtctgtagcgaccctttgcaggcagcggaaccccccacctggcgacaggtgcctctgcggccaaaagccacgtgtataagatacacctgcaaaggcggcacaaccccagtgccacgttgtgagttggatagttgtggaaagagtcaaatggctctcctcaagcgtattcaacaaggggctgaaggatgcccagaaggtaccccattgtatgggatctgatctggggcctcggtgcacatgctttacatgtgtttagtcgaggttaaaaaaacgtctaggccccccgaaccacggggacgtggttttcctttgaaaaacacgatgataatatggccacaaccatggtgagcaagggcgaggagctgttcaccggggtggtgcccatcctggtcgagctggacggcgacgtaaacggccacaagttcagcgtgtccggcgagggcgagggcgatgccacctacggcaagctgaccctgaagttcatctgcaccaccggcaagctgcccgtgccctggcccaccctcgtgaccaccctgacctacggcgtgcagtgcttcagccgctaccccgaccacatgaagcagcacgacttcttcaagtccgccatgcccgaaggctacgtccaggagcgcaccatcttcttcaaggacgacggcaactacaagacccgcgccgaggtgaagttcgagggcgacaccctggtgaaccgcatcgagctgaagggcatcgacttcaaggaggacggcaacatcctggggcacaagctggagtacaactacaacagccacaacgtctatatcatggccgacaagcagaagaacggcatcaaggtgaacttcaagatccgccacaacatcgaggacggcagcgtgcagctcgccgaccactaccagcagaacacccccatcggcgacggccccgtgctgctgcccgacaaccactacctgagcacccagtccgccctgagcaaagaccccaacgagaagcgcgatcacatggtcctgctggagttcgtgaccgccgccgggatcactctcggcatggacgagctgtacaagtaaagcggccgcgactctagatcataatcagccataccacatttgtagaggttttacttgctttaaaaaacctcccacacctccccctgaacctgaaacataaaatgaatgcaattgttgttgttaacttgtttattgcagcttataatggttacaaataaagcaatagcatcacaaatttcacaaataaagcatttttttcactgcattctagttgtggtttgtccaaactcatcaatgtatcttaaggcgtaaattgtaagcgttaatgggctgcaggaattcgattcaaggatccataacttcgtataatgtatgctatacgaagttatctcgagcgtcaggtggcacttttcggggaaatgtgcgcggaacccctatttgtttatttttctaaatacattcaaatatgtatccgctcatgagacaataaccctgataaatgcttcaataatattgaaaaaggaagagtcctgaggcggaaagaaccagctgtggaatgtgtgtcagttagggtgtggaaagtccccaggctccccagcaggcagaagtatgcaaagcatgcatctcaattagtcagcaaccaggtgtggaaagtccccaggctccccagcaggcagaagtatgcaaagcatgcatctcaattagtcagcaaccatagtcccgcccctaactccgcccatcccgcccctaactccgcccatcccgcccctaactccgcccagttccgcccattctccgccccatggctgactaattttttttatttatgcagaggccgaggccgcctcggcctctgagctattccagaagtagtgaggaggcttttttggaggcctaggcttttgcaaagatcgatcaagagacaggatgaggatcgtttcgcatgattgaacaagatggattgcacgcaggttctccggccgcttgggtggagaggctattcggctatgactgggcacaacagacaatcggctgctctgatgccgccgtgttccggctgtcagcgcaggggcgcccggttctttttgtcaagaccgacctgtccggtgccctgaatgaactgcaagacgaggcagcgcggctatcgtggctggccacgacgggcgttccttgcgcagctgtgctcgacgttgtcactgaagcgggaagggactggctgctattgggcgaagtgccggggcaggatctcctgtcatctcaccttgctcctgccgagaaagtatccatcatggctgatgcaatgcggcggctgcatacgcttgatccggctacctgcccattcgaccaccaagcgaaacatcgcatcgagcgagcacgtactcggatggaagccggtcttgtcgatcaggatgatctggacgaagagcatcaggggctcgcgccagccgaactgttcgccaggctcaaggcgagcatgcccgacggcgaggatctcgtcgtgacccatggcgatgcctgcttgccgaatatcatggtggaaaatggccgcttttctggattcatcgactgtggccggctgggtgtggcggaccgctatcaggacatagcgttggctacccgtgatattgctgaagagcttggcggcgaatgggctgaccgcttcctcgtgctttacggtatcgccgctcccgattcgcagcgcatcgccttctatcgccttcttgacgagttcttctgagcgggactctggggttcgaaatgaccgaccaagcgacgcccaacctgccatcacgagatttcgattccaccgccgccttctatgaaaggttgggcttcggaatcgttttccgggacgccggctggatgatcctccagcgcggggatctcatgctggagttcttcgcccaccctagggggaggctaactgaaacacggaaggagacaataccggaaggaacccgcgctatgacggcaataaaaagacagaataaaacgcacggtgttgggtcgtttgttcataaacgcggggttcggtcccagggctggcactctgtcgataccccaccgagaccccattggggccaatacgcccgcgtttcttccttttccccaccccaccccccaagttcgggtgaaggcccagggctcgcagccaacgtcggggcggcaggccctgccatagcctcaggttactcatatatacttagattgatttaaaacttcatttttaatttaaaaggatctaggtgaagatcctttttgataatctcatgaccaaaatcccttaacgtgagttttcgttccactgagcgtcagaccccgtagaaaagatctcgagataacttcgtataatgtatgctatacgaagttatgtcgacctcgagggggggcccggtacccaattcgccctatagtgagtcgtattaccggggcccaccttagaccgaaggggaaaacccgctctctcaggcgcatgtgccagttggggccccgcgggtagatgccggcaggccttccggaagaaaaagagccattggtttttgtagtattggggccctcttttagtgatactggattggcgttgtttgtggctgttgcgcacatccctgccctcctacagcactccaccttgggacctgtttagagaagccggctcttcaaagacaatggaaactgtaccatacacattggaaggctccctaacacacacagcggggaagctgggccgagtaccttaatctgccataaagccattcttactcgggcgacccctttaagtttagaaataattgaaaggaaatgtttgagttttcaaagatcccgtgaaattgatgccagtggaatacagtgagtcctcctcttcctcctcctcctcttccccctccccttcctcctcctcctcttcttttccctcctcttcctcttcctcctgctctcctttcctccccctcctcttttccctcctcttcctcttcctcctgctctcctttcctccccctcctctttctcctcctcctcctcttcttccccctcctctccctcctcctcttcttccccctcctctccctcctcctcttcttctccctcctcttcctcttcctcctcttccacgtgctctcctttcctccccctcctcttgctccccttcttccccgtcctcttcctcctcctcctcttcttctccctcctcttcctcctcctctttcttcctgacctctttctttctcctcctcctccttctacctccccttctcatccctcctcttcctcttctctagctgcacacttcactactgcacatcttataacttgcacccctttcttctgaggaagagaacatcttgcaaggcagggcgagcagcggcagggctggcttaggagcagtgcaagagtccctgtgctccagttccacactgctggcagggaaggcaaggggggacgggcctggatctgggggtgagggagaaagatggacccctgggtgaccactaaaccaaagatattcggaactttctatttaggatgtggacgtaattcctgttccgaggtagaggctgtgctgaagacaagcacagtggcctggtgcgccttggaaaccaacaactattcacgagccagtatgaccttcacatctttagaaattatgaaaacgtatgtgattggagggtttggaaaaccagttatcttatttaacattttaaaaattacctaacagttatttacaaacaggtctgtgcatcccaggtctgtcttcttttcaaggtctgggccttgtgctcgggttatgtttgtgggaaatgcttaataaatactgataatatgggaagagatgaaaactgattctcctcactttgtttcaaacctttctggcagtgggatgattcgaattcacttttaaaattaaattagcgtgttttgttttgttttgtttttgtttttgtttgagagggtctcattctgtcgttcctgggttcctctttttttcagggattctcctacctcagcctcctgagtagctgggattacaggcttacaccaccacgcccggctaatttttgtatttttagtagagacagggtttcgccatgatggccaggctgatcagggtctatttttttcggtactaatcaggaaaaatcaggtaattaagaaatagtgcacttgagttttgagttggagcaccctgtgaggggatgaatatccagttttgttttatttttaatttaagaatatcttctcatgatgactttctcgggtaatatagtctagagcgtgggagacagctcggagtactgctggccaatactgcttcctggcagagccaagcgccgcccacctgacgcctcagtgctgcgggtggtgagacccgtcgctggctcccaccatggtcaggtctcctctttcctcccaaagctgaggacgcaggcgaggccgttttctgtgacccttccaaaagaagcgttgttttggatgagtctctgtccccggaggccgagggccaaaagtgtcttatgttagaggcaaagatgcccggatttagagggcttccaacccctaggaccactttgctcttccctgcaggaagctctcagatgggcgccttagcccggtggtgcacccgacggccctccccggcgctccctgtgttcagtaccagtacctcactcccaggcgtcgctgcttttcttttactttttgcaaagatagacgctgtttgttgttgccgttttgttttgttttgttttactggagagagatatcgagtccctcgggataaaattaagtcccttggatcagaaaggggaacttgcgcatccttgagagtgctctttccttgcggttctccacacccgcctgggctctggggtggggcaaatctgcgctcgcatccttggtccctcaaatattggcccagcccgaagtcctgataaaatgattcgaactctcagtgactcagtttcttcatccagaaagtggaggcaaatactacttcatggagttgctgtgaggtttaaaccaagaaatacctgtaaaatgctaattcggcatctaggaatccctccacaaacagtagctattgttttaggctgtcatcgtcgtcgtcgtcagaggcaatcgggagctgctgttgtggagtttctaaagtcccccaccagtcccccggcagcccctcccctctggcaaacccccacactgtcgctgttgatatgagttttattcctctacccactcatctttcccgaacactgcctagtttcaggatgcccttcctcataaataaactccctaggttttccacagcaaacttcaccaggcaaagaactgcagctccgccgaccagttagttggtggaggcgcagaaacttgtcctcggaccccacgcagaagccgccgccctctccaaggctccggccccgacttcgctctgcgaattgggccagccgctgcttttccgcgagacccgagggttcgccaaggagaggagaagaggcacaggctgcctgagactggtcttcgggcagccgagggcgcgggatgactcgggcaggcgtgtggcctccgactgaccagggttgggcccgggatcagagctttgcttggaagttctctgggtggcagagactcgggcaaccggagcctgagcctcccgcggggaagagctcggactccggaggtcgcgccgccttgggcttgaattcagtccttccttactactcgtggctttgcttacatcatttaactctccatttccttgtctatacagtgggctcataaggaggcggtaaggagatgatgatgtctttgaagagtttaggacaggacctggtgtctcccgtacgcttggtgggggtggcggaggtgatgcgttgttaacaggagaaaccgaccttccagggaggcccagggaggcagcggagagcgaagtcctgctcggcggagagacctcgaggagagtatggggaaaggaatgaatgctgcggagcgcccctctgggctccacccaagcctcggaggcgggacggtgggctccgtcccgaccccttaggcagctggaccgatacctcctggatcagaccccacaggaagactcgcgtggggcccgatatgtgtacttcaaactctgagcggccaccctcagccaactggccagtggatgcgaatcgtgggccctgaggggcgagggcgctcggaactgcatgcctgtgcacggtgccgggctctccagagtgagggggccgtaaggagatctccaaggaagccgaaaaaagcagccagttgggcttcgggaaagacttttctgcaaaggaagtgatctggtcccagaactccagggttgaccccagtacctgacttctccgggagctgtcagctctcctctgttcttcgggcttggcgcgctcctttcataatggacagacaccagtggccttcaaaaggtctggggtgggggaacggaggaagtggccttgggtgcagaggaagagcagagctcctgccaaagctgaacgcagttagccctacccaagtgcgcgctggctcggcatatgcgctccagagccggcaggacagcccggccctgctcaccccgaggagaaatccaacagcgcagcctcctgcacctccttgccccagagaccgtccgagctggagccacaagccctccattcctcttggaatcttcaaccccaaggtaaggtaagttcacc

SEQ ID NO: 23 - DNA, 13150 bp, Artificial sequence
  PDX1-IRES-GFP 5' arm
agatgggatcctagtgttttctcgctgccctttactcaggagctaggagaacagaaagcaaataaccaagaaaccaacacactcagtaatctggatttctcagagttgagccacagcacttggaaatcaaatattggctcctcctgaacgccccttttagcctggtgttgttaaccagtttaacattcccttatcacatgctcatgtgggcagaattaaatggaattagctgcaaattatataaaattcatttacctttaaaggaagctatttggtcatgttcagtgtagacagagcattgcattaagacacaagttaatggtactgcctggagatgaatcaatttgctttggttttattacctccctttatttgttcttatgtggtagctactgtgactggaaatgctcagctcaggttcacagagcccatgtcagagccacattaacatctcaaggagagtcccactctttctaaagagctcagtccaagtaaacacagtagcaaagtaagatcatgctgatcctcccttaatacttagtcacaaagaatggatgctgaacaaggtggcttatgcctgtaatcctagcactttaggaggcctaggtgggaggatcgcttgaggccaggagttcaagaccagcccggacaacatagcaagaccttgcctttacaaaaaaaaaagaaaaaagaaaaagttagccgggcatggtggagcatgcctgtagtcccagctactccaaaggccgaggagaaaagattgtttgagcccaggaggttgaggctgtagtgaggtaagattgtgccactgcactccagcctgggtgacagagggaaaccctgtctcaattaagaagataaataaattttaaaatgggtgatgtctaagagagaaaggcaaacctatgagaatgttgaggattgataagcatcttgtccatataggggttcaaataacatctattgaacttctgctttctgcactgacttaggcatttttctaagatttcttcatttcgacctcaccacaacctcatgatgcacaggtatatttttatttgaaagtgcatgcttcatgagttctttaagagagtatataaatctctatataacaaataaattatgcttgaggtgtctattgttgttctcaatttataatgttgataagaatgactgtgggcaggcgcagtggctcacgcctataatctcagcactttgggaggccagcgtggacagatcaagagatcaggagttcaataccagcctggccaacatagtgaaaccccatctctactaaaaatacaaaaaaattagccaggcatggtggcatgtgcctgtagtcccagctacttgggaggctgaagcaggagaattgcttgaacccagcaggtggaggttgcagtgagccgagattgggccactgcaccccagcttaggcaacagagtgagactttgtctcaacaacaacaacaaaaaaaaaaacaaaaaaaagaatgactgtgtacatgtttaaaatgcagactccccagtctcactcacccccatatcgttattcagaaggtctggggttgggctcagatattttcattttataagcatcccagtgattcttgatatacacagttcatgagtcacacttccaggaacacttccctataaatccatgttacttcattgattagtaagagtttgtatttttctgagatttgcctgaaggtaaatgtgttgcaatatgtaactggagaaaatataaaaaataaatgtatccaaatactgtgtctctgttcacaacaatacactcctaagagatatctaccacaggaagaattcctaattggcaaatatgataaagttgagaccacagtcagttagccttttactttaatctttgcaagagaggctgtggacctagcctaggctgtcaaaagagaaggcttcacttgtgctgctctgagtttagcattgactctcccatcttaaccccatcgatttctaattttaacgtggatttgatttggggggacacacagaggaatcactttgacggcagtgttcctgcaccctcacaaagacaaccagggttgaccatgaccgtttttctgatgtggaaaaagcaggaatggggcaggattccagctctgctctggcctagagactagaatgactcctttccctccctagacattttaaggtttcctctgagtttatgatgacagcttcatctccaacccacgaaagcaagaaccacagacaatgctagtgggggtgctctctggccagaacacactacttagatgctgggttccacacctactgggatagctaaggcattttgagttgtgattagttcacctgctcaagtctttattttggctttcctggctgtgaaaaagaaggccctgccccttctccacacctgtggggtctctctgtggtgtgctgatggcggacatgagagttctccagcaatccacctcctccagcccttttaagcaggactgtacctgggggcacattcccctaaaacactgagtaatatacctactaagtacttcctcccagtgttcctgaatatacctttccaggtctacccatctggaaatatctttagacatcagctcatggtgatagtctgtcattcttctggatgcagtaatagccaatagttcaatgtttatatgcacattaaaagcaatgctgggggagaaaggaagagatgaccatttattgaatgctttcaaagtgccaaaaacattagatgttttgtctcattaaatcctcacaaaaacaataaaaaatattttttgagtgcctactatatagtaagatagtacagtgtcacagccaacagaatggattttaaggccacatcaaggccaggtgtggtggctcatgcttgtaatcccagcactttgggaggccgaggtgggcagataacttgaagtcaggacttcgagaccagcctggccaacaggaaaaaccctgtctctactaacaatacaaaaattagccgggcatggtggtgcgtgcctgtaatcccagctactagagaggctaaggcaggagaatcgcttgaaccccagaggcagaggttgcggtgagccgagatcatgccactgcactccagcctaggcgacagagcaagactcagtctcaaaaaaaaaaaacaaaaaacaaaaaaccaggcatggtggcctgtaatcccagtactttgggaggccaaggtgggtggatagtctgaggtcaggagttcgagaccagcctgaccaacatggtgaaacccgtctctactaaaaatacaaaattagccaggcatggtggcacatgtctgtaatcccagctacttgggagtctgaggctggagtatcgcttgaacccaggaggtggaggttgcggtaagccaagatcatgccatggcactctggcctgggcgacagagcaaaactctatctggaaaaaaaaaaaaaaaaaagccacatcatctctgcttggatctaggctctgccacttactagctatataattctaggcaagtaacttaccatcactgggcctcaatttcctccactggaaaatgggataacagtaattggctcatggggttaacattggaaaatatttaaacaacgcctggctccatgcatttgccattacgattactatgtgcaacggggccagcttatggaacagtgctagtatttccattttacaaataagggcagggaagcttagtgaagtcatgtaacttggcaagggacacacagcttgtgcagggcagagcctgatgtggaggacaggtgtatgcagctcctgacctttctatggcccgccaaagccagcgcatatttctaccaatgagttttggttactcaaagagtgtgcaggcaggtgcacagtgagagatctacaggcatttgatcagtatatgttaccgaaaatctgggtccttcaaagcataaaccatgtgaaatgtaggatggttgaggaaggaagctggagggtagtgtgggtcaagccttctttaggctgcagcaggaacctggaggtaaggagaggctcctaggagaacaaaggattagtcataggaaatggtggtgggaggaggaggtggaaggcaaagaaaaggaactgtgtggaagcaaggagctggttacctaggactaagctcagaagggaagcagcagggatttctggagactgcacatctggaaggtagaaccagagatgagacaaccaaaggggtgagtccagagctgtagggggtgagccaccgggaacaccaggagtggggagcaacagctgacctcagatcctttggagcctgaaagtcctttcatacttttcctttcatcagcagagtgaactgaggaccacggaaggattaaaccaaaagtggaaagagctcgtgcctgggggccccactcccagggaggaagcgttgagcagtggctggaggaagcagcagacagttctggggcacacggagtcccccctcctgcccttctactcctcttacaccagagagagctaacaaggtagggaataagacaattacccaattcaattcggtttttaagctgcttttatctttacagttcagggatcactgaatcatctggaaaataatttcagctctctgcttattttcactagattgcttagccctaggaatattggaaaacccttcattcaaagtctgaggtcctttcctctctccaatccccacaacccaagctgggtttccctggcccctctcagacctggataccaaattctgggtatttatttatatatatatatatatttttaattttttgagacggagcctcgctctgtctcccaggctggagggcagtggcgcgatctcggatcactgcaagctccgcctcctgggttcacgccattctccttcctcagcctcccaagtagctggaactacaggcgcccgccaccacgcccggctaaatttttttgtaggtttagtagagacggggtttcatcatgttagccaggatggtctcgatctcctgacctcatgatccgcctgtctcagcctcccaaagtgctgggattacaggcgtgagccaccgccctcggccaattctgggtattcataaaccagcaggagggaaacattgattcgacttaggaaaatgaaaacctgcctgcattagtgctcattgaaggaaatgctaatgaactaaagtgcaatcaattatagaagtattctcattccacacatcacatcgtttgctttacagaattttccaactcaagaaacaatttttattttcaacagagatttaattataaaatgaatataaattccacgtgcattcatgatgtataccttggagttaagtgggattcatctgtttttttcatttataatgggatgcagtggcttaaaaatcctatcaccaagccaaattcagcccttagcatgcctctgaaaccaccgaggaagacttagccacttaccaagaacaaggtaacctgtgttctcccgggtgtaaaccgcgtctctgtgaagggaaagggggaagagggccggcaaggacctccagtatcagcgaggactatcaggacgtccagctaataaacgactttttcactgtccacactttaattggtttacagccttttttgtttatttatccataagagctgctgttaaatggctcgggaaggtgctcgcctaatggctcggtatcgctgccgggcctgttgtgggcgaggcggcttggagggggcgcaggcgtcagcggggattcagagcggaaacgcatttcgcctgtaatggactcggcgattttacgataccaggagctagatccacggggaagtacaacacacgaccttactaagcggagggttccgcttgatgcgttttttatacggctgtacgtgataaaattccagataactttgtttcatctaataataataataacaataataaatggttgtttgacctttgctccctgggtcccttctataggtcgcaggcagcagaaaatgctaattgtgaaagtgagaacgcgcctccatggaatacccccggcgatcccctcctcctcccccacagccgcgggtacccgggtttttgccggcgaccgcaaccggcggatttgctttctgctgagagcctcttttctttctgcagggccgagcaaaaatattaaatggaagcaaatgaagcatcgaaatggagaccaatttacagaaatgtgcaattagttgagaagtgcaaagtaaacactccgggggtggcaggcgaggcagggagcaggggagggagagtggggcgcagactgagtccagagtgggtgtaggggtgcccagggaggaggggaagggggaggaaaaggagggggaggggaaaagtggccgatctttgtcctgagcggagcttgccgtccgctcataaccgcgtcgccaagtcaaccctcggcgactcggcagattatctccaagggtcaacacgccgcggccaggcaaccccctccagcctgccctcctgatcgatgtggtcactcgcggccagggtgatagggtagagttctccgcggccgcagacaatggactcattgacgcgggcgcacagagattaggtgcccgggccccacggcctttcactctctgcccccaccaaaactgcaggtggcacttttccctgaagaaatcaccgaaactctccccgcccgccgccgtgcttcccttggcctgtcttcggtgacagcaagggcatctacaagccagggagccacacatcagagccacacacatgaggccacaggccaggaagccacacacatgagttctcacacatcgaagcaaatgctgagactataccggcctcccgcaagagaaggaatctgcagagaagtccacattcccgactggcttttttgtcttttaataaaaataaagagtcctcagaatagagcactcaatccgcacttaaaacacaaatatttccagtaggaagaaagaaatacattaagattgactctcaaaggtctggatgttggtgcgttgtttaggaaaggcggagcagtgatttttctctggcttggttctttgtggttcaagctctctcttgctgagacgtttctgcaaagctgtctagtttttctaaaacccacggtggcgtttcgagaaacgtcctcatttcgggagtatccagtcagaggctggtcaggccgccaggcctagcggatcatgcccaggcagggggttggacgtcaccgccacccggaggtcatccatccgcgtcagtgggtgcagaaaaagtggccctgtttaagtcaggaccccagaatgcccagaagttactgaatggtttgaagccaagcacagatgttatcatggaaaatgcagcgtttttatttctttttctaaatatgtaactcttcctccacttccccctctcctgcttgccttatttcaattgcaagcagaagagagtgagtgttctctgccggcaaactccgccagggtcccggcccgtagagagtcgtcaagggtctggaacccccgtgccaacacctgcccctgcttcgcagccccaagaggaaggccgcgtctttccccctcgctgtattgggaagctacgttccgggctggccaaatgggccccaattttccaaaacccaaatttgtaatacccttcaattttttaaaaaaaagaatttaaaaaagtctctgtgaatgcttcagaagttaccgtttacaccccagaagtacttgcagcacatccacaagtaaaaacacacaacgaatgccagagtttcgtgtgttttttaaccgacatctttgtggctgtgaacaaacttcataaataaaatagaatcaaatgcttctgacctagagagctgggtctgcaaactttttttttatcgtattccgcaacagttaaataaaaaattaaaaactcaacatgtctccttgtaaactacatcaattaacaaacacactatgtccattatcaaatataatagaaaaaatataggaaaatagaaaatagaaaaatataggaaaatagaaacttttaagccacggtgaaaatgtttctataaatgagtggttctaatgttttcgtgagcgcccattttggggagcaccgccagctgcccgttcaggagtgtgcagcaaactcagctgagagagaaaattggaacaaaagcaggtgctcgcgggtacctgggcctagcctcttagtgcggccagccaggccaatcacggcccccggctgaaccacgtggggccccgcggagcctatggtgcggcggccggcccgccggtccgcgctggctgtgggttccctctgagatcagtgcggagctgtcaaagcgagcaggggtggcgccgggagtgggaacgccacacagtgccaaatccccggctccagctcccgactcccggctcccggctcccggctcccggtgcccaatcccgggccgcagccatgaacggcgaggagcagtactacgcggccacgcagctttacaaggacccatgcgcgttccagcgaggcccggcgccggagttcagcgccagcccccctgcgtgcctgtacatgggccgccagcccccgccgccgccgccgcacccgttccctggcgccctgggcgcgctggagcagggcagccccccggacatctccccgtacgaggtgccccccctcgccgacgaccccgcggtggcgcaccttcaccaccacctcccggctcagctcgcgctcccccacccgcccgccgggcccttcccggagggagccgagccgggcgtcctggaggagcccaaccgcgtccagctgcctttcccatggatgaagtctaccaaagctcacgcgtggaaaggccagtgggcaggtaagcctggctccccacccctttctcctttccggttctcacccggccgccttacctccaagcgctcccaggagccttctctctgttcccggcgccttggattatcccgggtcggactaaactacatcagggagctaccgagcccatccctcacagcagtgcttctctagtccagtttgaagcatctttcccacccagctctcctgggagtgtacactccttccttccctgttcgctgagcccatcttcgccccaggagcccgcgctcccagcgccatccttagagagccgaggctgagtcctgctcagggcttcggacactacagatcctcctccagcaggggatccgggaacccaggactccttggtagtgcacatcgaggaagccgagtagggacatgggtgcctcggacccaggccccagatcgccttcggagccccggagcccctcacttcccgcgcttcgttaaggaagggcaggcatctaggggcgccaggtaggtgcagaaaggcagggagggaaaggaaactgcacccaacccagcagtgtccggctgccctggttgtggaaacaggataggagtaaagaggaaggggctggggcaaggcgggggctcaccgcgaggctgaaagccggcctctcaacgtcagagcctggcagctaggagagcaatctgagaagcgaattcgtttttcaccaaccgaaagcaattgaagctgtctccccgcaccgcttcccaggaagtaatttttcaggagatgggcgctccctgcctagctggtggggaggcgagaggcctggttcctgcggccctccgcgccggcagagaacagaaggtctttcccggagccgggagccggaggcacggggtagcccccgggtcctttgcggccccgcgcgagcggcaagttccggcgcggcctgtgtcgtcgccgctactcactgtcatcgctgccgtgcctcagccacttctggtcacacctgcaccgcaaatagttgccttttcctttcaactggcagccgggagtagggggaagcagctcgagccggcgtcccccggcccaccccgaaaatcctcagcgcccatctgcggggtctggccagccctgcctgacactgaccccaggcgcagccaggaggggctttgtgcgggagagggagggggaccccagcttgcctggggtccacgggactctcttcttcctagttcactttcttgctaaggcgaaggtcctgaggcaggacgagggctgaactgcgctgcaatcgtccccacctccagcgaaacccagttgacaggggcgccagaagctgccgcggcgcctctgcaaatttatccagctcgcgcagcccgggccaaaggccttgaagtctccggaaatgcggggttcttaggaggcgggaggacagtccctcgaacaaaggtggggggctcctcgtcctcacccagttttcttccagggctgcctcccctccagacctctcttctggcctcctaggccctcggagctcctgctttcccaccctgggccttcctcaggaaatgggcgacatcagggtcccgaaagaggatttgtgaggtggagtaacttccctatcccaacccaaggggtgatacctctgctctggaggacttgggcttaggctgacccaagaagccagaaagtaaaaccagaaggcaaatcagcagccttggcgagggttcggggacccaaggagggcgacactctcgggctggagttggccccaggcctttgctggcgccctctaacccgctgcatgctcgactctcggggaaggagacgacctcccctctcttcccctggaagccgtctgcggggccggctgctatccccgcgttcctctaggggaaacttcgatggagccgaaattcaaaaattgcaaacccacctgcccctgggaagagcgaagtgacaaaagggctctcactggcagtacgaatctgaatgctaatgacaacagaggttttgaaaaacattgacccccaaatgcttcagcagcgctgtccagctggcacctaaactgcatcactctgcgccttggggaagggcccaggcttggcgaccttgaccttttcccaccatcctcaacctccacccctgccgcgtcgcgctgagcacaggtcccccgggaatagtgcaccccaggaagtctctccctgagcagtctctcgcagggacttcacgaagccctctcgcagggactatacgaagcccgcagcctaaggcaggaacccagagacatgtcggtttaatgtaaaaactttggagagcctttcaaaatgtttattgaaggcccgtctcgcttctctcccaggcgtgggatgccaggtagattcggggatgcccccagggagtagaactctccctggactagggtttgagcctctgcttcagcttctggcgcctcttctcgacctggggggaaacccagtagggttccatcgcgaaattaaacccgcccccaacacacacacactcgcctttcaattccttaaggcttagccaacattcacaggagaaatgtcccctgcctttgctctaagacaagcctctccccggaactttggtggaacttcccgcgccagcgtccacagcctgggtgcagtcagtattttccacagaaaagaaaagattgggacctggctgagcgcagcggcaaacagtgaatgtgggtctccaacctcctgggccagggcgtcctgttgcctcttggagacacgagaggcttgtttctgcaccactaccacctcctccgtagggctgtcggttctgcagctgggctagggcccctgtgtctcccctcaacacctctgagggcatttgggatccagggcgtagagtctggagctgccagagttctgccctggccaacgtgacccccagaacaatattccttcacttcgcgggcagaagtccggctgaagttaaaacaattatggagaatttgctggctctcaggttgggactaattacgatataactatagagagaggaaacacatggtcagatataacaaaatgtgtcacagtctccattagcacaaagattttcaaactgcaggttgcacccattcgcaggtcataaaatcaatttactaggttgagattagtattttttaaacgaaatagcagataatggagagaaaagtagatagcatcatacgtggtaaacgtttgttttatgtccttaagatttgtcagtataactgacctgcagtgtccgtgtgtgaactacacaacgatccgaaatgtatttctcacatttgtgggtcaccatcaggaggttttttttagccctggattaaaggcgttttattgcctttgtaggatccagccggtttaactattatatacatttaaatcaacatcaatcagttgattaacaccgattatatgagcgcattcaaggaccactcattggcagagccaagcttaggctcacggcgagagctgactcgagtttggtctccaataaaaaggctatctttattaggaagggcttgagttactagggaagagcttcgcgcgcctacactaggcgctgaaatgggatgctggggcttggtggctccggcgggagcagctggtagggctagggctccctggccccccttgaaggggttgggctgcgtgggtgggggctgtgcggggctccgggggccacactcacgccctgtgtcgcccgcaggcggcgcctacgctgcggagccggaggagaacaagcggacgcgcacggcctacacgcgcgcacagctgctagagctggagaaggagttcctattcaacaagtacatctcacggccgcgccgggtggagctggctgtcatgttgaacttgaccgagagacacatcaagatctggttccaaaaccgccgcatgaagtggaaaaaggaggaggacaagaagcgcggcggcgggacagctgtcgggggtggcggggtcgcggagcctgagcaggactgcgccgtgacctccggcgaggagcttctggcgctgccgccgccgccgccccccggaggtgctgtgccgcccgctgcccccgttgccgcccgagagggccgcctgccgcctggccttagcgcgtcgccacagccctccagcgtcgcgcctcggcggccgcaggaaccacgatgagaggcaggagctgctcctggctgaggggcttcaaccactcgccgaggaggagcagagggcctaggaggaccccgggcgtggaccacccgccctggcagttgaatggggcggcaattg

SEQ ID NO: 24 - DNA, 4280 bp, Artificial sequence; identical to SEQ ID NO: 20
  PDX1-IRES-GFP 3' arm

SEQ ID NO: 25 - DNA, 666 bp, Artificial sequence
  IRES
gatccaattaaccctcactaaagggaacaaaagctggagctccaccgcggtggcggccgctctagaactagtggatccgcccctctccctcccccccccctaacgttactggccgaagccgcttggaataaggccggtgtgcgtttgtctatatgttattttccaccatattgccgtcttttggcaatgtgagggcccggaaacctggccctgtcttcttgacgagcattcctaggggtctttcccctctcgccaaaggaatgcaaggtctgttgaatgtcgtgaaggaagcagttcctctggaagcttcttgaagacaaacaacgtctgtagcgaccctttgcaggcagcggaaccccccacctggcgacaggtgcctctgcggccaaaagccacgtgtataagatacacctgcaaaggcggcacaaccccagtgccacgttgtgagttggatagttgtggaaagagtcaaatggctctcctcaagcgtattcaacaaggggctgaaggatgcccagaaggtaccccattgtatgggatctgatctggggcctcggtgcacatgctttacatgtgtttagtcgaggttaaaaaaacgtctaggccccccgaaccacggggacgtggttttcctttgaaaaacacgatgataatatggccacaacc

SEQ ID NO: 26 - DNA, 920 bp, Artificial sequence
  PDX1-IRES-GFP 3' external probe sequence
caccgcccagcgatgcgcaggatccgggggggatcacgcgcggcgaccctaccgagcgctccgtgcgcgcccccatctctcggatcgtgttcctggctctgtcgaagctgctgagtcccgcgattcgggaaatccggcacttgtttctcaccctacaccatcacgtggaaatcattgaaaatgggaaccctggtggagtatctgggagagcacgcttgtgccgaggggcctgagctatgggacttcctccaggtccctctgtttcctgccggcgtaggggactcgtagtgtcggatcgcatagtgccaaaaaatagtgcatgggaaacaaacaaaaacacctctcattttcttccgcaatatagtttttcctgtaggtgggctaacatagtacctgaagaagttctcaccttgaagagctaaatccataccatacaatatctgagagttggtgatgatttcgggtcatgcatattgtttttaacagggatgatgtccataaataacttgctcttcgctccagtactggggcgtgaacgcattcagcaacatatgttggattcctgctttgctgcggcacgcaggaagcctcacagtgcttgccctggaagcactcacagtttttacaagacaaatcacatcttcccacttgatggtcaataccgtcatggagattgaattgattatcagtgactgaatttaccagagtaaacagaagtcactatgattccccaaaatgaatgctccttttgaacaagggcatttcatttcttaattttggcctccttagtctagcactgccaccctctccatatcctctccttcaaccagttcagttcaatgcatttaagtttgactgaaatttaagtattgtactttccttttcaaattggtgaatctacctgttctattttcatctcc

SEQ ID NO: 27 - DNA, 294 bp, Artificial sequence
  SV40 derived polyA sequence
agcggccgcgactctagatcataatcagccataccacatttgtagaggttttacttgctttaaaaaacctcccacacctccccctgaacctgaaacataaaatgaatgcaattgttgttgttaacttgtttattgcagcttataatggttacaaataaagcaatagcatcacaaatttcacaaataaagcatttttttcactgcattctagttgtggtttgtccaaactcatcaatgtatcttaaggcgtaaattgtaagcgttaatgggctgcaggaattcgattcaaggatc

SEQ ID NO: 28 - DNA, 282 bp, Artificial sequence
  Recombinant SV40 derived early promoter/enhancer
tgtgtcagttagggtgtggaaagtccccaggctccccagcaggcagaagtatgcaaagcatgcatctcaattagtcagcaaccaggtgtggaaagtccccaggctccccagcaggcagaagtatgcaaagcatgcatctcaattagtcagcaaccatagtcccgcccctaactccgcccatcccgcccctaactccgcccatcccgcccctaactccgcccagttccgcccattctccgccccatggctgactaattttttttatttatgcagaggccgagg

SEQ ID NO: 29 - DNA, 270 bp, Artificial sequence
  HSV TK polyadenylation site
gggggaggctaactgaaacacggaaggagacaataccggaaggaacccgcgctatgacggcaataaaaagacagaataaaacgcacggtgttgggtcgtttgttcataaacgcggggttcggtcccagggctggcactctgtcgataccccaccgagaccccattggggccaatacgcccgcgtttcttccttttccccaccccaccccccaagttcgggtgaaggcccagggctcgcagccaacgtcggggcggcaggccctgccatag

SEQ ID NO: 30 - DNA, 30924 bp, Artificial sequence
  PDX-mCherry recombinant BAC
caggcaagggttgtttaagttactagataacaaagttgttattgattctagtatttttactcttcctgattccctgcagtccaaagggagtttgtcagaccaggagtgatttttattaaaaaaaaaaaaaaaagagtagttgctattgttgtaactggcctcattgtgacagatgggatcctagtgttttctcgctgccctttactcaggagctaggagaacagaaagcaaataaccaagaaaccaacacactcagtaatctggatttctcagagttgagccacagcacttggaaatcaaatattggctcctcctgaacgccccttttagcctggtgttgttaaccagtttaacattcccttatcacatgctcatgtgggcagaattaaatggaattagctgcaaattatataaaattcatttacctttaaaggaagctatttggtcatgttcagtgtagacagagcattgcattaagacacaagttaatggtactgcctggagatgaatcaatttgctttggttttattacctccctttatttgttcttatgtggtagctactgtgactggaaatgctcagctcaggttcacagagcccatgtcagagccacattaacatctcaaggagagtcccactctttctaaagagctcagtccaagtaaacacagtagcaaagtaagatcatgctgatcctcccttaatacttagtcacaaagaatggatgctgaacaaggtggcttatgcctgtaatcctagcactttaggaggcctaggtgggaggatcgcttgaggccaggagttcaagaccagcccggacaacatagcaagaccttgcctttacaaaaaaaaaagaaaaaagaaaaagttagccgggcatggtggagcatgcctgtagtcccagctactccaaaggccgaggagaaaagattgtttgagcccaggaggttgaggctgtagtgaggtaagattgtgccactgcactccagcctgggtgacagagggaaaccctgtctcaattaagaagataaataaattttaaaatgggtgatgtctaagagagaaaggcaaacctatgagaatgttgaggattgataagcatcttgtccatataggggttcaaataacatctattgaacttctgctttctgcactgacttaggcatttttctaagatttcttcatttcgacctcaccacaacctcatgatgcacaggtatatttttatttgaaagtgcatgcttcatgagttctttaagagagtatataaatctctatataacaaataaattatgcttgaggtgtctattgttgttctcaatttataatgttgataagaatgactgtgggcaggcgcagtggctcacgcctataatctcagcactttgggaggccagcgtggacagatcaagagatcaggagttcaataccagcctggccaacatagtgaaaccccatctctactaaaaatacaaaaaaattagccaggcatggtggcatgtgcctgtagtcccagctacttgggaggctgaagcaggagaattgcttgaacccagcaggtggaggttgcagtgagccgagattgggccactgcaccccagcttaggcaacagagtgagactttgtctcaacaacaacaacaaaaaaaaaaacaaaaaaaagaatgactgtgtacatgtttaaaatgcagactccccagtctcactcacccccatatcgttattcagaaggtctggggttgggctcagatattttcattttataagcatcccagtgattcttgatatacacagttcatgagtcacacttccaggaacacttccctataaatccatgttacttcattgattagtaagagtttgtatttttctgagatttgcctgaaggtaaatgtgttgcaatatgtaactggagaaaatataaaaaataaatgtatccaaatactgtgtctctgttcacaacaatacactcctaagagatatctaccacaggaagaattcctaattggcaaatatgataaagttgagaccacagtcagttagccttttactttaatctttgcaagagaggctgtggacctagcctaggctgtcaaaagagaaggcttcacttgtgctgctctgagtttagcattgactctcccatcttaaccccatcgatttctaattttaacgtggatttgatttggggggacacacagaggaatcactttgacggcagtgttcctgcaccctcacaaagacaaccagggttgaccatgaccgtttttctgatgtggaaaaagcaggaatggggcaggattccagctctgctctggcctagagactagaatgactcctttccctccctagacattttaaggtttcctctgagtttatgatgacagcttcatctccaacccacgaaagcaagaaccacagacaatgctagtgggggtgctctctggccagaacacactacttagatgctgggttccacacctactgggatagctaaggcattttgagttgtgattagttcacctgctcaagtctttattttggctttcctggctgtgaaaaagaaggccctgccccttctccacacctgtggggtctctctgtggtgtgctgatggcggacatgagagttctccagcaatccacctcctccagcccttttaagcaggactgtacctgggggcacattcccctaaaacactgagtaatatacctactaagtacttcctcccagtgttcctgaatatacctttccaggtctacccatctggaaatatctttagacatcagctcatggtgatagtctgtcattcttctggatgcagtaatagccaatagttcaatgtttatatgcacattaaaagcaatgctgggggagaaaggaagagatgaccatttattgaatgctttcaaagtgccaaaaacattagatgttttgtctcattaaatcctcacaaaaacaataaaaaatattttttgagtgcctactatatagtaagatagtacagtgtcacagccaacagaatggattttaaggccacatcaaggccaggtgtggtggctcatgcttgtaatcccagcactttgggaggccgaggtgggcagataacttgaagtcaggacttcgagaccagcctggccaacaggaaaaaccctgtctctactaacaatacaaaaattagccgggcatggtggtgcgtgcctgtaatcccagctactagagaggctaaggcaggagaatcgcttgaaccccagaggcagaggttgcggtgagccgagatcatgccactgcactccagcctaggcgacagagcaagactcagtctcaaaaaaaaaaaacaaaaaacaaaaaaccaggcatggtggcctgtaatcccagtactttgggaggccaaggtgggtggatagtctgaggtcaggagttcgagaccagcctgaccaacatggtgaaacccgtctctactaaaaatacaaaattagccaggcatggtggcacatgtctgtaatcccagctacttgggagtctgaggctggagtatcgcttgaacccaggaggtggaggttgcggtaagccaagatcatgccatggcactctggcctgggcgacagagcaaaactctatctggaaaaaaaaaaaaaaaaaagccacatcatctctgcttggatctaggctctgccacttactagctatataattctaggcaagtaacttaccatcactgggcctcaatttcctccactggaaaatgggataacagtaattggctcatggggttaacattggaaaatatttaaacaacgcctggctccatgcatttgccattacgattactatgtgcaacggggccagcttatggaacagtgctagtatttccattttacaaataagggcagggaagcttagtgaagtcatgtaacttggcaagggacacacagcttgtgcagggcagagcctgatgtggaggacaggtgtatgcagctcctgacctttctatggcccgccaaagccagcgcatatttctaccaatgagttttggttactcaaagagtgtgcaggcaggtgcacagtgagagatctacaggcatttgatcagtatatgttaccgaaaatctgggtccttcaaagcataaaccatgtgaaatgtaggatggttgaggaaggaagctggagggtagtgtgggtcaagccttctttaggctgcagcaggaacctggaggtaaggagaggctcctaggagaacaaaggattagtcataggaaatggtggtgggaggaggaggtggaaggcaaagaaaaggaactgtgtggaagcaaggagctggttacctaggactaagctcagaagggaagcagcagggatttctggagactgcacatctggaaggtagaaccagagatgagacaaccaaaggggtgagtccagagctgtagggggtgagccaccgggaacaccaggagtggggagcaacagctgacctcagatcctttggagcctgaaagtcctttcatacttttcctttcatcagcagagtgaactgaggaccacggaaggattaaaccaaaagtggaaagagctcgtgcctgggggccccactcccagggaggaagcgttgagcagtggctggaggaagcagcagacagttctggggcacacggagtcccccctcctgcccttctactcctcttacaccagagagagctaacaaggtagggaataagacaattacccaattcaattcggtttttaagctgcttttatctttacagttcagggatcactgaatcatctggaaaataatttcagctctctgcttattttcactagattgcttagccctaggaatattggaaaacccttcattcaaagtctgaggtcctttcctctctccaatccccacaacccaagctgggtttccctggcccctctcagacctggataccaaattctgggtatttatttatatatatatatatatttttaattttttgagacggagcctcgctctgtctcccaggctggagggcagtggcgcgatctcggatcactgcaagctccgcctcctgggttcacgccattctccttcctcagcctcccaagtagctggaactacaggcgcccgccaccacgcccggctaaatttttttgtaggtttagtagagacggggtttcatcatgttagccaggatggtctcgatctcctgacctcatgatccgcctgtctcagcctcccaaagtgctgggattacaggcgtgagccaccgccctcggccaattctgggtattcataaaccagcaggagggaaacattgattcgacttaggaaaatgaaaacctgcctgcattagtgctcattgaaggaaatgctaatgaactaaagtgcaatcaattatagaagtattctcattccacacatcacatcgtttgctttacagaattttccaactcaagaaacaatttttattttcaacagagatttaattataaaatgaatataaattccacgtgcattcatgatgtataccttggagttaagtgggattcatctgtttttttcatttataatgggatgcagtggcttaaaaatcctatcaccaagccaaattcagcccttagcatgcctctgaaaccaccgaggaagacttagccacttaccaagaacaaggtaacctgtgttctcccgggtgtaaaccgcgtctctgtgaagggaaagggggaagagggccggcaaggacctccagtatcagcgaggactatcaggacgtccagctaataaacgactttttcactgtccacactttaattggtttacagccttttttgtttatttatccataagagctgctgttaaatggctcgggaaggtgctcgcctaatggctcggtatcgctgccgggcctgttgtgggcgaggcggcttggagggggcgcaggcgtcagcggggattcagagcggaaacgcatttcgcctgtaatggactcggcgattttacgataccaggagctagatccacggggaagtacaacacacgaccttactaagcggagggttccgcttgatgcgttttttatacggctgtacgtgataaaattccagataactttgtttcatctaataataataataacaataataaatggttgtttgacctttgctccctgggtcccttctataggtcgcaggcagcagaaaatgctaattgtgaaagtgagaacgcgcctccatggaatacccccggcgatcccctcctcctcccccacagccgcgggtacccgggtttttgccggcgaccgcaaccggcggatttgctttctgctgagagcctcttttctttctgcagggccgagcaaaaatattaaatggaagcaaatgaagcatcgaaatggagaccaatttacagaaatgtgcaattagttgagaagtgcaaagtaaacactccgggggtggcaggcgaggcagggagcaggggagggagagtggggcgcagactgagtccagagtgggtgtaggggtgcccagggaggaggggaagggggaggaaaaggagggggaggggaaaagtggccgatctttgtcctgagcggagcttgccgtccgctcataaccgcgtcgccaagtcaaccctcggcgactcggcagattatctccaagggtcaacacgccgcggccaggcaaccccctccagcctgccctcctgatcgatgtggtcactcgcggccagggtgatagggtagagttctccgcggccgcagacaatggactcattgacgcgggcgcacagagattaggtgcccgggccccacggcctttcactctctgcccccaccaaaactgcaggtggcacttttccctgaagaaatcaccgaaactctccccgcccgccgccgtgcttcccttggcctgtcttcggtgacagcaagggcatctacaagccagggagccacacatcagagccacacacatgaggccacaggccaggaagccacacacatgagttctcacacatcgaagcaaatgctgagactataccggcctcccgcaagagaaggaatctgcagagaagtccacattcccgactggcttttttgtcttttaataaaaataaagagtcctcagaatagagcactcaatccgcacttaaaacacaaatatttccagtaggaagaaagaaatacattaagattgactctcaaaggtctggatgttggtgcgttgtttaggaaaggcggagcagtgatttttctctggcttggttctttgtggttcaagctctctcttgctgagacgtttctgcaaagctgtctagtttttctaaaacccacggtggcgtttcgagaaacgtcctcatttcgggagtatccagtcagaggctggtcaggccgccaggcctagcggatcatgcccaggcagggggttggacgtcaccgccacccggaggtcatccatccgcgtcagtgggtgcagaaaaagtggccctgtttaagtcaggaccccagaatgcccagaagttactgaatggtttgaagccaagcacagatgttatcatggaaaatgcagcgtttttatttctttttctaaatatgtaactcttcctccacttccccctctcctgcttgccttatttcaattgcaagcagaagagagtgagtgttctctgccggcaaactccgccagggtcccggcccgtagagagtcgtcaagggtctggaacccccgtgccaacacctgcccctgcttcgcagccccaagaggaaggccgcgtctttccccctcgctgtattgggaagctacgttccgggctggccaaatgggccccaattttccaaaacccaaatttgtaatacccttcaattttttaaaaaaaagaatttaaaaaagtctctgtgaatgcttcagaagttaccgtttacaccccagaagtacttgcagcacatccacaagtaaaaacacacaacgaatgccagagtttcgtgtgttttttaaccgacatctttgtggctgtgaacaaacttcataaataaaatagaatcaaatgcttctgacctagagagctgggtctgcaaactttttttttatcgtattccgcaacagttaaataaaaaattaaaaactcaacatgtctccttgtaaactacatcaattaacaaacacactatgtccattatcaaatataatagaaaaaatataggaaaatagaaaatagaaaaatataggaaaatagaaacttttaagccacggtgaaaatgtttctataaatgagtggttctaatgttttcgtgagcgcccattttggggagcaccgccagctgcccgttcaggagtgtgcagcaaactcagctgagagagaaaattggaacaaaagcaggtgctcgcgggtacctgggcctagcctcttagtgcggccagccaggccaatcacggcccccggctgaaccacgtggggccccgcggagcctatggtgcggcggccggcccgccggtccgcgctggctgtgggttccctctgagatcagtgcggagctgtcaaagcgagcaggggtggcgccgggagtgggaacgccacacagtgccaaatccccggctccagctcccgactcccggctcccggctcccggctcccggtgcccaatcccgggccgcagccatggtgagcaagggcgaggaggataacatggccatcatcaaggagttcatgcgcttcaaggtgcacatggagggctccgtgaacggccacgagttcgagatcgagggcgagggcgagggccgcccctacgagggcacccagaccgccaagctgaaggtgaccaagggtggccccctgcccttcgcctgggacatcctgtcccctcagttcatgtacggctccaaggcctacgtgaagcaccccgccgacatccccgactacttgaagctgtccttccccgagggcttcaagtgggagcgcgtgatgaacttcgaggacggcggcgtggtgaccgtgacccaggactcctccctgcaggacggcgagttcatctacaaggtgaagctgcgcggcaccaacttcccctccgacggccccgtaatgcagaagaagaccatgggctgggaggcctcctccgagcggatgtaccccgaggacggcgccctgaagggcgagatcaagcagaggctgaagctgaaggacggcggccactacgacgctgaggtcaagaccacctacaaggccaagaagcccgtgcagctgcccggcgcctacaacgtcaacatcaagttggacatcacctcccacaacgaggactacaccatcgtggaacagtacgaacgcgccgagggccgccactccaccggcggcatggacgagctgtacaagtaaagcggccgcgactctagatcataatcagccataccacatttgtagaggttttacttgctttaaaaaacctcccacacctccccctgaacctgaaacataaaatgaatgcaattgttgttgttaacttgtttattgcagcttataatggttacaaataaagcaatagcatcacaaatttcacaaataaagcatttttttcactgcattctagttgtggtttgtccaaactcatcaatgtatcttaaggcgtaaattgtaagcgttaatgggctgcaggaattcgattcaaggatccataacttcgtataatgtatgctatacgaagttatctcgagcgtcaggtggcacttttcggggaaatgtgcgcggaacccctatttgtttatttttctaaatacattcaaatatgtatccgctcatgagacaataaccctgataaatgcttcaataatattgaaaaaggaagagtcctgaggcggaaagaaccagctgtggaatgtgtgtcagttagggtgtggaaagtccccaggctccccagcaggcagaagtatgcaaagcatgcatctcaattagtcagcaaccaggtgtggaaagtccccaggctccccagcaggcagaagtatgcaaagcatgcatctcaattagtcagcaaccatagtcccgcccctaactccgcccatcccgcccctaactccgcccatcccgcccctaactccgcccagttccgcccattctccgccccatggctgactaattttttttatttatgcagaggccgaggccgcctcggcctctgagctattccagaagtagtgaggaggcttttttggaggcctaggcttttgcaaagatcgatcaagagacaggatgaggatcgtttcgcatgattgaacaagatggattgcacgcaggttctccggccgcttgggtggagaggctattcggctatgactgggcacaacagacaatcggctgctctgatgccgccgtgttccggctgtcagcgcaggggcgcccggttctttttgtcaagaccgacctgtccggtgccctgaatgaactgcaagacgaggcagcgcggctatcgtggctggccacgacgggcgttccttgcgcagctgtgctcgacgttgtcactgaagcgggaagggactggctgctattgggcgaagtgccggggcaggatctcctgtcatctcaccttgctcctgccgagaaagtatccatcatggctgatgcaatgcggcggctgcatacgcttgatccggctacctgcccattcgaccaccaagcgaaacatcgcatcgagcgagcacgtactcggatggaagccggtcttgtcgatcaggatgatctggacgaagagcatcaggggctcgcgccagccgaactgttcgccaggctcaaggcgagcatgcccgacggcgaggatctcgtcgtgacccatggcgatgcctgcttgccgaatatcatggtggaaaatggccgcttttctggattcatcgactgtggccggctgggtgtggcggaccgctatcaggacatagcgttggctacccgtgatattgctgaagagcttggcggcgaatgggctgaccgcttcctcgtgctttacggtatcgccgctcccgattcgcagcgcatcgccttctatcgccttcttgacgagttcttctgagcgggactctggggttcgaaatgaccgaccaagcgacgcccaacctgccatcacgagatttcgattccaccgccgccttctatgaaaggttgggcttcggaatcgttttccgggacgccggctggatgatcctccagcgcggggatctcatgctggagttcttcgcccaccctagggggaggctaactgaaacacggaaggagacaataccggaaggaacccgcgctatgacggcaataaaaagacagaataaaacgcacggtgttgggtcgtttgttcataaacgcggggttcggtcccagggctggcactctgtcgataccccaccgagaccccattggggccaatacgcccgcgtttcttccttttccccaccccaccccccaagttcgggtgaaggcccagggctcgcagccaacgtcggggcggcaggccctgccatagcctcaggttactcatatatacttagattgatttaaaacttcatttttaatttaaaaggatctaggtgaagatcctttttgataatctcatgaccaaaatcccttaacgtgagttttcgttccactgagcgtcagaccccgtagaaaagatctcgagataacttcgtataatgtatgctatacgaagttatgtcgacctcgagggggggcccggtacccaattcgccctatagtgagtcgtattaccggggcccaccttagaccgaaggggaaaacccgctctctcaggcgcatgtgccagttggggccccgcgggtagatgccggcaggccttccggaagaaaaagagccattggtttttgtagtattggggccctcttttagtgatactggattggcgttgtttgtggctgttgcgcacatccctgccctcctacagcactccaccttgggacctgtttagagaagccggctcttcaaagacaatggaaactgtaccatacacattggaaggctccctaacacacacagcggggaagctgggccgagtaccttaatctgccataaagccattcttactcgggcgacccctttaagtttagaaataattgaaaggaaatgtttgagttttcaaagatcccgtgaaattgatgccagtggaatacagtgagtcctcctcttcctcctcctcctcttccccctccccttcctcctcctcctcttcttttccctcctcttcctcttcctcctgctctcctttcctccccctcctcttttccctcctcttcctcttcctcctgctctcctttcctccccctcctctttctcctcctcctcctcttcttccccctcctctccctcctcctcttcttccccctcctctccctcctcctcttcttctccctcctcttcctcttcctcctcttccacgtgctctcctttcctccccctcctcttgctccccttcttccccgtcctcttcctcctcctcctcttcttctccctcctcttcctcctcctctttcttcctgacctctttctttctcctcctcctccttctacctccccttctcatccctcctcttcctcttctctagctgcacacttcactactgcacatcttataacttgcacccctttcttctgaggaagagaacatcttgcaaggcagggcgagcagcggcagggctggcttaggagcagtgcaagagtccctgtgctccagttccacactgctggcagggaaggcaaggggggacgggcctggatctgggggtgagggagaaagatggacccctgggtgaccactaaaccaaagatattcggaactttctatttaggatgtggacgtaattcctgttccgaggtagaggctgtgctgaagacaagcacagtggcctggtgcgccttggaaaccaacaactattcacgagccagtatgaccttcacatctttagaaattatgaaaacgtatgtgattggagggtttggaaaaccagttatcttatttaacattttaaaaattacctaacagttatttacaaacaggtctgtgcatcccaggtctgtcttcttttcaaggtctgggccttgtgctcgggttatgtttgtgggaaatgcttaataaatactgataatatgggaagagatgaaaactgattctcctcactttgtttcaaacctttctggcagtgggatgattcgaattcacttttaaaattaaattagcgtgttttgttttgttttgtttttgtttttgtttgagagggtctcattctgtcgttcctgggttcctctttttttcagggattctcctacctcagcctcctgagtagctgggattacaggcttacaccaccacgcccggctaatttttgtatttttagtagagacagggtttcgccatgatggccaggctgatcagggtctatttttttcggtactaatcaggaaaaatcaggtaattaagaaatagtgcacttgagttttgagttggagcaccctgtgaggggatgaatatccagttttgttttatttttaatttaagaatatcttctcatgatgactttctcgggtaatatagtctagagcgtgggagacagctcggagtactgctggccaatactgcttcctggcagagccaagcgccgcccacctgacgcctcagtgctgcgggtggtgagacccgtcgctggctcccaccatggtcaggtctcctctttcctcccaaagctgaggacgcaggcgaggccgttttctgtgacccttccaaaagaagcgttgttttggatgagtctctgtccccggaggccgagggccaaaagtgtcttatgttagaggcaaagatgcccggatttagagggcttccaacccctaggaccactttgctcttccctgcaggaagctctcagatgggcgccttagcccggtggtgcacccgacggccctccccggcgctccctgtgttcagtaccagtacctcactcccaggcgtcgctgcttttcttttactttttgcaaagatagacgctgtttgttgttgccgttttgttttgttttgttttactggagagagatatcgagtccctcgggataaaattaagtcccttggatcagaaaggggaacttgcgcatccttgagagtgctctttccttgcggttctccacacccgcctgggctctggggtggggcaaatctgcgctcgcatccttggtccctcaaatattggcccagcccgaagtcctgataaaatgattcgaactctcagtgactcagtttcttcatccagaaagtggaggcaaatactacttcatggagttgctgtgaggtttaaaccaagaaatacctgtaaaatgctaattcggcatctaggaatccctccacaaacagtagctattgttttaggctgtcatcgtcgtcgtcgtcagaggcaatcgggagctgctgttgtggagtttctaaagtcccccaccagtcccccggcagcccctcccctctggcaaacccccacactgtcgctgttgatatgagttttattcctctacccactcatctttcccgaacactgcctagtttcaggatgcccttcctcataaataaactccctaggttttccacagcaaacttcaccaggcaaagaactgcagctccgccgaccagttagttggtggaggcgcagaaacttgtcctcggaccccacgcagaagccgccgccctctccaaggctccggccccgacttcgctctgcgaattgggccagccgctgcttttccgcgagacccgagggttcgccaaggagaggagaagaggcacaggctgcctgagactggtcttcgggcagccgagggcgcgggatgactcgggcaggcgtgtggcctccgactgaccagggttgggcccgggatcagagctttgcttggaagttctctgggtggcagagactcgggcaaccggagcctgagcctcccgcggggaagagctcggactccggaggtcgcgccgccttgggcttgaattcagtccttccttactactcgtggctttgcttacatcatttaactctccatttccttgtctatacagtgggctcataaggaggcggtaaggagatgatgatgtctttgaagagtttaggacaggacctggtgtctcccgtacgcttggtgggggtggcggaggtgatgcgttgttaacaggagaaaccgaccttccagggaggcccagggaggcagcggagagcgaagtcctgctcggcggagagacctcgaggagagtatggggaaaggaatgaatgctgcggagcgcccctctgggctccacccaagcctcggaggcgggacggtgggctccgtcccgaccccttaggcagctggaccgatacctcctggatcagaccccacaggaagactcgcgtggggcccgatatgtgtacttcaaactctgagcggccaccctcagccaactggccagtggatgcgaatcgtgggccctgaggggcgagggcgctcggaactgcatgcctgtgcacggtgccgggctctccagagtgagggggccgtaaggagatctccaaggaagccgaaaaaagcagccagttgggcttcgggaaagacttttctgcaaaggaagtgatctggtcccagaactccagggttgaccccagtacctgacttctccgggagctgtcagctctcctctgttcttcgggcttggcgcgctcctttcataatggacagacaccagtggccttcaaaaggtctggggtgggggaacggaggaagtggccttgggtgcagaggaagagcagagctcctgccaaagctgaacgcagttagccctacccaagtgcgcgctggctcggcatatgcgctccagagccggcaggacagcccggccctgctcaccccgaggagaaatccaacagcgcagcctcctgcacctccttgccccagagaccgtccgagctggagccacaagccctccattcctcttggaatcttcaaccccaaggtaaggtaagttcaccgagcaccgcccagcgatgcgcaggatccgggggggatcacgcgcggcgaccctaccgagcgctccgtgcgcgcccccatctctcggatcgtgttcctggctctgtcgaagctgctgagtcccgcgattcgggaaatccggcacttgtttctcaccctacaccatcacgtggaaatcattgaaaatgggaaccctggtggagtatctgggagagcacgcttgtgccgaggggcctgagctatgggacttcctccaggtccctctgtttcctgccggcgtaggggactcgtagtgtcggatcgcatagtgccaaaaaatagtgcatgggaaacaaacaaaaacacctctcattttcttccgcaatatagtttttcctgtaggtgggctaacatagtacctgaagaagttctcaccttgaagagctaaatccataccatacaatatctgagagttggtgatgatttcgggtcatgcatattgtttttaacagggatgatgtccataaataacttgctcttcgctccagtactggggcgtgaacgcattcagcaacatatgttggattcctgctttgctgcggcacgcaggaagcctcacagtgcttgccctggaagcactcacagtttttacaagacaaatcacatcttcccacttgatggtcaataccgtcatggagattgaattgattatcagtgactgaatttaccagagtaaacagaagtcactatgattccccaaaatgaatgctccttttgaacaagggcatttcatttcttaattttggcctccttagtctagcactgccaccctctccatatcctctccttcaaccagttcagttcaatgcatttaagtttgactgaaatttaagtattgtactttccttttcaaattggtgaatctacctgttctattttcatctccccaccacccattctctgtctcattctctctctctctctctctctttctctctctctctgtctgctctctctctctctctctgtaggtgtggtttgtgtctgagggtgagtctccccatctttgtgtttctgaggatgcctgtgtaacctatgtgcctatgtgtgtttgtgtgcatgggtttagggtggtcttattgggttgccatagtgataatgatcagctgtgtctagggaccaaggaaaccttcctatatactttttgttttatgtgtgtatttatttacttgtttatttttgcgacggagtcttactctgccgctcaggctggagtgcagtggcacgatctcgggttactacaacctccacctcccaggttcaagtgattctcctgcctcagctccccgggtagctgggattacaggcaccagcctccatgcctggtgaatttttgtattttagtacagatggggttttgacacattggccaggctggtcttgaactcctgacctcaagtgatccacccactttggcctcccaaagtgcttggattacagcacagccatctcacaggtgtctgatggcattgctgatgatgaaaactgtccgctcaggttactgtctcaattctttgaattggcacaacgttagaaggcaagaagtgctgtctttagaataacacaaagttgaaactttggtagaagctgacagattgctaaagtactaccataaggaactttaaaatcttctctgtctaaaaaagaagttcacaactaaggtatttcatgacttcaacaaatttacctataaagcctcctgaaaattaagtagttacaaatgtcagaagaaggaaattctgagttgatattgaatcaagctttactccaacccagctctaacaggctagatgtgggaacaataaacctaatgggaaactgaggcagggcagcaggaagcagaaggcctccttgcaaaagaaatgggaatgatgcatcctcttatctggcagccagccatcaagaaattgcttcccatggtcagcttgagcagtgggaagagactggcaggaaacactgggtaggaaggggaggtcaaggtctgcagataatagcagctaaaaataggtgatttcagagtgaaagtggctggctgaaagggatgaggctcataggttacctagtgataacctgtcaatgccagattcccatattaaagtatggtatatttacacatctgtaagatggaatgcacatgataaaattatattccttccaggtgcggtggctcatgcctgtaatcccagcactttgggaggccaaggcgggcagatcacctgaggtcgggagttcgagaccaacctgaccaacacggagaaactctgtgtctactaaaaatacaaaattagccaggtgtggtggtgcatgcatgtaatcccagctactcatgaggctgaggcagaagaatcgcttgaacctgggaggcacaggtttcagtgagccgagattgtgccattgcactccagcctgggctacaagagtgaaactctgcctcaaaaaaaaaaaaaaaaatcatagtcctgatgtttcattaaaattatttcctctgtaaatgagatcccatggcttttgaaagcataaatagctctaactttaagcagtattctatcattcaacttcaagttgaacaccttggagtccttccctgaacatagagcatatagaaaccttaaatatatgccatatcatcagcacgcattcaagattcttgtctacattgtggaatactctgaaatctcacttctaatgataattacacatctaaaaagcgtaaagaacctgatctgatcatcacacataatatggagtaaaacatcactatgtaccccatgtatatgtacaagtaatacttgtcaatttaaaaaaatttatgtgtaacaatatttttgctgctaattatttacatcattgaataaattctatctctcctctttcagaattctcaatgagcctgatttccaaaaggtatgacattttgaaagtaatttctcttatttacatatgctcttagaaaattcagaagtcccacacttctaaatctgtctggaaatactgctgatttgaaatcgacatattacatggaattatttccacttcatagttctagaaacaaacaaaaaaaaatgtacaaaataaggccgggcactgtggctcatgcctataatctcagcactttgggaggccgaggtgggtggatcacaaggtcaggagtttgagaccagcctggccaatatggtgaaacccggaaaccccgtctctactaaaaatacaaaaattagccaggcctagtggcaggtgcctatagtcccagctacttgggaggctgaggcaggagaatcacttgaacctgggaggcagaggttgcagtgagccaagatcacatcactgcactccagcctgggccacagattgagattctgtctcaaaaaacaaaaacaaaagtacaaaatagagttgggcaaggtggctcatgcctgtaatcctagcactttgaaaggctgaggagagaggattgcttgagcctaggagtttaggactatgattgtagtgagctatgattgtgccaatacactccagcttgggtgacagagcaataccttgtctctaaataaagcatttttaaatgttcaaaataatctctaagaaataaacaattggccagcagggtggctaatgcctgtaatcccagcactttgggaggccgaggtgggcggatcacttgaggtcaggagtttgggaccagcctgagcaacatggtgaaaccctgtctccactaaaaacacaaaaattagtcaggcgtggtggcgagcacctgtagtccctgctagcagggaggctgaggcaggagaattgcttgaacccggagaggttgcagtgagccgagatcgcaccactgcactccagcctgggcaacaagagccacactccatctcaaaaaataataaatacatacataaataaataaatataaaatattatataattggatttattgcaatcaatgaacatgtggtttatttttatttaatattgaaagactacgtttctaggccagaaggacaggagagtggataatttctcctgtggatgattgggcctttccacagaaacacaaacagagattgtataaagcacaaggcattattcatgctaccctttgtcctccagtccagtggaggagaaaaggaacaatccctggccaaatgtgcaaattgaaagtgctgtttttcactaccttgggcagggtttagcttccggttttgtgttccctatttactgcccttctgaactagggcaaataacttgatccatttgagcttgtctactcccctgtgaattagggataatcccatctcatgtgactattgtgagagttaagtaagataaggtatgtgaagagcacatacttgggtgagtggaaacctttatttttatttattaggtacaaggtctcactctgttgcccaggcttgagtgcagtggtgtggtcctatcatctcactgtagcctcaaaccctgggctcaaagcaatcttcccacctcagccccacaagtagctgagactacaggccagtaccaccaagcccagctttttacattttttttttagacatagggatcttgctaagttacccaggctagtctcaaactcctgggcttgagcaatccccttgccttagcctcctgtggctgggattgcaggtgacagccacctcacctggctgagtgccacctcacctggctgagtggagccctttagaaggatgtggtttttccagaagctgaggtctttcttgccctactaaatcacagacagctctttgctcaatggacctcagggaaggcaacaactgccacaccaattgaatgtatgcccttttccctggagccctggagtcctccctcagatggggacagctaggtcttgtcctggctcttcacaagagaatttctggactgcaaagtcacattgaagttgaccaggtaggagcaaaaataagctaccactgtataaagcagagaggcaaaagccagctgtactgactgaagtcacacgtcaaacagcattgatacccacatgcaactagctttacttgtaaggcacaagcatttcagccaatttaaggatagtctgatgaccaaagatagaaagtctcttgacaaactagaatttttttaaggatctctaggcctccgctcaaagaataggagattgttctaagaccttcttaataagtcatttccctagatgttactatattgattagtattaatacatatttatatatagatgtattatgtataatatatatttatataatacatattattataaataatatatattgatgcatattgacatgattaatacatatttatatataaatgtattatgtataatatatatttatataatacatattattatacgtaatatatattgatactaatcaatatagtaacatctagggaaatgacttattaagaaggtcttggaactgtctcctattctttgaggaggggctagagatccctaaaaattcctactatgtattatacataatacatataatatgtaatattctattgtgtattatatatattatatataatatattatatattatgtattgtatataatatattatgtattatatattatatgtattatgtattatatatgtattatatataatgtattatgtgttatatattatgtattatatatattatatgtgtaatatatatttatgtatatatatttatatataaatgcattatgtataatatatatttatataatacatattatacaaaatatatagatacatattgatatgattaatacatatttatatataaatgtattatgtataatatatttatataatacatattattatacataatatatattgatactaatcaatatagtaacatctaaggaaatgacttactaagaaggtcttggaacaatctcctattctttgagggggggtctagataatatgttatatattttgtattatatataatacataatatgttatatattatgtattatatataatacataatatgttatatattatgtataatatattatatattatgtattatatataatacataatatattatgtattatgtataatatattatatgtgtaatatatttatgtatatataatacatatattatatattatatattatatgtataatatattataagtataatatatattatatgtataatttatgtataatatatattatacataaatatgtataatatatattatacataaatatgtataatatatatgtaattatatatattatatgtatattatattatatatatgtatattatatgtaattatatatattatatatgcatataatatatgtgtaattatataatattatgtaaatatatattacacataaatatatattatacataaatatatattatacatataatatatattatacataattatgtataatatatattatatgtataatatatattatatattttcaaaaagtaggttgcaactgattagtcaataaagtcaagttagccaggctcggtggttcacacctgtaatcccagcactttgggaggccgaggcacttaaggtcaggagttcgagaccagcctggccaacatggtgaaaccccgtctccacaaaaaatacgaaaaaaattacccgggcgtagtggcgcgcccctgtaatcccagatactcaggaggcagagacaggagaatcgcttgaaaccaggaggtgaaggttgcagtgagccaagatcactccagcctgggcaactccatctcaaaaaaaaaaaaaaaagtccatttagtgggttgttaccagatttttattttatatatatatatatttattgtatataaaaaatatatatgtggaacccaagaggttttgacatttgattctgccatccctaagtgttgtggacctccctagtcccttagagcactccagccaatacacttactttctcagcagcaggggaaaagagacaaatcagaaggatatgcatctatggtagacagaataatggtccctgaaaagttgaaaggtgtctacattgcaattcctgaaacctgtgtctatgttcccttacagggcaaaagggatttttagagatataattagattaggtacttaaaataaacagattattctagattatccttgtgggcccaatctaatcatacaagtccttgaaagcaaataactttctctagctagaattcaagagctacagcagaaagaaaagttgaagagattccaaatatgaggaggctttactgagccattgctgcctctgagatgagggagtccattgacaaggacccaagagaggctggtaagggctaacgaccacccccaggcgacagacagcaaggaaactgggggcagccacaaggacgtggcctctccaacactggaccagagaaactgctgagccaagggggactttgacagacagaaacagtgaaataataaatttaataaccctagaagaaaacctaggcaataccattcaagacataggcatgacaaggacttcatgactaaaacaccaaaagcaatggcaacaaaacccaaaatagacaaatgggatctaattaaactaaagagcttctgcacagcaaaagaaactaccatcagagtgaaaaggcaacctacagaatgggagaaaatttttgcaatctacttatctgacaaagggctaatatccagaatctacaaaggacttaaacaaatttacaagaaaaaaactaacaaccccatcaaaaagtgggcaaaggatatgaacagacaattctcaaaagaagacatttatgcagccaacacacacttgaaaaaatgctcatcataactggtcatcagagaaatgcaaaccaaaaccacaatgagataccatctcacgccagttagaatggcgatcattaaaaagtcaggaaacaacagatgctggagaggatgtggataaataggaacgtttttacactgttggtgggactgtaaattagttcacccattgcggaagacagtgtggccattcctcaaggatctagaactagaaataccatttgactcaactggggtattactgggtatatacccagaggattataaataatgctactataaagacacatgtacacgtatgtttattgcagcactattcacaatagcaaagacttggaaccaacccaaatgtccatcaatgatagactggattaagaaaatgtggcacatatacacaatggaatactatgcagccataaaaaaggatgagttcatgtcctttgccgggacatggatgaaactggaaaccatcattctcagcaaactatcacaaggacagaaaaccaaacactatatgttctcactcataggtgggaattgaagaatgagaacacttggacacagtgtggggaacatcacatactggggcctgtaggggggtgggggggctgggggagggacagcattaggagaagtatctaatgtaaatgacaagttgacgggtgcagcaaaccaacatggcacatgtatacctatgtaacaaacctgcatattgtgcacatgtaccctagaacttaaagtataataataaaataaaaacgaaaaaaataaatttcatgttgtgtttagctgctgcatttgtggtgattcgtaattgcagcaattgaaaatgaatatagtttcctttacttgaatgacacttttggagttacacgatgcctgcttacacctcattcacagaacttagctgcatgaaagcatctagctacacagcaggtgggaaaatgtagcctttattctggacaaccagttgtctaatgaaaaatgggaggaagtacatcactaaaaagggaagtgtccagtggatactggggacaactagcagcctccatgacagttaccaaggatctatataaaaaattgtcctaataggcagggcgtggcggctcacgcctgtaatcccagcactttgggaggccaaagcaggcagatcacttgaggtcagaaattcgaggccagcctggccaacatggtgaacccccatctctactaaaaatacaaaattagccgggcgtggtggcacatgcctgtaatcccaactacttgggaggctgaggcgggagaatcacttgaacccagaaggcagaggttacgatgagccgagatcacgccattacactccagcctgggtgacagagcaggactccatcttaaaagaaaaaaaaaattgttataataatctggtgttttctgaaaagccacagatgaaaacaatactcattattatacaacagccatatatgaagcccatgtcctggaatttaattctagaaggaagtttgttcagacaaacttgtgtgctttcatcaaacgatgtacatgatacaacatccagtgttagccttttctatcagacaactctgaactaaagttagtattcaattaacactcaactatgtgtctcatcctagcataggctattgaggaaggccgagattttcaatcagaaacattggcttccagttctgcattgaccatttatgccccttctgaactagggcaaatgacttagtgtctttgacagtctatttttcttattagtcaattgggagaaatatcaacctcataggactgttatgagggttaaataaggtatgtgaaagatactttttgagatgaaaaagagccctatacatgtatttatagaattaaaacatataacatttatacatttatatgaaatgtataaaacattggatcttcccttcctctaagtcagtgtttttcgaacagtaggttgcaactgattagtcaatgaagtcaacttagtgggttattaccagatttttttaagttagataaaatataatagaaaatatcagagtgcattatgcacagcgaggataaagattgcttcatgtaactttttttagttatacatgcatatgcctaacagatcaaaatacaaaatatattttgactttgtaactttgttagaaagttttgaaaacactgctttaaaaacactgcttggaatggtgtgatcttcattttatctgtgttaaacatttggttttttgttttgtttttagcgctctattcatcatgtgcttttattagaaaccaactcacatctattttggagagagaaagttgagctaggagagagagagactgagggccagggtaaaactcatgttaaatgcttttcaaacaagatataattgttaaacttttatttatttatttatttatttttttttttgagacagaatctcactgtcgcctaggccggagtgcagtggtgcaatctcagctcactgcagcctctgcctcccgggttcaagcgattctcctgcctcagcctcccgaatagttgggactacaggcacacgccactgcgccaggctaattttctgtattttcagtagagatggggtttcaccgtgttagccaggatggtctcaatcttctgacctcgtgatctgcccgcctcggcctcccaaagtgctggattacaggcatgagccaccgcgcccaacctaattgttaaactcttaatctcagcctcagagtcagtcttccactctttgtgatgctggaagtgggctgaggcgctgaaaatgacattctcctttggcaacgggctattggtcaggctctgctactcagcacgggccaggagggaggcttcaaggtgcaaggccagtggaagaacttgcttcttcctttctgcttccagttcgcttcagttgcgagccaggccgtgtttctcccggtagtggcaatttattccattagcagcagtttattctggtttgcagtttcttccgaatcggcaccacctcaaagatatcaacaccagttggccagcaaccccttctcagcggtgtgagtcccagctctgtggagcccctccttcaagcttctacattttcatatttacaacctctttattttgttgcctcagccctgggggctggtagctgcattttgcaatcactccctgatgccttagtacaagcttgtccaatccctggccgtggccacatgtggcccaggacagctttggatgtggcccaatacaaattcgtaactttcttataacattatgagatttttttgcaattttcttttttaattcatcagcttcattagtgttagtgtgttttatgtgtggcccaggacaattattcttcttccaatggggcccagggaagtcaaaagattggacacccctgccttagtgcctctgactggaagggcctaccagcttatacttcctatgtttgcctgcctgccttttttttcttctgtcttgccttctcttaaaatgtactgagtggagagccgcagtggctcaggcctgttgtcctggtgcataaggaggcgaggctaggcgttccaggccagcctgggcaacatagaaacctctcatctatgtaacaaaaaaataataataataaaatgtactgagtaactgtactaggatctggactgggctctgggtcctctgtaaagtctgtgagcacacaaccatggaaccaatgagtttcatgttctctgtgaaacttcccaaacatcccaagtacccctctgtggtgtctaccttctaagatggcccccaataaattgtgccttttggtttccacacctttatgtcctcccctcccacaatgaatctgggctgagcctgtgactcactttaaccagtaaactgcagcaaaactgatgctgtgccccttccgggcctaacatcttttttttctttttttgacacaaggtctcattctgttgcccaggctagagtgcagcggtgcaatcacagttcgctgaagccttgacctccctggctcaagtgatcctcctatgtcagcctcccaagtagctgggaacacaggcacacaccaacatgcccagctaatttttttttttctttttttgttgagacaggttctcactatgttgcctagactggtctcaaactcctgagctcaagcaatccacctgccttggcctttcaaagtgctggcattacaggcatgagtcactatgcccagcctgagcctaaaatcaaagaaggcctcatatcttccacatttgtgctttgggaatcctggaccaccacgttaaaataataaaaaaacccagctgcctcgctggagagactatatcacgatgtcctcacaggaagatactgcatggagaaaagaaaccctgagaacacctgagaagagaggcccaggcatcccagcatctcatcccagcatctcatcccagctctagccatcatctgactgcaattatatgaagccagcaaaggaactgcccagctgaacccagttaatctacaaaatgtgagagataattaacccctaagttttggaggtggtttgctatgcagtaacagataattgaaatgccccttccctgttctatgttcttactctttaatcccataacaccttgtccctttgtacctctatcatattcttactcaagttgcattgtctgtctcccctaagagatggcaagtttctaaagggtggtgattgcatctttatttattttatcagaaaaagttcagtaaagaaaacagaaaccactcaaggcatttcaagcaaaaggagattaggtattcacaagattattgaaaggcacagcacgaggcttttggcttcaaggtcatatcaccatggttgtaatgcataggtctaaaaactgctgctactaccacagctctgccctatatccaagaaaatgatgtccggacagtggaatgtggatttggccatgcaaatacatctgccagaaccagccagccactatgacaagaacaatgacttctgtcttctttctgtcctccagatatttcatgaattcatctaattgacagaaccttcattgcacctagaagtcttgtgctaaaaggtctggaaaagccaggcttggcagcatacaccagtagttccagctactcaggaggttgaggcaggaggataactggaatccaggagtttgaggccatagtgagctatgatcacaccactacacttcagcctgggcaacataggaagaacttgtctcaaaaaaagaaaagaaagaaagaaaccttccagaaactatagctttcagcattccagttaattctatacaggggagaatatagatggagtgagaaatggatgataagggccgattaacagcatgtagtgcatttctgaatccctagccctaacacaagctctgataagtaggaagtctgataggcctgttgaatgaattgatgaatgtacaaattaatttgttatccatcaggtagtgtagcatgcaattatagtcccctcctatcctagatgctaggaagacaaaggtgaataaatggtatttccaaaaagcaaaatccaggggtagagctgagttgtgagagcagtgggatacaagtatgaattttgtaagattctcagtgttatctgtggagcccttgtctttcactctctcatgaaagtaaataggcaaatacagaatccatctcagatgttaaccttttcaacatgttttgcaaatgtaagttgtttctccaggaaataataaggctgcttttccaaggtcagccctgtagctgagtcaagaaagcattcctaaagcatatgtaaagaaaagaactcagacacagtctacacgcttgagaatagacacaactaaggccatcttgacaggtaaattctatggcttccccttgctattcacacatactatttattttcccagctattacttaaagcaccacatagctctcaatcctcagtgatgagaaaaagtggaatagagaccagaaataggaactcgagagtccagtgttctttacttaggccagcaattaacttgtaaaggctgtcacaatctcattttcagctgtattagttttgccatttacaaaatacaggcattatgtaaataaccaaacaatgctgataaagtgctgagtcctcatcactacagttatccctgtctgctctgtactaaatctatgacaggatttgtgtaattatagggtgtgttccccttgctaagcatatctcccacacaatccatttagccactcataaaccaaacactaggatttttttaaaaaagaaattagttgatcttgctagggttagtggaatgttttttatttgtttccattcctattgttgagatttggtgctttttcaaacagttgcttatagtttaaaaaaaaaaaaagactagacaaagctacaaccaagcattaatagtagtagtgaactctggggagtccgactggctgttccttttattttactttatgtgctgcattgtttgtatttttcacaatgggaatgtattgattttaaaattaaaaataaactttgtggcctggcgtggtggctcacgcctgtaatcccagcactttgggaggccgaggcgggtggatcacgaggtcaggagatcgagaccatccaggcaaacacggtgaaaccccgtctctactaaaaaatacaaaaaattagccgtgcacggtggtgggcacctatagtcccagctactcgggaggctgagacaggagaatggcgtgaacctgggaggcggagcttgcagtgagcaaagatcgcgctactgcactccagcctgggcgacagagtgagactccgtctcaaaaataaataaataaataaaaagcaaactttgtaaatattaccaatgattaactttgagtagagggattacagatgattttttttattatttgaatatttatattgagaaaaataaccattatttaaaagaacatcgactacattgttgacactttttctgcagaaagtgcaacaagtgtatcaagtgacacgtag

SEQ ID NO: 31 - DNA, 8640 bp, Artificial sequence; identical to SEQ ID NO: 16
  PDX-mCherry recombinant BAC 5' arm

SEQ ID NO: 32 - DNA, 19206 bp, Artificial sequence
  PDX-mCherry recombinant BAC 3' arm
cggggcccaccttagaccgaaggggaaaacccgctctctcaggcgcatgtgccagttggggccccgcgggtagatgccggcaggccttccggaagaaaaagagccattggtttttgtagtattggggccctcttttagtgatactggattggcgttgtttgtggctgttgcgcacatccctgccctcctacagcactccaccttgggacctgtttagagaagccggctcttcaaagacaatggaaactgtaccatacacattggaaggctccctaacacacacagcggggaagctgggccgagtaccttaatctgccataaagccattcttactcgggcgacccctttaagtttagaaataattgaaaggaaatgtttgagttttcaaagatcccgtgaaattgatgccagtggaatacagtgagtcctcctcttcctcctcctcctcttccccctccccttcctcctcctcctcttcttttccctcctcttcctcttcctcctgctctcctttcctccccctcctcttttccctcctcttcctcttcctcctgctctcctttcctccccctcctctttctcctcctcctcctcttcttccccctcctctccctcctcctcttcttccccctcctctccctcctcctcttcttctccctcctcttcctcttcctcctcttccacgtgctctcctttcctccccctcctcttgctccccttcttccccgtcctcttcctcctcctcctcttcttctccctcctcttcctcctcctctttcttcctgacctctttctttctcctcctcctccttctacctccccttctcatccctcctcttcctcttctctagctgcacacttcactactgcacatcttataacttgcacccctttcttctgaggaagagaacatcttgcaaggcagggcgagcagcggcagggctggcttaggagcagtgcaagagtccctgtgctccagttccacactgctggcagggaaggcaaggggggacgggcctggatctgggggtgagggagaaagatggacccctgggtgaccactaaaccaaagatattcggaactttctatttaggatgtggacgtaattcctgttccgaggtagaggctgtgctgaagacaagcacagtggcctggtgcgccttggaaaccaacaactattcacgagccagtatgaccttcacatctttagaaattatgaaaacgtatgtgattggagggtttggaaaaccagttatcttatttaacattttaaaaattacctaacagttatttacaaacaggtctgtgcatcccaggtctgtcttcttttcaaggtctgggccttgtgctcgggttatgtttgtgggaaatgcttaataaatactgataatatgggaagagatgaaaactgattctcctcactttgtttcaaacctttctggcagtgggatgattcgaattcacttttaaaattaaattagcgtgttttgttttgttttgtttttgtttttgtttgagagggtctcattctgtcgttcctgggttcctctttttttcagggattctcctacctcagcctcctgagtagctgggattacaggcttacaccaccacgcccggctaatttttgtatttttagtagagacagggtttcgccatgatggccaggctgatcagggtctatttttttcggtactaatcaggaaaaatcaggtaattaagaaatagtgcacttgagttttgagttggagcaccctgtgaggggatgaatatccagttttgttttatttttaatttaagaatatcttctcatgatgactttctcgggtaatatagtctagagcgtgggagacagctcggagtactgctggccaatactgcttcctggcagagccaagcgccgcccacctgacgcctcagtgctgcgggtggtgagacccgtcgctggctcccaccatggtcaggtctcctctttcctcccaaagctgaggacgcaggcgaggccgttttctgtgacccttccaaaagaagcgttgttttggatgagtctctgtccccggaggccgagggccaaaagtgtcttatgttagaggcaaagatgcccggatttagagggcttccaacccctaggaccactttgctcttccctgcaggaagctctcagatgggcgccttagcccggtggtgcacccgacggccctccccggcgctccctgtgttcagtaccagtacctcactcccaggcgtcgctgcttttcttttactttttgcaaagatagacgctgtttgttgttgccgttttgttttgttttgttttactggagagagatatcgagtccctcgggataaaattaagtcccttggatcagaaaggggaacttgcgcatccttgagagtgctctttccttgcggttctccacacccgcctgggctctggggtggggcaaatctgcgctcgcatccttggtccctcaaatattggcccagcccgaagtcctgataaaatgattcgaactctcagtgactcagtttcttcatccagaaagtggaggcaaatactacttcatggagttgctgtgaggtttaaaccaagaaatacctgtaaaatgctaattcggcatctaggaatccctccacaaacagtagctattgttttaggctgtcatcgtcgtcgtcgtcagaggcaatcgggagctgctgttgtggagtttctaaagtcccccaccagtcccccggcagcccctcccctctggcaaacccccacactgtcgctgttgatatgagttttattcctctacccactcatctttcccgaacactgcctagtttcaggatgcccttcctcataaataaactccctaggttttccacagcaaacttcaccaggcaaagaactgcagctccgccgaccagttagttggtggaggcgcagaaacttgtcctcggaccccacgcagaagccgccgccctctccaaggctccggccccgacttcgctctgcgaattgggccagccgctgcttttccgcgagacccgagggttcgccaaggagaggagaagaggcacaggctgcctgagactggtcttcgggcagccgagggcgcgggatgactcgggcaggcgtgtggcctccgactgaccagggttgggcccgggatcagagctttgcttggaagttctctgggtggcagagactcgggcaaccggagcctgagcctcccgcggggaagagctcggactccggaggtcgcgccgccttgggcttgaattcagtccttccttactactcgtggctttgcttacatcatttaactctccatttccttgtctatacagtgggctcataaggaggcggtaaggagatgatgatgtctttgaagagtttaggacaggacctggtgtctcccgtacgcttggtgggggtggcggaggtgatgcgttgttaacaggagaaaccgaccttccagggaggcccagggaggcagcggagagcgaagtcctgctcggcggagagacctcgaggagagtatggggaaaggaatgaatgctgcggagcgcccctctgggctccacccaagcctcggaggcgggacggtgggctccgtcccgaccccttaggcagctggaccgatacctcctggatcagaccccacaggaagactcgcgtggggcccgatatgtgtacttcaaactctgagcggccaccctcagccaactggccagtggatgcgaatcgtgggccctgaggggcgagggcgctcggaactgcatgcctgtgcacggtgccgggctctccagagtgagggggccgtaaggagatctccaaggaagccgaaaaaagcagccagttgggcttcgggaaagacttttctgcaaaggaagtgatctggtcccagaactccagggttgaccccagtacctgacttctccgggagctgtcagctctcctctgttcttcgggcttggcgcgctcctttcataatggacagacaccagtggccttcaaaaggtctggggtgggggaacggaggaagtggccttgggtgcagaggaagagcagagctcctgccaaagctgaacgcagttagccctacccaagtgcgcgctggctcggcatatgcgctccagagccggcaggacagcccggccctgctcaccccgaggagaaatccaacagcgcagcctcctgcacctccttgccccagagaccgtccgagctggagccacaagccctccattcctcttggaatcttcaaccccaaggtaaggtaagttcaccgagcaccgcccagcgatgcgcaggatccgggggggatcacgcgcggcgaccctaccgagcgctccgtgcgcgcccccatctctcggatcgtgttcctggctctgtcgaagctgctgagtcccgcgattcgggaaatccggcacttgtttctcaccctacaccatcacgtggaaatcattgaaaatgggaaccctggtggagtatctgggagagcacgcttgtgccgaggggcctgagctatgggacttcctccaggtccctctgtttcctgccggcgtaggggactcgtagtgtcggatcgcatagtgccaaaaaatagtgcatgggaaacaaacaaaaacacctctcattttcttccgcaatatagtttttcctgtaggtgggctaacatagtacctgaagaagttctcaccttgaagagctaaatccataccatacaatatctgagagttggtgatgatttcgggtcatgcatattgtttttaacagggatgatgtccataaataacttgctcttcgctccagtactggggcgtgaacgcattcagcaacatatgttggattcctgctttgctgcggcacgcaggaagcctcacagtgcttgccctggaagcactcacagtttttacaagacaaatcacatcttcccacttgatggtcaataccgtcatggagattgaattgattatcagtgactgaatttaccagagtaaacagaagtcactatgattccccaaaatgaatgctccttttgaacaagggcatttcatttcttaattttggcctccttagtctagcactgccaccctctccatatcctctccttcaaccagttcagttcaatgcatttaagtttgactgaaatttaagtattgtactttccttttcaaattggtgaatctacctgttctattttcatctccccaccacccattctctgtctcattctctctctctctctctctctttctctctctctctgtctgctctctctctctctctctgtaggtgtggtttgtgtctgagggtgagtctccccatctttgtgtttctgaggatgcctgtgtaacctatgtgcctatgtgtgtttgtgtgcatgggtttagggtggtcttattgggttgccatagtgataatgatcagctgtgtctagggaccaaggaaaccttcctatatactttttgttttatgtgtgtatttatttacttgtttatttttgcgacggagtcttactctgccgctcaggctggagtgcagtggcacgatctcgggttactacaacctccacctcccaggttcaagtgattctcctgcctcagctccccgggtagctgggattacaggcaccagcctccatgcctggtgaatttttgtattttagtacagatggggttttgacacattggccaggctggtcttgaactcctgacctcaagtgatccacccactttggcctcccaaagtgcttggattacagcacagccatctcacaggtgtctgatggcattgctgatgatgaaaactgtccgctcaggttactgtctcaattctttgaattggcacaacgttagaaggcaagaagtgctgtctttagaataacacaaagttgaaactttggtagaagctgacagattgctaaagtactaccataaggaactttaaaatcttctctgtctaaaaaagaagttcacaactaaggtatttcatgacttcaacaaatttacctataaagcctcctgaaaattaagtagttacaaatgtcagaagaaggaaattctgagttgatattgaatcaagctttactccaacccagctctaacaggctagatgtgggaacaataaacctaatgggaaactgaggcagggcagcaggaagcagaaggcctccttgcaaaagaaatgggaatgatgcatcctcttatctggcagccagccatcaagaaattgcttcccatggtcagcttgagcagtgggaagagactggcaggaaacactgggtaggaaggggaggtcaaggtctgcagataatagcagctaaaaataggtgatttcagagtgaaagtggctggctgaaagggatgaggctcataggttacctagtgataacctgtcaatgccagattcccatattaaagtatggtatatttacacatctgtaagatggaatgcacatgataaaattatattccttccaggtgcggtggctcatgcctgtaatcccagcactttgggaggccaaggcgggcagatcacctgaggtcgggagttcgagaccaacctgaccaacacggagaaactctgtgtctactaaaaatacaaaattagccaggtgtggtggtgcatgcatgtaatcccagctactcatgaggctgaggcagaagaatcgcttgaacctgggaggcacaggtttcagtgagccgagattgtgccattgcactccagcctgggctacaagagtgaaactctgcctcaaaaaaaaaaaaaaaaatcatagtcctgatgtttcattaaaattatttcctctgtaaatgagatcccatggcttttgaaagcataaatagctctaactttaagcagtattctatcattcaacttcaagttgaacaccttggagtccttccctgaacatagagcatatagaaaccttaaatatatgccatatcatcagcacgcattcaagattcttgtctacattgtggaatactctgaaatctcacttctaatgataattacacatctaaaaagcgtaaagaacctgatctgatcatcacacataatatggagtaaaacatcactatgtaccccatgtatatgtacaagtaatacttgtcaatttaaaaaaatttatgtgtaacaatatttttgctgctaattatttacatcattgaataaattctatctctcctctttcagaattctcaatgagcctgatttccaaaaggtatgacattttgaaagtaatttctcttatttacatatgctcttagaaaattcagaagtcccacacttctaaatctgtctggaaatactgctgatttgaaatcgacatattacatggaattatttccacttcatagttctagaaacaaacaaaaaaaaatgtacaaaataaggccgggcactgtggctcatgcctataatctcagcactttgggaggccgaggtgggtggatcacaaggtcaggagtttgagaccagcctggccaatatggtgaaacccggaaaccccgtctctactaaaaatacaaaaattagccaggcctagtggcaggtgcctatagtcccagctacttgggaggctgaggcaggagaatcacttgaacctgggaggcagaggttgcagtgagccaagatcacatcactgcactccagcctgggccacagattgagattctgtctcaaaaaacaaaaacaaaagtacaaaatagagttgggcaaggtggctcatgcctgtaatcctagcactttgaaaggctgaggagagaggattgcttgagcctaggagtttaggactatgattgtagtgagctatgattgtgccaatacactccagcttgggtgacagagcaataccttgtctctaaataaagcatttttaaatgttcaaaataatctctaagaaataaacaattggccagcagggtggctaatgcctgtaatcccagcactttgggaggccgaggtgggcggatcacttgaggtcaggagtttgggaccagcctgagcaacatggtgaaaccctgtctccactaaaaacacaaaaattagtcaggcgtggtggcgagcacctgtagtccctgctagcagggaggctgaggcaggagaattgcttgaacccggagaggttgcagtgagccgagatcgcaccactgcactccagcctgggcaacaagagccacactccatctcaaaaaataataaatacatacataaataaataaatataaaatattatataattggatttattgcaatcaatgaacatgtggtttatttttatttaatattgaaagactacgtttctaggccagaaggacaggagagtggataatttctcctgtggatgattgggcctttccacagaaacacaaacagagattgtataaagcacaaggcattattcatgctaccctttgtcctccagtccagtggaggagaaaaggaacaatccctggccaaatgtgcaaattgaaagtgctgtttttcactaccttgggcagggtttagcttccggttttgtgttccctatttactgcccttctgaactagggcaaataacttgatccatttgagcttgtctactcccctgtgaattagggataatcccatctcatgtgactattgtgagagttaagtaagataaggtatgtgaagagcacatacttgggtgagtggaaacctttatttttatttattaggtacaaggtctcactctgttgcccaggcttgagtgcagtggtgtggtcctatcatctcactgtagcctcaaaccctgggctcaaagcaatcttcccacctcagccccacaagtagctgagactacaggccagtaccaccaagcccagctttttacattttttttttagacatagggatcttgctaagttacccaggctagtctcaaactcctgggcttgagcaatccccttgccttagcctcctgtggctgggattgcaggtgacagccacctcacctggctgagtgccacctcacctggctgagtggagccctttagaaggatgtggtttttccagaagctgaggtctttcttgccctactaaatcacagacagctctttgctcaatggacctcagggaaggcaacaactgccacaccaattgaatgtatgcccttttccctggagccctggagtcctccctcagatggggacagctaggtcttgtcctggctcttcacaagagaatttctggactgcaaagtcacattgaagttgaccaggtaggagcaaaaataagctaccactgtataaagcagagaggcaaaagccagctgtactgactgaagtcacacgtcaaacagcattgatacccacatgcaactagctttacttgtaaggcacaagcatttcagccaatttaaggatagtctgatgaccaaagatagaaagtctcttgacaaactagaatttttttaaggatctctaggcctccgctcaaagaataggagattgttctaagaccttcttaataagtcatttccctagatgttactatattgattagtattaatacatatttatatatagatgtattatgtataatatatatttatataatacatattattataaataatatatattgatgcatattgacatgattaatacatatttatatataaatgtattatgtataatatatatttatataatacatattattatacgtaatatatattgatactaatcaatatagtaacatctagggaaatgacttattaagaaggtcttggaactgtctcctattctttgaggaggggctagagatccctaaaaattcctactatgtattatacataatacatataatatgtaatattctattgtgtattatatatattatatataatatattatatattatgtattgtatataatatattatgtattatatattatatgtattatgtattatatatgtattatatataatgtattatgtgttatatattatgtattatatatattatatgtgtaatatatatttatgtatatatatttatatataaatgcattatgtataatatatatttatataatacatattatacaaaatatatagatacatattgatatgattaatacatatttatatataaatgtattatgtataatatatttatataatacatattattatacataatatatattgatactaatcaatatagtaacatctaaggaaatgacttactaagaaggtcttggaacaatctcctattctttgagggggggtctagataatatgttatatattttgtattatatataatacataatatgttatatattatgtattatatataatacataatatgttatatattatgtataatatattatatattatgtattatatataatacataatatattatgtattatgtataatatattatatgtgtaatatatttatgtatatataatacatatattatatattatatattatatgtataatatattataagtataatatatattatatgtataatttatgtataatatatattatacataaatatgtataatatatattatacataaatatgtataatatatatgtaattatatatattatatgtatattatattatatatatgtatattatatgtaattatatatattatatatgcatataatatatgtgtaattatataatattatgtaaatatatattacacataaatatatattatacataaatatatattatacatataatatatattatacataattatgtataatatatattatatgtataatatatattatatattttcaaaaagtaggttgcaactgattagtcaataaagtcaagttagccaggctcggtggttcacacctgtaatcccagcactttgggaggccgaggcacttaaggtcaggagttcgagaccagcctggccaacatggtgaaaccccgtctccacaaaaaatacgaaaaaaattacccgggcgtagtggcgcgcccctgtaatcccagatactcaggaggcagagacaggagaatcgcttgaaaccaggaggtgaaggttgcagtgagccaagatcactccagcctgggcaactccatctcaaaaaaaaaaaaaaaagtccatttagtgggttgttaccagatttttattttatatatatatatatttattgtatataaaaaatatatatgtggaacccaagaggttttgacatttgattctgccatccctaagtgttgtggacctccctagtcccttagagcactccagccaatacacttactttctcagcagcaggggaaaagagacaaatcagaaggatatgcatctatggtagacagaataatggtccctgaaaagttgaaaggtgtctacattgcaattcctgaaacctgtgtctatgttcccttacagggcaaaagggatttttagagatataattagattaggtacttaaaataaacagattattctagattatccttgtgggcccaatctaatcatacaagtccttgaaagcaaataactttctctagctagaattcaagagctacagcagaaagaaaagttgaagagattccaaatatgaggaggctttactgagccattgctgcctctgagatgagggagtccattgacaaggacccaagagaggctggtaagggctaacgaccacccccaggcgacagacagcaaggaaactgggggcagccacaaggacgtggcctctccaacactggaccagagaaactgctgagccaagggggactttgacagacagaaacagtgaaataataaatttaataaccctagaagaaaacctaggcaataccattcaagacataggcatgacaaggacttcatgactaaaacaccaaaagcaatggcaacaaaacccaaaatagacaaatgggatctaattaaactaaagagcttctgcacagcaaaagaaactaccatcagagtgaaaaggcaacctacagaatgggagaaaatttttgcaatctacttatctgacaaagggctaatatccagaatctacaaaggacttaaacaaatttacaagaaaaaaactaacaaccccatcaaaaagtgggcaaaggatatgaacagacaattctcaaaagaagacatttatgcagccaacacacacttgaaaaaatgctcatcataactggtcatcagagaaatgcaaaccaaaaccacaatgagataccatctcacgccagttagaatggcgatcattaaaaagtcaggaaacaacagatgctggagaggatgtggataaataggaacgtttttacactgttggtgggactgtaaattagttcacccattgcggaagacagtgtggccattcctcaaggatctagaactagaaataccatttgactcaactggggtattactgggtatatacccagaggattataaataatgctactataaagacacatgtacacgtatgtttattgcagcactattcacaatagcaaagacttggaaccaacccaaatgtccatcaatgatagactggattaagaaaatgtggcacatatacacaatggaatactatgcagccataaaaaaggatgagttcatgtcctttgccgggacatggatgaaactggaaaccatcattctcagcaaactatcacaaggacagaaaaccaaacactatatgttctcactcataggtgggaattgaagaatgagaacacttggacacagtgtggggaacatcacatactggggcctgtaggggggtgggggggctgggggagggacagcattaggagaagtatctaatgtaaatgacaagttgacgggtgcagcaaaccaacatggcacatgtatacctatgtaacaaacctgcatattgtgcacatgtaccctagaacttaaagtataataataaaataaaaacgaaaaaaataaatttcatgttgtgtttagctgctgcatttgtggtgattcgtaattgcagcaattgaaaatgaatatagtttcctttacttgaatgacacttttggagttacacgatgcctgcttacacctcattcacagaacttagctgcatgaaagcatctagctacacagcaggtgggaaaatgtagcctttattctggacaaccagttgtctaatgaaaaatgggaggaagtacatcactaaaaagggaagtgtccagtggatactggggacaactagcagcctccatgacagttaccaaggatctatataaaaaattgtcctaataggcagggcgtggcggctcacgcctgtaatcccagcactttgggaggccaaagcaggcagatcacttgaggtcagaaattcgaggccagcctggccaacatggtgaacccccatctctactaaaaatacaaaattagccgggcgtggtggcacatgcctgtaatcccaactacttgggaggctgaggcgggagaatcacttgaacccagaaggcagaggttacgatgagccgagatcacgccattacactccagcctgggtgacagagcaggactccatcttaaaagaaaaaaaaaattgttataataatctggtgttttctgaaaagccacagatgaaaacaatactcattattatacaacagccatatatgaagcccatgtcctggaatttaattctagaaggaagtttgttcagacaaacttgtgtgctttcatcaaacgatgtacatgatacaacatccagtgttagccttttctatcagacaactctgaactaaagttagtattcaattaacactcaactatgtgtctcatcctagcataggctattgaggaaggccgagattttcaatcagaaacattggcttccagttctgcattgaccatttatgccccttctgaactagggcaaatgacttagtgtctttgacagtctatttttcttattagtcaattgggagaaatatcaacctcataggactgttatgagggttaaataaggtatgtgaaagatactttttgagatgaaaaagagccctatacatgtatttatagaattaaaacatataacatttatacatttatatgaaatgtataaaacattggatcttcccttcctctaagtcagtgtttttcgaacagtaggttgcaactgattagtcaatgaagtcaacttagtgggttattaccagatttttttaagttagataaaatataatagaaaatatcagagtgcattatgcacagcgaggataaagattgcttcatgtaactttttttagttatacatgcatatgcctaacagatcaaaatacaaaatatattttgactttgtaactttgttagaaagttttgaaaacactgctttaaaaacactgcttggaatggtgtgatcttcattttatctgtgttaaacatttggttttttgttttgtttttagcgctctattcatcatgtgcttttattagaaaccaactcacatctattttggagagagaaagttgagctaggagagagagagactgagggccagggtaaaactcatgttaaatgcttttcaaacaagatataattgttaaacttttatttatttatttatttatttttttttttgagacagaatctcactgtcgcctaggccggagtgcagtggtgcaatctcagctcactgcagcctctgcctcccgggttcaagcgattctcctgcctcagcctcccgaatagttgggactacaggcacacgccactgcgccaggctaattttctgtattttcagtagagatggggtttcaccgtgttagccaggatggtctcaatcttctgacctcgtgatctgcccgcctcggcctcccaaagtgctggattacaggcatgagccaccgcgcccaacctaattgttaaactcttaatctcagcctcagagtcagtcttccactctttgtgatgctggaagtgggctgaggcgctgaaaatgacattctcctttggcaacgggctattggtcaggctctgctactcagcacgggccaggagggaggcttcaaggtgcaaggccagtggaagaacttgcttcttcctttctgcttccagttcgcttcagttgcgagccaggccgtgtttctcccggtagtggcaatttattccattagcagcagtttattctggtttgcagtttcttccgaatcggcaccacctcaaagatatcaacaccagttggccagcaaccccttctcagcggtgtgagtcccagctctgtggagcccctccttcaagcttctacattttcatatttacaacctctttattttgttgcctcagccctgggggctggtagctgcattttgcaatcactccctgatgccttagtacaagcttgtccaatccctggccgtggccacatgtggcccaggacagctttggatgtggcccaatacaaattcgtaactttcttataacattatgagatttttttgcaattttcttttttaattcatcagcttcattagtgttagtgtgttttatgtgtggcccaggacaattattcttcttccaatggggcccagggaagtcaaaagattggacacccctgccttagtgcctctgactggaagggcctaccagcttatacttcctatgtttgcctgcctgccttttttttcttctgtcttgccttctcttaaaatgtactgagtggagagccgcagtggctcaggcctgttgtcctggtgcataaggaggcgaggctaggcgttccaggccagcctgggcaacatagaaacctctcatctatgtaacaaaaaaataataataataaaatgtactgagtaactgtactaggatctggactgggctctgggtcctctgtaaagtctgtgagcacacaaccatggaaccaatgagtttcatgttctctgtgaaacttcccaaacatcccaagtacccctctgtggtgtctaccttctaagatggcccccaataaattgtgccttttggtttccacacctttatgtcctcccctcccacaatgaatctgggctgagcctgtgactcactttaaccagtaaactgcagcaaaactgatgctgtgccccttccgggcctaacatcttttttttctttttttgacacaaggtctcattctgttgcccaggctagagtgcagcggtgcaatcacagttcgctgaagccttgacctccctggctcaagtgatcctcctatgtcagcctcccaagtagctgggaacacaggcacacaccaacatgcccagctaatttttttttttctttttttgttgagacaggttctcactatgttgcctagactggtctcaaactcctgagctcaagcaatccacctgccttggcctttcaaagtgctggcattacaggcatgagtcactatgcccagcctgagcctaaaatcaaagaaggcctcatatcttccacatttgtgctttgggaatcctggaccaccacgttaaaataataaaaaaacccagctgcctcgctggagagactatatcacgatgtcctcacaggaagatactgcatggagaaaagaaaccctgagaacacctgagaagagaggcccaggcatcccagcatctcatcccagcatctcatcccagctctagccatcatctgactgcaattatatgaagccagcaaaggaactgcccagctgaacccagttaatctacaaaatgtgagagataattaacccctaagttttggaggtggtttgctatgcagtaacagataattgaaatgccccttccctgttctatgttcttactctttaatcccataacaccttgtccctttgtacctctatcatattcttactcaagttgcattgtctgtctcccctaagagatggcaagtttctaaagggtggtgattgcatctttatttattttatcagaaaaagttcagtaaagaaaacagaaaccactcaaggcatttcaagcaaaaggagattaggtattcacaagattattgaaaggcacagcacgaggcttttggcttcaaggtcatatcaccatggttgtaatgcataggtctaaaaactgctgctactaccacagctctgccctatatccaagaaaatgatgtccggacagtggaatgtggatttggccatgcaaatacatctgccagaaccagccagccactatgacaagaacaatgacttctgtcttctttctgtcctccagatatttcatgaattcatctaattgacagaaccttcattgcacctagaagtcttgtgctaaaaggtctggaaaagccaggcttggcagcatacaccagtagttccagctactcaggaggttgaggcaggaggataactggaatccaggagtttgaggccatagtgagctatgatcacaccactacacttcagcctgggcaacataggaagaacttgtctcaaaaaaagaaaagaaagaaagaaaccttccagaaactatagctttcagcattccagttaattctatacaggggagaatatagatggagtgagaaatggatgataagggccgattaacagcatgtagtgcatttctgaatccctagccctaacacaagctctgataagtaggaagtctgataggcctgttgaatgaattgatgaatgtacaaattaatttgttatccatcaggtagtgtagcatgcaattatagtcccctcctatcctagatgctaggaagacaaaggtgaataaatggtatttccaaaaagcaaaatccaggggtagagctgagttgtgagagcagtgggatacaagtatgaattttgtaagattctcagtgttatctgtggagcccttgtctttcactctctcatgaaagtaaataggcaaatacagaatccatctcagatgttaaccttttcaacatgttttgcaaatgtaagttgtttctccaggaaataataaggctgcttttccaaggtcagccctgtagctgagtcaagaaagcattcctaaagcatatgtaaagaaaagaactcagacacagtctacacgcttgagaatagacacaactaaggccatcttgacaggtaaattctatggcttccccttgctattcacacatactatttattttcccagctattacttaaagcaccacatagctctcaatcctcagtgatgagaaaaagtggaatagagaccagaaataggaactcgagagtccagtgttctttacttaggccagcaattaacttgtaaaggctgtcacaatctcattttcagctgtattagttttgccatttacaaaatacaggcattatgtaaataaccaaacaatgctgataaagtgctgagtcctcatcactacagttatccctgtctgctctgtactaaatctatgacaggatttgtgtaattatagggtgtgttccccttgctaagcatatctcccacacaatccatttagccactcataaaccaaacactaggatttttttaaaaaagaaattagttgatcttgctagggttagtggaatgttttttatttgtttccattcctattgttgagatttggtgctttttcaaacagttgcttatagtttaaaaaaaaaaaaagactagacaaagctacaaccaagcattaatagtagtagtgaactctggggagtccgactggctgttccttttattttactttatgtgctgcattgtttgtatttttcacaatgggaatgtattgattttaaaattaaaaataaactttgtggcctggcgtggtggctcacgcctgtaatcccagcactttgggaggccgaggcgggtggatcacgaggtcaggagatcgagaccatccaggcaaacacggtgaaaccccgtctctactaaaaaatacaaaaaattagccgtgcacggtggtgggcacctatagtcccagctactcgggaggctgagacaggagaatggcgtgaacctgggaggcggagcttgcagtgagcaaagatcgcgctactgcactccagcctgggcgacagagtgagactccgtctcaaaaataaataaataaataaaaagcaaactttgtaaatattaccaatgattaactttgagtagagggattacagatgattttttttattatttgaatatttatattgagaaaaataaccattatttaaaagaacatcgactacattgttgacactttttctgcagaaagtgcaacaagtgtatcaagtgacacgtag

SEQ ID NO: 33 - DNA, 711 bp, Artificial sequence
  mCherry coding sequence
atggtgagcaagggcgaggaggataacatggccatcatcaaggagttcatgcgcttcaaggtgcacatggagggctccgtgaacggccacgagttcgagatcgagggcgagggcgagggccgcccctacgagggcacccagaccgccaagctgaaggtgaccaagggtggccccctgcccttcgcctgggacatcctgtcccctcagttcatgtacggctccaaggcctacgtgaagcaccccgccgacatccccgactacttgaagctgtccttccccgagggcttcaagtgggagcgcgtgatgaacttcgaggacggcggcgtggtgaccgtgacccaggactcctccctgcaggacggcgagttcatctacaaggtgaagctgcgcggcaccaacttcccctccgacggccccgtaatgcagaagaagaccatgggctgggaggcctcctccgagcggatgtaccccgaggacggcgccctgaagggcgagatcaagcagaggctgaagctgaaggacggcggccactacgacgctgaggtcaagaccacctacaaggccaagaagcccgtgcagctgcccggcgcctacaacgtcaacatcaagttggacatcacctcccacaacgaggactacaccatcgtggaacagtacgaacgcgccgagggccgccactccaccggcggcatggacgagctgtacaagtaa

SEQ ID NO: 34 - DNA, 32526 bp, Homo sapiens
  misc_feature: BAC clone RP11-328P22
caggcaagggttgtttaagttactagataacaaagttgttattgattctagtatttttactcttcctgattccctgcagtccaaagggagtttgtcagaccaggagtgatttttattaaaaaaaaaaaaaaaagagtagttgctattgttgtaactggcctcattgtgacagatgggatcctagtgttttctcgctgccctttactcaggagctaggagaacagaaagcaaataaccaagaaaccaacacactcagtaatctggatttctcagagttgagccacagcacttggaaatcaaatattggctcctcctgaacgccccttttagcctggtgttgttaaccagtttaacattcccttatcacatgctcatgtgggcagaattaaatggaattagctgcaaattatataaaattcatttacctttaaaggaagctatttggtcatgttcagtgtagacagagcattgcattaagacacaagttaatggtactgcctggagatgaatcaatttgctttggttttattacctccctttatttgttcttatgtggtagctactgtgactggaaatgctcagctcaggttcacagagcccatgtcagagccacattaacatctcaaggagagtcccactctttctaaagagctcagtccaagtaaacacagtagcaaagtaagatcatgctgatcctcccttaatacttagtcacaaagaatggatgctgaacaaggtggcttatgcctgtaatcctagcactttaggaggcctaggtgggaggatcgcttgaggccaggagttcaagaccagcccggacaacatagcaagaccttgcctttacaaaaaaaaaagaaaaaagaaaaagttagccgggcatggtggagcatgcctgtagtcccagctactccaaaggccgaggagaaaagattgtttgagcccaggaggttgaggctgtagtgaggtaagattgtgccactgcactccagcctgggtgacagagggaaaccctgtctcaattaagaagataaataaattttaaaatgggtgatgtctaagagagaaaggcaaacctatgagaatgttgaggattgataagcatcttgtccatataggggttcaaataacatctattgaacttctgctttctgcactgacttaggcatttttctaagatttcttcatttcgacctcaccacaacctcatgatgcacaggtatatttttatttgaaagtgcatgcttcatgagttctttaagagagtatataaatctctatataacaaataaattatgcttgaggtgtctattgttgttctcaatttataatgttgataagaatgactgtgggcaggcgcagtggctcacgcctataatctcagcactttgggaggccagcgtggacagatcaagagatcaggagttcaataccagcctggccaacatagtgaaaccccatctctactaaaaatacaaaaaaattagccaggcatggtggcatgtgcctgtagtcccagctacttgggaggctgaagcaggagaattgcttgaacccagcaggtggaggttgcagtgagccgagattgggccactgcaccccagcttaggcaacagagtgagactttgtctcaacaacaacaacaaaaaaaaaaacaaaaaaaagaatgactgtgtacatgtttaaaatgcagactccccagtctcactcacccccatatcgttattcagaaggtctggggttgggctcagatattttcattttataagcatcccagtgattcttgatatacacagttcatgagtcacacttccaggaacacttccctataaatccatgttacttcattgattagtaagagtttgtatttttctgagatttgcctgaaggtaaatgtgttgcaatatgtaactggagaaaatataaaaaataaatgtatccaaatactgtgtctctgttcacaacaatacactcctaagagatatctaccacaggaagaattcctaattggcaaatatgataaagttgagaccacagtcagttagccttttactttaatctttgcaagagaggctgtggacctagcctaggctgtcaaaagagaaggcttcacttgtgctgctctgagtttagcattgactctcccatcttaaccccatcgatttctaattttaacgtggatttgatttggggggacacacagaggaatcactttgacggcagtgttcctgcaccctcacaaagacaaccagggttgaccatgaccgtttttctgatgtggaaaaagcaggaatggggcaggattccagctctgctctggcctagagactagaatgactcctttccctccctagacattttaaggtttcctctgagtttatgatgacagcttcatctccaacccacgaaagcaagaaccacagacaatgctagtgggggtgctctctggccagaacacactacttagatgctgggttccacacctactgggatagctaaggcattttgagttgtgattagttcacctgctcaagtctttattttggctttcctggctgtgaaaaagaaggccctgccccttctccacacctgtggggtctctctgtggtgtgctgatggcggacatgagagttctccagcaatccacctcctccagcccttttaagcaggactgtacctgggggcacattcccctaaaacactgagtaatatacctactaagtacttcctcccagtgttcctgaatatacctttccaggtctacccatctggaaatatctttagacatcagctcatggtgatagtctgtcattcttctggatgcagtaatagccaatagttcaatgtttatatgcacattaaaagcaatgctgggggagaaaggaagagatgaccatttattgaatgctttcaaagtgccaaaaacattagatgttttgtctcattaaatcctcacaaaaacaataaaaaatattttttgagtgcctactatatagtaagatagtacagtgtcacagccaacagaatggattttaaggccacatcaaggccaggtgtggtggctcatgcttgtaatcccagcactttgggaggccgaggtgggcagataacttgaagtcaggacttcgagaccagcctggccaacaggaaaaaccctgtctctactaacaatacaaaaattagccgggcatggtggtgcgtgcctgtaatcccagctactagagaggctaaggcaggagaatcgcttgaaccccagaggcagaggttgcggtgagccgagatcatgccactgcactccagcctaggcgacagagcaagactcagtctcaaaaaaaaaaaacaaaaaacaaaaaaccaggcatggtggcctgtaatcccagtactttgggaggccaaggtgggtggatagtctgaggtcaggagttcgagaccagcctgaccaacatggtgaaacccgtctctactaaaaatacaaaattagccaggcatggtggcacatgtctgtaatcccagctacttgggagtctgaggctggagtatcgcttgaacccaggaggtggaggttgcggtaagccaagatcatgccatggcactctggcctgggcgacagagcaaaactctatctggaaaaaaaaaaaaaaaaaagccacatcatctctgcttggatctaggctctgccacttactagctatataattctaggcaagtaacttaccatcactgggcctcaatttcctccactggaaaatgggataacagtaattggctcatggggttaacattggaaaatatttaaacaacgcctggctccatgcatttgccattacgattactatgtgcaacggggccagcttatggaacagtgctagtatttccattttacaaataagggcagggaagcttagtgaagtcatgtaacttggcaagggacacacagcttgtgcagggcagagcctgatgtggaggacaggtgtatgcagctcctgacctttctatggcccgccaaagccagcgcatatttctaccaatgagttttggttactcaaagagtgtgcaggcaggtgcacagtgagagatctacaggcatttgatcagtatatgttaccgaaaatctgggtccttcaaagcataaaccatgtgaaatgtaggatggttgaggaaggaagctggagggtagtgtgggtcaagccttctttaggctgcagcaggaacctggaggtaaggagaggctcctaggagaacaaaggattagtcataggaaatggtggtgggaggaggaggtggaaggcaaagaaaaggaactgtgtggaagcaaggagctggttacctaggactaagctcagaagggaagcagcagggatttctggagactgcacatctggaaggtagaaccagagatgagacaaccaaaggggtgagtccagagctgtagggggtgagccaccgggaacaccaggagtggggagcaacagctgacctcagatcctttggagcctgaaagtcctttcatacttttcctttcatcagcagagtgaactgaggaccacggaaggattaaaccaaaagtggaaagagctcgtgcctgggggccccactcccagggaggaagcgttgagcagtggctggaggaagcagcagacagttctggggcacacggagtcccccctcctgcccttctactcctcttacaccagagagagctaacaaggtagggaataagacaattacccaattcaattcggtttttaagctgcttttatctttacagttcagggatcactgaatcatctggaaaataatttcagctctctgcttattttcactagattgcttagccctaggaatattggaaaacccttcattcaaagtctgaggtcctttcctctctccaatccccacaacccaagctgggtttccctggcccctctcagacctggataccaaattctgggtatttatttatatatatatatatatttttaattttttgagacggagcctcgctctgtctcccaggctggagggcagtggcgcgatctcggatcactgcaagctccgcctcctgggttcacgccattctccttcctcagcctcccaagtagctggaactacaggcgcccgccaccacgcccggctaaatttttttgtaggtttagtagagacggggtttcatcatgttagccaggatggtctcgatctcctgacctcatgatccgcctgtctcagcctcccaaagtgctgggattacaggcgtgagccaccgccctcggccaattctgggtattcataaaccagcaggagggaaacattgattcgacttaggaaaatgaaaacctgcctgcattagtgctcattgaaggaaatgctaatgaactaaagtgcaatcaattatagaagtattctcattccacacatcacatcgtttgctttacagaattttccaactcaagaaacaatttttattttcaacagagatttaattataaaatgaatataaattccacgtgcattcatgatgtataccttggagttaagtgggattcatctgtttttttcatttataatgggatgcagtggcttaaaaatcctatcaccaagccaaattcagcccttagcatgcctctgaaaccaccgaggaagacttagccacttaccaagaacaaggtaacctgtgttctcccgggtgtaaaccgcgtctctgtgaagggaaagggggaagagggccggcaaggacctccagtatcagcgaggactatcaggacgtccagctaataaacgactttttcactgtccacactttaattggtttacagccttttttgtttatttatccataagagctgctgttaaatggctcgggaaggtgctcgcctaatggctcggtatcgctgccgggcctgttgtgggcgaggcggcttggagggggcgcaggcgtcagcggggattcagagcggaaacgcatttcgcctgtaatggactcggcgattttacgataccaggagctagatccacggggaagtacaacacacgaccttactaagcggagggttccgcttgatgcgttttttatacggctgtacgtgataaaattccagataactttgtttcatctaataataataataacaataataaatggttgtttgacctttgctccctgggtcccttctataggtcgcaggcagcagaaaatgctaattgtgaaagtgagaacgcgcctccatggaatacccccggcgatcccctcctcctcccccacagccgcgggtacccgggtttttgccggcgaccgcaaccggcggatttgctttctgctgagagcctcttttctttctgcagggccgagcaaaaatattaaatggaagcaaatgaagcatcgaaatggagaccaatttacagaaatgtgcaattagttgagaagtgcaaagtaaacactccgggggtggcaggcgaggcagggagcaggggagggagagtggggcgcagactgagtccagagtgggtgtaggggtgcccagggaggaggggaagggggaggaaaaggagggggaggggaaaagtggccgatctttgtcctgagcggagcttgccgtccgctcataaccgcgtcgccaagtcaaccctcggcgactcggcagattatctccaagggtcaacacgccgcggccaggcaaccccctccagcctgccctcctgatcgatgtggtcactcgcggccagggtgatagggtagagttctccgcggccgcagacaatggactcattgacgcgggcgcacagagattaggtgcccgggccccacggcctttcactctctgcccccaccaaaactgcaggtggcacttttccctgaagaaatcaccgaaactctccccgcccgccgccgtgcttcccttggcctgtcttcggtgacagcaagggcatctacaagccagggagccacacatcagagccacacacatgaggccacaggccaggaagccacacacatgagttctcacacatcgaagcaaatgctgagactataccggcctcccgcaagagaaggaatctgcagagaagtccacattcccgactggcttttttgtcttttaataaaaataaagagtcctcagaatagagcactcaatccgcacttaaaacacaaatatttccagtaggaagaaagaaatacattaagattgactctcaaaggtctggatgttggtgcgttgtttaggaaaggcggagcagtgatttttctctggcttggttctttgtggttcaagctctctcttgctgagacgtttctgcaaagctgtctagtttttctaaaacccacggtggcgtttcgagaaacgtcctcatttcgggagtatccagtcagaggctggtcaggccgccaggcctagcggatcatgcccaggcagggggttggacgtcaccgccacccggaggtcatccatccgcgtcagtgggtgcagaaaaagtggccctgtttaagtcaggaccccagaatgcccagaagttactgaatggtttgaagccaagcacagatgttatcatggaaaatgcagcgtttttatttctttttctaaatatgtaactcttcctccacttccccctctcctgcttgccttatttcaattgcaagcagaagagagtgagtgttctctgccggcaaactccgccagggtcccggcccgtagagagtcgtcaagggtctggaacccccgtgccaacacctgcccctgcttcgcagccccaagaggaaggccgcgtctttccccctcgctgtattgggaagctacgttccgggctggccaaatgggccccaattttccaaaacccaaatttgtaatacccttcaattttttaaaaaaaagaatttaaaaaagtctctgtgaatgcttcagaagttaccgtttacaccccagaagtacttgcagcacatccacaagtaaaaacacacaacgaatgccagagtttcgtgtgttttttaaccgacatctttgtggctgtgaacaaacttcataaataaaatagaatcaaatgcttctgacctagagagctgggtctgcaaactttttttttatcgtattccgcaacagttaaataaaaaattaaaaactcaacatgtctccttgtaaactacatcaattaacaaacacactatgtccattatcaaatataatagaaaaaatataggaaaatagaaaatagaaaaatataggaaaatagaaacttttaagccacggtgaaaatgtttctataaatgagtggttctaatgttttcgtgagcgcccattttggggagcaccgccagctgcccgttcaggagtgtgcagcaaactcagctgagagagaaaattggaacaaaagcaggtgctcgcgggtacctgggcctagcctcttagtgcggccagccaggccaatcacggcccccggctgaaccacgtggggccccgcggagcctatggtgcggcggccggcccgccggtccgcgctggctgtgggttccctctgagatcagtgcggagctgtcaaagcgagcaggggtggcgccgggagtgggaacgccacacagtgccaaatccccggctccagctcccgactcccggctcccggctcccggctcccggtgcccaatcccgggccgcagccatgaacggcgaggagcagtactacgcggccacgcagctttacaaggacccatgcgcgttccagcgaggcccggcgccggagttcagcgccagcccccctgcgtgcctgtacatgggccgccagcccccgccgccgccgccgcacccgttccctggcgccctgggcgcgctggagcagggcagccccccggacatctccccgtacgaggtgccccccctcgccgacgaccccgcggtggcgcaccttcaccaccacctcccggctcagctcgcgctcccccacccgcccgccgggcccttcccggagggagccgagccgggcgtcctggaggagcccaaccgcgtccagctgcctttcccatggatgaagtctaccaaagctcacgcgtggaaaggccagtgggcaggtaagcctggctccccacccctttctcctttccggttctcacccggccgccttacctccaagcgctcccaggagccttctctctgttcccggcgccttggattatcccgggtcggactaaactacatcagggagctaccgagcccatccctcacagcagtgcttctctagtccagtttgaagcatctttcccacccagctctcctgggagtgtacactccttccttccctgttcgctgagcccatcttcgccccaggagcccgcgctcccagcgccatccttagagagccgaggctgagtcctgctcagggcttcggacactacagatcctcctccagcaggggatccgggaacccaggactccttggtagtgcacatcgaggaagccgagtagggacatgggtgcctcggacccaggccccagatcgccttcggagccccggagcccctcacttcccgcgcttcgttaaggaagggcaggcatctaggggcgccaggtaggtgcagaaaggcagggagggaaaggaaactgcacccaacccagcagtgtccggctgccctggttgtggaaacaggataggagtaaagaggaaggggctggggcaaggcgggggctcaccgcgaggctgaaagccggcctctcaacgtcagagcctggcagctaggagagcaatctgagaagcgaattcgtttttcaccaaccgaaagcaattgaagctgtctccccgcaccgcttcccaggaagtaatttttcaggagatgggcgctccctgcctagctggtggggaggcgagaggcctggttcctgcggccctccgcgccggcagagaacagaaggtctttcccggagccgggagccggaggcacggggtagcccccgggtcctttgcggccccgcgcgagcggcaagttccggcgcggcctgtgtcgtcgccgctactcactgtcatcgctgccgtgcctcagccacttctggtcacacctgcaccgcaaatagttgccttttcctttcaactggcagccgggagtagggggaagcagctcgagccggcgtcccccggcccaccccgaaaatcctcagcgcccatctgcggggtctggccagccctgcctgacactgaccccaggcgcagccaggaggggctttgtgcgggagagggagggggaccccagcttgcctggggtccacgggactctcttcttcctagttcactttcttgctaaggcgaaggtcctgaggcaggacgagggctgaactgcgctgcaatcgtccccacctccagcgaaacccagttgacaggggcgccagaagctgccgcggcgcctctgcaaatttatccagctcgcgcagcccgggccaaaggccttgaagtctccggaaatgcggggttcttaggaggcgggaggacagtccctcgaacaaaggtggggggctcctcgtcctcacccagttttcttccagggctgcctcccctccagacctctcttctggcctcctaggccctcggagctcctgctttcccaccctgggccttcctcaggaaatgggcgacatcagggtcccgaaagaggatttgtgaggtggagtaacttccctatcccaacccaaggggtgatacctctgctctggaggacttgggcttaggctgacccaagaagccagaaagtaaaaccagaaggcaaatcagcagccttggcgagggttcggggacccaaggagggcgacactctcgggctggagttggccccaggcctttgctggcgccctctaacccgctgcatgctcgactctcggggaaggagacgacctcccctctcttcccctggaagccgtctgcggggccggctgctatccccgcgttcctctaggggaaacttcgatggagccgaaattcaaaaattgcaaacccacctgcccctgggaagagcgaagtgacaaaagggctctcactggcagtacgaatctgaatgctaatgacaacagaggttttgaaaaacattgacccccaaatgcttcagcagcgctgtccagctggcacctaaactgcatcactctgcgccttggggaagggcccaggcttggcgaccttgaccttttcccaccatcctcaacctccacccctgccgcgtcgcgctgagcacaggtcccccgggaatagtgcaccccaggaagtctctccctgagcagtctctcgcagggacttcacgaagccctctcgcagggactatacgaagcccgcagcctaaggcaggaacccagagacatgtcggtttaatgtaaaaactttggagagcctttcaaaatgtttattgaaggcccgtctcgcttctctcccaggcgtgggatgccaggtagattcggggatgcccccagggagtagaactctccctggactagggtttgagcctctgcttcagcttctggcgcctcttctcgacctggggggaaacccagtagggttccatcgcgaaattaaacccgcccccaacacacacacactcgcctttcaattccttaaggcttagccaacattcacaggagaaatgtcccctgcctttgctctaagacaagcctctccccggaactttggtggaacttcccgcgccagcgtccacagcctgggtgcagtcagtattttccacagaaaagaaaagattgggacctggctgagcgcagcggcaaacagtgaatgtgggtctccaacctcctgggccagggcgtcctgttgcctcttggagacacgagaggcttgtttctgcaccactaccacctcctccgtagggctgtcggttctgcagctgggctagggcccctgtgtctcccctcaacacctctgagggcatttgggatccagggcgtagagtctggagctgccagagttctgccctggccaacgtgacccccagaacaatattccttcacttcgcgggcagaagtccggctgaagttaaaacaattatggagaatttgctggctctcaggttgggactaattacgatataactatagagagaggaaacacatggtcagatataacaaaatgtgtcacagtctccattagcacaaagattttcaaactgcaggttgcacccattcgcaggtcataaaatcaatttactaggttgagattagtattttttaaacgaaatagcagataatggagagaaaagtagatagcatcatacgtggtaaacgtttgttttatgtccttaagatttgtcagtataactgacctgcagtgtccgtgtgtgaactacacaacgatccgaaatgtatttctcacatttgtgggtcaccatcaggaggttttttttagccctggattaaaggcgttttattgcctttgtaggatccagccggtttaactattatatacatttaaatcaacatcaatcagttgattaacaccgattatatgagcgcattcaaggaccactcattggcagagccaagcttaggctcacggcgagagctgactcgagtttggtctccaataaaaaggctatctttattaggaagggcttgagttactagggaagagcttcgcgcgcctacactaggcgctgaaatgggatgctggggcttggtggctccggcgggagcagctggtagggctagggctccctggccccccttgaaggggttgggctgcgtgggtgggggctgtgcggggctccgggggccacactcacgccctgtgtcgcccgcaggcggcgcctacgctgcggagccggaggagaacaagcggacgcgcacggcctacacgcgcgcacagctgctagagctggagaaggagttcctattcaacaagtacatctcacggccgcgccgggtggagctggctgtcatgttgaacttgaccgagagacacatcaagatctggttccaaaaccgccgcatgaagtggaaaaaggaggaggacaagaagcgcggcggcgggacagctgtcgggggtggcggggtcgcggagcctgagcaggactgcgccgtgacctccggcgaggagcttctggcgctgccgccgccgccgccccccggaggtgctgtgccgcccgctgcccccgttgccgcccgagagggccgcctgccgcctggccttagcgcgtcgccacagccctccagcgtcgcgcctcggcggccgcaggaaccacgatgagaggcaggagctgctcctggctgaggggcttcaaccactcgccgaggaggagcagagggcctaggaggaccccgggcgtggaccacccgccctggcagttgaatggggcggcaattgcggggcccaccttagaccgaaggggaaaacccgctctctcaggcgcatgtgccagttggggccccgcgggtagatgccggcaggccttccggaagaaaaagagccattggtttttgtagtattggggccctcttttagtgatactggattggcgttgtttgtggctgttgcgcacatccctgccctcctacagcactccaccttgggacctgtttagagaagccggctcttcaaagacaatggaaactgtaccatacacattggaaggctccctaacacacacagcggggaagctgggccgagtaccttaatctgccataaagccattcttactcgggcgacccctttaagtttagaaataattgaaaggaaatgtttgagttttcaaagatcccgtgaaattgatgccagtggaatacagtgagtcctcctcttcctcctcctcctcttccccctccccttcctcctcctcctcttcttttccctcctcttcctcttcctcctgctctcctttcctccccctcctcttttccctcctcttcctcttcctcctgctctcctttcctccccctcctctttctcctcctcctcctcttcttccccctcctctccctcctcctcttcttccccctcctctccctcctcctcttcttctccctcctcttcctcttcctcctcttccacgtgctctcctttcctccccctcctcttgctccccttcttccccgtcctcttcctcctcctcctcttcttctccctcctcttcctcctcctctttcttcctgacctctttctttctcctcctcctccttctacctccccttctcatccctcctcttcctcttctctagctgcacacttcactactgcacatcttataacttgcacccctttcttctgaggaagagaacatcttgcaaggcagggcgagcagcggcagggctggcttaggagcagtgcaagagtccctgtgctccagttccacactgctggcagggaaggcaaggggggacgggcctggatctgggggtgagggagaaagatggacccctgggtgaccactaaaccaaagatattcggaactttctatttaggatgtggacgtaattcctgttccgaggtagaggctgtgctgaagacaagcacagtggcctggtgcgccttggaaaccaacaactattcacgagccagtatgaccttcacatctttagaaattatgaaaacgtatgtgattggagggtttggaaaaccagttatcttatttaacattttaaaaattacctaacagttatttacaaacaggtctgtgcatcccaggtctgtcttcttttcaaggtctgggccttgtgctcgggttatgtttgtgggaaatgcttaataaatactgataatatgggaagagatgaaaactgattctcctcactttgtttcaaacctttctggcagtgggatgattcgaattcacttttaaaattaaattagcgtgttttgttttgttttgtttttgtttttgtttgagagggtctcattctgtcgttcctgggttcctctttttttcagggattctcctacctcagcctcctgagtagctgggattacaggcttacaccaccacgcccggctaatttttgtatttttagtagagacagggtttcgccatgatggccaggctgatcagggtctatttttttcggtactaatcaggaaaaatcaggtaattaagaaatagtgcacttgagttttgagttggagcaccctgtgaggggatgaatatccagttttgttttatttttaatttaagaatatcttctcatgatgactttctcgggtaatatagtctagagcgtgggagacagctcggagtactgctggccaatactgcttcctggcagagccaagcgccgcccacctgacgcctcagtgctgcgggtggtgagacccgtcgctggctcccaccatggtcaggtctcctctttcctcccaaagctgaggacgcaggcgaggccgttttctgtgacccttccaaaagaagcgttgttttggatgagtctctgtccccggaggccgagggccaaaagtgtcttatgttagaggcaaagatgcccggatttagagggcttccaacccctaggaccactttgctcttccctgcaggaagctctcagatgggcgccttagcccggtggtgcacccgacggccctccccggcgctccctgtgttcagtaccagtacctcactcccaggcgtcgctgcttttcttttactttttgcaaagatagacgctgtttgttgttgccgttttgttttgttttgttttactggagagagatatcgagtccctcgggataaaattaagtcccttggatcagaaaggggaacttgcgcatccttgagagtgctctttccttgcggttctccacacccgcctgggctctggggtggggcaaatctgcgctcgcatccttggtccctcaaatattggcccagcccgaagtcctgataaaatgattcgaactctcagtgactcagtttcttcatccagaaagtggaggcaaatactacttcatggagttgctgtgaggtttaaaccaagaaatacctgtaaaatgctaattcggcatctaggaatccctccacaaacagtagctattgttttaggctgtcatcgtcgtcgtcgtcagaggcaatcgggagctgctgttgtggagtttctaaagtcccccaccagtcccccggcagcccctcccctctggcaaacccccacactgtcgctgttgatatgagttttattcctctacccactcatctttcccgaacactgcctagtttcaggatgcccttcctcataaataaactccctaggttttccacagcaaacttcaccaggcaaagaactgcagctccgccgaccagttagttggtggaggcgcagaaacttgtcctcggaccccacgcagaagccgccgccctctccaaggctccggccccgacttcgctctgcgaattgggccagccgctgcttttccgcgagacccgagggttcgccaaggagaggagaagaggcacaggctgcctgagactggtcttcgggcagccgagggcgcgggatgactcgggcaggcgtgtggcctccgactgaccagggttgggcccgggatcagagctttgcttggaagttctctgggtggcagagactcgggcaaccggagcctgagcctcccgcggggaagagctcggactccggaggtcgcgccgccttgggcttgaattcagtccttccttactactcgtggctttgcttacatcatttaactctccatttccttgtctatacagtgggctcataaggaggcggtaaggagatgatgatgtctttgaagagtttaggacaggacctggtgtctcccgtacgcttggtgggggtggcggaggtgatgcgttgttaacaggagaaaccgaccttccagggaggcccagggaggcagcggagagcgaagtcctgctcggcggagagacctcgaggagagtatggggaaaggaatgaatgctgcggagcgcccctctgggctccacccaagcctcggaggcgggacggtgggctccgtcccgaccccttaggcagctggaccgatacctcctggatcagaccccacaggaagactcgcgtggggcccgatatgtgtacttcaaactctgagcggccaccctcagccaactggccagtggatgcgaatcgtgggccctgaggggcgagggcgctcggaactgcatgcctgtgcacggtgccgggctctccagagtgagggggccgtaaggagatctccaaggaagccgaaaaaagcagccagttgggcttcgggaaagacttttctgcaaaggaagtgatctggtcccagaactccagggttgaccccagtacctgacttctccgggagctgtcagctctcctctgttcttcgggcttggcgcgctcctttcataatggacagacaccagtggccttcaaaaggtctggggtgggggaacggaggaagtggccttgggtgcagaggaagagcagagctcctgccaaagctgaacgcagttagccctacccaagtgcgcgctggctcggcatatgcgctccagagccggcaggacagcccggccctgctcaccccgaggagaaatccaacagcgcagcctcctgcacctccttgccccagagaccgtccgagctggagccacaagccctccattcctcttggaatcttcaaccccaaggtaaggtaagttcaccgagcaccgcccagcgatgcgcaggatccgggggggatcacgcgcggcgaccctaccgagcgctccgtgcgcgcccccatctctcggatcgtgttcctggctctgtcgaagctgctgagtcccgcgattcgggaaatccggcacttgtttctcaccctacaccatcacgtggaaatcattgaaaatgggaaccctggtggagtatctgggagagcacgcttgtgccgaggggcctgagctatgggacttcctccaggtccctctgtttcctgccggcgtaggggactcgtagtgtcggatcgcatagtgccaaaaaatagtgcatgggaaacaaacaaaaacacctctcattttcttccgcaatatagtttttcctgtaggtgggctaacatagtacctgaagaagttctcaccttgaagagctaaatccataccatacaatatctgagagttggtgatgatttcgggtcatgcatattgtttttaacagggatgatgtccataaataacttgctcttcgctccagtactggggcgtgaacgcattcagcaacatatgttggattcctgctttgctgcggcacgcaggaagcctcacagtgcttgccctggaagcactcacagtttttacaagacaaatcacatcttcccacttgatggtcaataccgtcatggagattgaattgattatcagtgactgaatttaccagagtaaacagaagtcactatgattccccaaaatgaatgctccttttgaacaagggcatttcatttcttaattttggcctccttagtctagcactgccaccctctccatatcctctccttcaaccagttcagttcaatgcatttaagtttgactgaaatttaagtattgtactttccttttcaaattggtgaatctacctgttctattttcatctccccaccacccattctctgtctcattctctctctctctctctctctttctctctctctctgtctgctctctctctctctctctgtaggtgtggtttgtgtctgagggtgagtctccccatctttgtgtttctgaggatgcctgtgtaacctatgtgcctatgtgtgtttgtgtgcatgggtttagggtggtcttattgggttgccatagtgataatgatcagctgtgtctagggaccaaggaaaccttcctatatactttttgttttatgtgtgtatttatttacttgtttatttttgcgacggagtcttactctgccgctcaggctggagtgcagtggcacgatctcgggttactacaacctccacctcccaggttcaagtgattctcctgcctcagctccccgggtagctgggattacaggcaccagcctccatgcctggtgaatttttgtattttagtacagatggggttttgacacattggccaggctggtcttgaactcctgacctcaagtgatccacccactttggcctcccaaagtgcttggattacagcacagccatctcacaggtgtctgatggcattgctgatgatgaaaactgtccgctcaggttactgtctcaattctttgaattggcacaacgttagaaggcaagaagtgctgtctttagaataacacaaagttgaaactttggtagaagctgacagattgctaaagtactaccataaggaactttaaaatcttctctgtctaaaaaagaagttcacaactaaggtatttcatgacttcaacaaatttacctataaagcctcctgaaaattaagtagttacaaatgtcagaagaaggaaattctgagttgatattgaatcaagctttactccaacccagctctaacaggctagatgtgggaacaataaacctaatgggaaactgaggcagggcagcaggaagcagaaggcctccttgcaaaagaaatgggaatgatgcatcctcttatctggcagccagccatcaagaaattgcttcccatggtcagcttgagcagtgggaagagactggcaggaaacactgggtaggaaggggaggtcaaggtctgcagataatagcagctaaaaataggtgatttcagagtgaaagtggctggctgaaagggatgaggctcataggttacctagtgataacctgtcaatgccagattcccatattaaagtatggtatatttacacatctgtaagatggaatgcacatgataaaattatattccttccaggtgcggtggctcatgcctgtaatcccagcactttgggaggccaaggcgggcagatcacctgaggtcgggagttcgagaccaacctgaccaacacggagaaactctgtgtctactaaaaatacaaaattagccaggtgtggtggtgcatgcatgtaatcccagctactcatgaggctgaggcagaagaatcgcttgaacctgggaggcacaggtttcagtgagccgagattgtgccattgcactccagcctgggctacaagagtgaaactctgcctcaaaaaaaaaaaaaaaaatcatagtcctgatgtttcattaaaattatttcctctgtaaatgagatcccatggcttttgaaagcataaatagctctaactttaagcagtattctatcattcaacttcaagttgaacaccttggagtccttccctgaacatagagcatatagaaaccttaaatatatgccatatcatcagcacgcattcaagattcttgtctacattgtggaatactctgaaatctcacttctaatgataattacacatctaaaaagcgtaaagaacctgatctgatcatcacacataatatggagtaaaacatcactatgtaccccatgtatatgtacaagtaatacttgtcaatttaaaaaaatttatgtgtaacaatatttttgctgctaattatttacatcattgaataaattctatctctcctctttcagaattctcaatgagcctgatttccaaaaggtatgacattttgaaagtaatttctcttatttacatatgctcttagaaaattcagaagtcccacacttctaaatctgtctggaaatactgctgatttgaaatcgacatattacatggaattatttccacttcatagttctagaaacaaacaaaaaaaaatgtacaaaataaggccgggcactgtggctcatgcctataatctcagcactttgggaggccgaggtgggtggatcacaaggtcaggagtttgagaccagcctggccaatatggtgaaacccggaaaccccgtctctactaaaaatacaaaaattagccaggcctagtggcaggtgcctatagtcccagctacttgggaggctgaggcaggagaatcacttgaacctgggaggcagaggttgcagtgagccaagatcacatcactgcactccagcctgggccacagattgagattctgtctcaaaaaacaaaaacaaaagtacaaaatagagttgggcaaggtggctcatgcctgtaatcctagcactttgaaaggctgaggagagaggattgcttgagcctaggagtttaggactatgattgtagtgagctatgattgtgccaatacactccagcttgggtgacagagcaataccttgtctctaaataaagcatttttaaatgttcaaaataatctctaagaaataaacaattggccagcagggtggctaatgcctgtaatcccagcactttgggaggccgaggtgggcggatcacttgaggtcaggagtttgggaccagcctgagcaacatggtgaaaccctgtctccactaaaaacacaaaaattagtcaggcgtggtggcgagcacctgtagtccctgctagcagggaggctgaggcaggagaattgcttgaacccggagaggttgcagtgagccgagatcgcaccactgcactccagcctgggcaacaagagccacactccatctcaaaaaataataaatacatacataaataaataaatataaaatattatataattggatttattgcaatcaatgaacatgtggtttatttttatttaatattgaaagactacgtttctaggccagaaggacaggagagtggataatttctcctgtggatgattgggcctttccacagaaacacaaacagagattgtataaagcacaaggcattattcatgctaccctttgtcctccagtccagtggaggagaaaaggaacaatccctggccaaatgtgcaaattgaaagtgctgtttttcactaccttgggcagggtttagcttccggttttgtgttccctatttactgcccttctgaactagggcaaataacttgatccatttgagcttgtctactcccctgtgaattagggataatcccatctcatgtgactattgtgagagttaagtaagataaggtatgtgaagagcacatacttgggtgagtggaaacctttatttttatttattaggtacaaggtctcactctgttgcccaggcttgagtgcagtggtgtggtcctatcatctcactgtagcctcaaaccctgggctcaaagcaatcttcccacctcagccccacaagtagctgagactacaggccagtaccaccaagcccagctttttacattttttttttagacatagggatcttgctaagttacccaggctagtctcaaactcctgggcttgagcaatccccttgccttagcctcctgtggctgggattgcaggtgacagccacctcacctggctgagtgccacctcacctggctgagtggagccctttagaaggatgtggtttttccagaagctgaggtctttcttgccctactaaatcacagacagctctttgctcaatggacctcagggaaggcaacaactgccacaccaattgaatgtatgcccttttccctggagccctggagtcctccctcagatggggacagctaggtcttgtcctggctcttcacaagagaatttctggactgcaaagtcacattgaagttgaccaggtaggagcaaaaataagctaccactgtataaagcagagaggcaaaagccagctgtactgactgaagtcacacgtcaaacagcattgatacccacatgcaactagctttacttgtaaggcacaagcatttcagccaatttaaggatagtctgatgaccaaagatagaaagtctcttgacaaactagaatttttttaaggatctctaggcctccgctcaaagaataggagattgttctaagaccttcttaataagtcatttccctagatgttactatattgattagtattaatacatatttatatatagatgtattatgtataatatatatttatataatacatattattataaataatatatattgatgcatattgacatgattaatacatatttatatataaatgtattatgtataatatatatttatataatacatattattatacgtaatatatattgatactaatcaatatagtaacatctagggaaatgacttattaagaaggtcttggaactgtctcctattctttgaggaggggctagagatccctaaaaattcctactatgtattatacataatacatataatatgtaatattctattgtgtattatatatattatatataatatattatatattatgtattgtatataatatattatgtattatatattatatgtattatgtattatatatgtattatatataatgtattatgtgttatatattatgtattatatatattatatgtgtaatatatatttatgtatatatatttatatataaatgcattatgtataatatatatttatataatacatattatacaaaatatatagatacatattgatatgattaatacatatttatatataaatgtattatgtataatatatttatataatacatattattatacataatatatattgatactaatcaatatagtaacatctaaggaaatgacttactaagaaggtcttggaacaatctcctattctttgagggggggtctagataatatgttatatattttgtattatatataatacataatatgttatatattatgtattatatataatacataatatgttatatattatgtataatatattatatattatgtattatatataatacataatatattatgtattatgtataatatattatatgtgtaatatatttatgtatatataatacatatattatatattatatattatatgtataatatattataagtataatatatattatatgtataatttatgtataatatatattatacataaatatgtataatatatattatacataaatatgtataatatatatgtaattatatatattatatgtatattatattatatatatgtatattatatgtaattatatatattatatatgcatataatatatgtgtaattatataatattatgtaaatatatattacacataaatatatattatacataaatatatattatacatataatatatattatacataattatgtataatatatattatatgtataatatatattatatattttcaaaaagtaggttgcaactgattagtcaataaagtcaagttagccaggctcggtggttcacacctgtaatcccagcactttgggaggccgaggcacttaaggtcaggagttcgagaccagcctggccaacatggtgaaaccccgtctccacaaaaaatacgaaaaaaattacccgggcgtagtggcgcgcccctgtaatcccagatactcaggaggcagagacaggagaatcgcttgaaaccaggaggtgaaggttgcagtgagccaagatcactccagcctgggcaactccatctcaaaaaaaaaaaaaaaagtccatttagtgggttgttaccagatttttattttatatatatatatatttattgtatataaaaaatatatatgtggaacccaagaggttttgacatttgattctgccatccctaagtgttgtggacctccctagtcccttagagcactccagccaatacacttactttctcagcagcaggggaaaagagacaaatcagaaggatatgcatctatggtagacagaataatggtccctgaaaagttgaaaggtgtctacattgcaattcctgaaacctgtgtctatgttcccttacagggcaaaagggatttttagagatataattagattaggtacttaaaataaacagattattctagattatccttgtgggcccaatctaatcatacaagtccttgaaagcaaataactttctctagctagaattcaagagctacagcagaaagaaaagttgaagagattccaaatatgaggaggctttactgagccattgctgcctctgagatgagggagtccattgacaaggacccaagagaggctggtaagggctaacgaccacccccaggcgacagacagcaaggaaactgggggcagccacaaggacgtggcctctccaacactggaccagagaaactgctgagccaagggggactttgacagacagaaacagtgaaataataaatttaataaccctagaagaaaacctaggcaataccattcaagacataggcatgacaaggacttcatgactaaaacaccaaaagcaatggcaacaaaacccaaaatagacaaatgggatctaattaaactaaagagcttctgcacagcaaaagaaactaccatcagagtgaaaaggcaacctacagaatgggagaaaatttttgcaatctacttatctgacaaagggctaatatccagaatctacaaaggacttaaacaaatttacaagaaaaaaactaacaaccccatcaaaaagtgggcaaaggatatgaacagacaattctcaaaagaagacatttatgcagccaacacacacttgaaaaaatgctcatcataactggtcatcagagaaatgcaaaccaaaaccacaatgagataccatctcacgccagttagaatggcgatcattaaaaagtcaggaaacaacagatgctggagaggatgtggataaataggaacgtttttacactgttggtgggactgtaaattagttcacccattgcggaagacagtgtggccattcctcaaggatctagaactagaaataccatttgactcaactggggtattactgggtatatacccagaggattataaataatgctactataaagacacatgtacacgtatgtttattgcagcactattcacaatagcaaagacttggaaccaacccaaatgtccatcaatgatagactggattaagaaaatgtggcacatatacacaatggaatactatgcagccataaaaaaggatgagttcatgtcctttgccgggacatggatgaaactggaaaccatcattctcagcaaactatcacaaggacagaaaaccaaacactatatgttctcactcataggtgggaattgaagaatgagaacacttggacacagtgtggggaacatcacatactggggcctgtaggggggtgggggggctgggggagggacagcattaggagaagtatctaatgtaaatgacaagttgacgggtgcagcaaaccaacatggcacatgtatacctatgtaacaaacctgcatattgtgcacatgtaccctagaacttaaagtataataataaaataaaaacgaaaaaaataaatttcatgttgtgtttagctgctgcatttgtggtgattcgtaattgcagcaattgaaaatgaatatagtttcctttacttgaatgacacttttggagttacacgatgcctgcttacacctcattcacagaacttagctgcatgaaagcatctagctacacagcaggtgggaaaatgtagcctttattctggacaaccagttgtctaatgaaaaatgggaggaagtacatcactaaaaagggaagtgtccagtggatactggggacaactagcagcctccatgacagttaccaaggatctatataaaaaattgtcctaataggcagggcgtggcggctcacgcctgtaatcccagcactttgggaggccaaagcaggcagatcacttgaggtcagaaattcgaggccagcctggccaacatggtgaacccccatctctactaaaaatacaaaattagccgggcgtggtggcacatgcctgtaatcccaactacttgggaggctgaggcgggagaatcacttgaacccagaaggcagaggttacgatgagccgagatcacgccattacactccagcctgggtgacagagcaggactccatcttaaaagaaaaaaaaaattgttataataatctggtgttttctgaaaagccacagatgaaaacaatactcattattatacaacagccatatatgaagcccatgtcctggaatttaattctagaaggaagtttgttcagacaaacttgtgtgctttcatcaaacgatgtacatgatacaacatccagtgttagccttttctatcagacaactctgaactaaagttagtattcaattaacactcaactatgtgtctcatcctagcataggctattgaggaaggccgagattttcaatcagaaacattggcttccagttctgcattgaccatttatgccccttctgaactagggcaaatgacttagtgtctttgacagtctatttttcttattagtcaattgggagaaatatcaacctcataggactgttatgagggttaaataaggtatgtgaaagatactttttgagatgaaaaagagccctatacatgtatttatagaattaaaacatataacatttatacatttatatgaaatgtataaaacattggatcttcccttcctctaagtcagtgtttttcgaacagtaggttgcaactgattagtcaatgaagtcaacttagtgggttattaccagatttttttaagttagataaaatataatagaaaatatcagagtgcattatgcacagcgaggataaagattgcttcatgtaactttttttagttatacatgcatatgcctaacagatcaaaatacaaaatatattttgactttgtaactttgttagaaagttttgaaaacactgctttaaaaacactgcttggaatggtgtgatcttcattttatctgtgttaaacatttggttttttgttttgtttttagcgctctattcatcatgtgcttttattagaaaccaactcacatctattttggagagagaaagttgagctaggagagagagagactgagggccagggtaaaactcatgttaaatgcttttcaaacaagatataattgttaaacttttatttatttatttatttatttttttttttgagacagaatctcactgtcgcctaggccggagtgcagtggtgcaatctcagctcactgcagcctctgcctcccgggttcaagcgattctcctgcctcagcctcccgaatagttgggactacaggcacacgccactgcgccaggctaattttctgtattttcagtagagatggggtttcaccgtgttagccaggatggtctcaatcttctgacctcgtgatctgcccgcctcggcctcccaaagtgctggattacaggcatgagccaccgcgcccaacctaattgttaaactcttaatctcagcctcagagtcagtcttccactctttgtgatgctggaagtgggctgaggcgctgaaaatgacattctcctttggcaacgggctattggtcaggctctgctactcagcacgggccaggagggaggcttcaaggtgcaaggccagtggaagaacttgcttcttcctttctgcttccagttcgcttcagttgcgagccaggccgtgtttctcccggtagtggcaatttattccattagcagcagtttattctggtttgcagtttcttccgaatcggcaccacctcaaagatatcaacaccagttggccagcaaccccttctcagcggtgtgagtcccagctctgtggagcccctccttcaagcttctacattttcatatttacaacctctttattttgttgcctcagccctgggggctggtagctgcattttgcaatcactccctgatgccttagtacaagcttgtccaatccctggccgtggccacatgtggcccaggacagctttggatgtggcccaatacaaattcgtaactttcttataacattatgagatttttttgcaattttcttttttaattcatcagcttcattagtgttagtgtgttttatgtgtggcccaggacaattattcttcttccaatggggcccagggaagtcaaaagattggacacccctgccttagtgcctctgactggaagggcctaccagcttatacttcctatgtttgcctgcctgccttttttttcttctgtcttgccttctcttaaaatgtactgagtggagagccgcagtggctcaggcctgttgtcctggtgcataaggaggcgaggctaggcgttccaggccagcctgggcaacatagaaacctctcatctatgtaacaaaaaaataataataataaaatgtactgagtaactgtactaggatctggactgggctctgggtcctctgtaaagtctgtgagcacacaaccatggaaccaatgagtttcatgttctctgtgaaacttcccaaacatcccaagtacccctctgtggtgtctaccttctaagatggcccccaataaattgtgccttttggtttccacacctttatgtcctcccctcccacaatgaatctgggctgagcctgtgactcactttaaccagtaaactgcagcaaaactgatgctgtgccccttccgggcctaacatcttttttttctttttttgacacaaggtctcattctgttgcccaggctagagtgcagcggtgcaatcacagttcgctgaagccttgacctccctggctcaagtgatcctcctatgtcagcctcccaagtagctgggaacacaggcacacaccaacatgcccagctaatttttttttttctttttttgttgagacaggttctcactatgttgcctagactggtctcaaactcctgagctcaagcaatccacctgccttggcctttcaaagtgctggcattacaggcatgagtcactatgcccagcctgagcctaaaatcaaagaaggcctcatatcttccacatttgtgctttgggaatcctggaccaccacgttaaaataataaaaaaacccagctgcctcgctggagagactatatcacgatgtcctcacaggaagatactgcatggagaaaagaaaccctgagaacacctgagaagagaggcccaggcatcccagcatctcatcccagcatctcatcccagctctagccatcatctgactgcaattatatgaagccagcaaaggaactgcccagctgaacccagttaatctacaaaatgtgagagataattaacccctaagttttggaggtggtttgctatgcagtaacagataattgaaatgccccttccctgttctatgttcttactctttaatcccataacaccttgtccctttgtacctctatcatattcttactcaagttgcattgtctgtctcccctaagagatggcaagtttctaaagggtggtgattgcatctttatttattttatcagaaaaagttcagtaaagaaaacagaaaccactcaaggcatttcaagcaaaaggagattaggtattcacaagattattgaaaggcacagcacgaggcttttggcttcaaggtcatatcaccatggttgtaatgcataggtctaaaaactgctgctactaccacagctctgccctatatccaagaaaatgatgtccggacagtggaatgtggatttggccatgcaaatacatctgccagaaccagccagccactatgacaagaacaatgacttctgtcttctttctgtcctccagatatttcatgaattcatctaattgacagaaccttcattgcacctagaagtcttgtgctaaaaggtctggaaaagccaggcttggcagcatacaccagtagttccagctactcaggaggttgaggcaggaggataactggaatccaggagtttgaggccatagtgagctatgatcacaccactacacttcagcctgggcaacataggaagaacttgtctcaaaaaaagaaaagaaagaaagaaaccttccagaaactatagctttcagcattccagttaattctatacaggggagaatatagatggagtgagaaatggatgataagggccgattaacagcatgtagtgcatttctgaatccctagccctaacacaagctctgataagtaggaagtctgataggcctgttgaatgaattgatgaatgtacaaattaatttgttatccatcaggtagtgtagcatgcaattatagtcccctcctatcctagatgctaggaagacaaaggtgaataaatggtatttccaaaaagcaaaatccaggggtagagctgagttgtgagagcagtgggatacaagtatgaattttgtaagattctcagtgttatctgtggagcccttgtctttcactctctcatgaaagtaaataggcaaatacagaatccatctcagatgttaaccttttcaacatgttttgcaaatgtaagttgtttctccaggaaataataaggctgcttttccaaggtcagccctgtagctgagtcaagaaagcattcctaaagcatatgtaaagaaaagaactcagacacagtctacacgcttgagaatagacacaactaaggccatcttgacaggtaaattctatggcttccccttgctattcacacatactatttattttcccagctattacttaaagcaccacatagctctcaatcctcagtgatgagaaaaagtggaatagagaccagaaataggaactcgagagtccagtgttctttacttaggccagcaattaacttgtaaaggctgtcacaatctcattttcagctgtattagttttgccatttacaaaatacaggcattatgtaaataaccaaacaatgctgataaagtgctgagtcctcatcactacagttatccctgtctgctctgtactaaatctatgacaggatttgtgtaattatagggtgtgttccccttgctaagcatatctcccacacaatccatttagccactcataaaccaaacactaggatttttttaaaaaagaaattagttgatcttgctagggttagtggaatgttttttatttgtttccattcctattgttgagatttggtgctttttcaaacagttgcttatagtttaaaaaaaaaaaaagactagacaaagctacaaccaagcattaatagtagtagtgaactctggggagtccgactggctgttccttttattttactttatgtgctgcattgtttgtatttttcacaatgggaatgtattgattttaaaattaaaaataaactttgtggcctggcgtggtggctcacgcctgtaatcccagcactttgggaggccgaggcgggtggatcacgaggtcaggagatcgagaccatccaggcaaacacggtgaaaccccgtctctactaaaaaatacaaaaaattagccgtgcacggtggtgggcacctatagtcccagctactcgggaggctgagacaggagaatggcgtgaacctgggaggcggagcttgcagtgagcaaagatcgcgctactgcactccagcctgggcgacagagtgagactccgtctcaaaaataaataaataaataaaaagcaaactttgtaaatattaccaatgattaactttgagtagagggattacagatgattttttttattatttgaatatttatattgagaaaaataaccattatttaaaagaacatcgactacattgttgacactttttctgcagaaagtgcaacaagtgtatcaagtgacacgtag

SEQ ID NO: 35 - DNA, 162374 bp, Homo sapiens
  misc_feature: BAC clone RP11-53M11
ccatatccacatccctttacaatgtaatctgtagctcttccccttaagcagtagagactatttcccccacttctagtgtttgggctgctttgaccaaaagaatgaggcagaagggacattgtgctagtgccaaaacgaaacctcaagagaactggtacatttctgttctctcaggaatcctgttatccaccctgtgagtaagcctgggctggcctgctggatgataagagaaacctagccccagtgcccagttaccccagccaacagccaaccaacccccagaagaagagccacccacctggccgctgacgcatgataaacccagcctaatccagataccacccatttgagctcagtccaattggcccacccaaaggattgtgagctcaataaatgtttgttttagtactaagtttggagtgattttttatgccataaatctgatacaactacagacagcaaaaacaagcaagttgataaataagataatttcaggtacagaagggatgtgaaaaagatcatgtaggttaattttgtagaggtgataaggccactcagtttgtcagggaagtcctctctgagaaggggacatttaaggtaaaactaatttaaagagaaaaaactattcaaagactattcaaagatacagaagaaatgtattccaaacagaagacagagcaagtacaaagcccctgagtcaggactggggatactcaaaggacggaaagaaggccagtgtggctgaaaaacagtaacaagatggagagtcaaggaagacttcatcagagaaataggaagaggccagattttttagggccctctggactgcggttcggagtttagattgtacttttttaaggtattttgatgttatacattttaaagagatcattgtggttgctatgaggagcatgggtgttagaacagcaggagtagaggtaggagccttgctgctctgctagttgggatgaaaacttatggtggcttacatgaggtgtgtagccaggaaaataacgataagtggattggttgggttatattcatggaatggaactgttgagacttactattgtaggttataggataaagaaaggattcaagtttaacctttaggtttgggtatgagtgaatggtaggaccatttactgatacggggaaggcttgagaagaggagagtggatgaaggctgacatctgtaattatatttcagctgtgttatgtttgagatacttgtggatttcaaaatggtggtgtcaggtagacagttggctatctgagtctgaagctcaggctggtgatcacatctggagctgtatgtaaatttgagagtaatacgcttgcagatggcactttaaaccacataaatatggtgggggagggactacataactggagataattttctaggaagagaatttaaaaacgaaagagaagagagcctaagataacgtccttgggcttttcaagcaaggtcttgtagaggaggagagcttccaaaagaaactgatcatgtgtggccaacaaggtaagaggaaaacaaggtaggaaagggtcctgagagctttgaggagggggcactctaaggaaaggtggcggttaggctgggtgagcacccctgattgggtatataaatcactgcttgtgcaagagggaggtcattggtgagcttgacaatggccacagtagtggagtggtagaagacagaccagttagggagggttgaggaaagactaagggatgagagaggtgggcggctctttgctggaatgtttctgtgaaggggagcagaggagtgatacaatgccagaggagggctatgagatcaaaggaggatgttctctgagatacgtgatactaagttgtatttttgtgtttagcagaatgattcaacagagagaaagaaatagattttccaagacagggaagggataatgctgaatggaagatgttaagaaggtgaaagagaatgggaccctgagcacagtggaatggcaggagcaggcacgcttctttcatagaagcagaaggaaggcagatgatgtggtacttgatgcaggtcatctggatgagttattgagaacatagaggaagcttaggaggttcaaggaaaaaaggataaaatcatctcagaaagaaagaagtaaattactagggaactgtattaggattttagcgccatgttggatgcccacttggtacttgagatcattcattttaagtccattccagtggcagtggaaattagaggaagtggtcaaaaattattccaatgaggaccaaaagaccattagaattccagaattgagaaaagatgcatatttggtggggaaaattgaagaaaaattatggagttgtcagtttttcacatcttgagctccaattagcaatgtcctgtagatatctaaaaatacaaggctggaagacaagtgggagggccagcaaagtgcagacttaacagtcacatgattaggaataagatcaggaagagctgagcagcagaaacaacaatgatgcaagaaagtgagcttcagacatgtggacctgtgctgtcattgggcccaaggagctaaatcatgtaggttgaaatagagccctttttttccactttctctgaaaaattggaaaatccctttatttcatgaatttcttaaaaaccattatattccaagagtctgagagtctggcttttaagaataagaaaaaaaatgtatcaatccttgctttaccctctcccccaaaaaaaattatccaaaatttccaaattcaggatattatcctccttcatgaaaagaaagagaatatgcaggtgattttataacctaacacaataactctatagagtcaactaaaaacctgaaaataaagcagtggactttaaagaggttagaaggggtggaggacagggagggagagaggaagtcaacgatttacagagggcctgctgtgtgccaggcccagtccctggagtctgatcctagacatctatctctaggaagcagtatggtagagtgaaaggagtgaggactctggaatcacacacacacacacctggaagtgaatctaaaggcccccatttattaattgtgcacactagggtgagttacttaacctttgagcttgtgtattgtctgtgaaatggagataacaataacccactctcctggaacagctcaatgagtacatatgttaagtgcttatccaagtaccttttaaatggtagatattctagaaatgtttgtttaattccctttcactttacttccaagatagaggatacagtatctgaacaaaagccgaaaagcaaagaatattaaaattaagggaggcccatgtacatctagagatgtaaagtcagtaaccatctctcttcctctaaatctcactccatgatattcctccccaatattcttatttccctatgcctgcgccttcaggctactaacactagcttctgacctgacacgatgattatagaacttcagagctcaacttaaaagttggtttagtgtccacagcctttccctttgccaaagccatagcctgtgtgccagctccttcctgggcccagcttccttctatggtgagatcctaatattgcagctgtttattctaatcttcaaaacatgaaggcctagcttcctgcaccagtcagaccttgggtccctctctgaacctcagctccatgcttaaccttttctggactcctcaatcccacactgatctctgttgctctccagttatgtgtttgctcttttgcacccaactcccttccatatattttattgcaatcttccctgacattctatcctgtaagcattgcccaccgtggaaacattgtttctgtaagattccttcttcagtctttataacacaaagttctgccgttggaccagcttcctatcccagggaataacttaaaatgaaatatgcaccataatttgcagttatagtcacagcataaagtcacaagttgacctgccaatggatattaagttccttatcaaaggtggatgaaatgtgctgtaattcaaaaatagcagcagacataaggcaacatgatgggacagcattgctctgtaggaagagaaatttgcaagacaggattttaaatggtctaaacttaataatgtatgaaatggcatttttgttgtaattttaagctttgtaagtagaatctataaaaatatcagaggaaaaaatgtaaagaaggctaaaggagaaacatgcattataaaatactgaaagaaatagacctttctatagactcacagaaattagaaatagaaaaagtcatcagttcaccttgctcatgtccctgtcagtagctcattctcaagggtttgtcccgtctaattttagatgacccaagagtcttgacttcaggaattttatttgtaaaagtattctgctgtctaacaaaccttcagaaatggtcaccccttgcagctcttcagcctaaattttcaacttcccagtaggttccaatgcttgccttggcctttcttagctgtaactgcagatacagtattagagggaggattttcacctccttgtcaggtgtacttttaaaatgcctaagcaaggtgagaccatcagagccaaaatggacatgctctctctctcttttttttttttttttttgagacagggtctcactctgtcagctaggctggagtgcagtgacacaatctcggctcactacaacctccatcttccgagttcaagcaattctcctgtctcagcctcctgagtagctgggattacaggtgcccaccatcatgtccagctaacttttgtatttttagtagtgacagggtttcgccatgttggccaggccggtctcaaactcctcacctcaggtgttctgcaagatgtgcattctctaaagatcactgggactgctgcataagaattcaagtcctgaggggtggagacaagatggccgaataggaacagctccagtctatagctcccagcatgagcaacgcagaagatgggtgatttctgcatttccaactgaggtactgggttcatctcactggggagtgtcagacagtaggtgcaggacagtgggtgcagtgcaccgagcatgagccaaagcagggcaaggcattgcctcacccaggaagcgcaagcggtcagggaattccctttcctagtcaaataaaggggtgacagacggcacctggaaaattggatcactcccaccttaatactgcgcttttccaatggtcttagcaaacggcacaccacgagattatatcccgcacctggcttggagggtcctatgcccacggagccatgctcattgctagcacagcagtctgagatcaaactgcaaggtggcagcgaggctgggggaggggcgccaaccattgccaaggcttgagtaggtaaaaaagcagccaggaagctcgactgggtggagcccacagcacctcaaggaggcctgcctgcctctgtagactccacctctgggggcagggcatagccaaacaaaaggcaggagaaacctatgcagacttaaatgtccctgtctgacagctttgaagagactagtggttctcccagcacacaactggagatctgacaatggacagactgcctcctcaagtgggtccctgacccctgagtagcctaactgggaggcaccccccagtaggggcagactgacacctcacacggcctggtactcctctgagacaaaaattccagaggaaggatcaggcagtaacatttgctgttcaccaatatccactgttctgcagcctctgctgctgatacccaggcaaacagggtctggagtggacctccaggaaactccaatagacctgcagctgagggtcctgactgttagaaggaaaactaacaaacagaaaggacatccacaccaaaaccccatctgtttgtcaccatcatcaaagacccaaggtagataaaaccacaaagatggggaaaaaacagagcagaaaaactggaaactctaaaaatgagagcacctctcctcctccaaaggaacgcagctcctcacctgcaacggaacaaagctggacggagaatgactttgacgagttgagagaagaaggcttcagacgatcaaactactccgagctaaaggaggaagttcgaacccatggcaaagaagttaaaaaccttaaaaataaattagacgaatggctaactagaataaccaatgcagagaagtccttaaaggacctgatggagctgaaaaccacggcacgagaactacgtgatgaatgcacaagcctcagtagccgattcgatcaacaggaagaaagcgtatctgtgatggaagattaaatgaatgaaatgaagtgagaagagaagtttagagaaaaaagaataaaaagaaataaacaaagcctccaagaaatataggactatgtgaaaagaccaaatctacctcttattggtgtacccgaaagtgacggggataacgcaaccaagttggaaaacactctgcaggatattatccaggagaactgccccaatctagcaaggcaggccaacattcaaattcaggaaatacagagaacgccacaaagatactcttcgagaagagcaactccaagacacataattgtcagattcaccaaagttgaaatgaaggaaaaaatgttaagggcagccagagagaaaggtcgggtcacccacaaagggaagcccatcaggctaacagctgctctctcagcagaaactctacaagccagaagagacaggaggccaatattcaacattcttaaagaaaagaattttcaacccagaatttcatatccagccaaactaagcttcgtaagtgaaggagaaatagaatactttacagacaagcaaatgctgagagattttctcatgaccaggcctgccctaaaagagctcctgaaggaagcactgaacatggaaacaaccggtaccaaccactgcaaaaacacgccaaattgtaaagaccatcaaggctaggaagaaactgcatcaactaacgagcaaaataaccagctaacatcctaatgacaggatcaaattcacacataacaatattaaccttaaatggaaatgggctaaatgctccaattaaaagacacagactggcaaattggataaagagtcaagactcatcagtttgctgtattcaggaaacccatctcacgtgcagagacacacataggctcaaaataaagggatggaggaagatctaccaagcaaatggaaaaccaaaaaaggcaggggttgcaatcttagtctcagataaaacagactataaaccaacaaagatcaaaagagacaaagaaggccattacataatggtaaaggatcaattcaacaagaaaagctaactatcctaaatatatatgcacccaatacaggagcacccagattcataaagcaagtccttagagagctacaaagagacttagacacccacacaataataacgggagactttaacaccccactgtcaacatcagacagatcaactagacagaaagttaacaaggatatccaggaactgaactcagctctgcaccaagcggacctaatagacatctgcagaactctccaccccaaatcaatagaatatacattcttttcagcaccacaccacacctattccaaaattgaccacatagttggaagtaaagcactcctgagcaaatgcaaaagaacagaaattataacaaactgtctctcagaccacagtgcaatcaaactagaactcaggattaagaaactcactcaaaaccgctcaactacatggaaactggacaatctgctcctgaatgactactgggtacataacgaaatgaagacagaaataaagatgttctttgaaaccaatgagaacaaagacacaacataccagaatctctgggacacattcaaagcagtgtgcagagggaaatttatagcactaaatgcccacaagagaaagaagacaagatctaaaattgacaccctaacatcacaattaaaagaactagagaagcaagagcaaacacattcaaaagctagcagaaggcaagaaataactaagatcagagaagaactgaaggaaatagagacacaaaaaacccttcaaaaaatcaatgaatccaggagctggttttttgaaaagatcaacaaaattgatagaccactagcaagactagtaaagaagaaaagagagaagaatcaaatagacgtaataaaaaatgataaaggggatatcaccaccgatcccacagaaatactaactaccatcagagaataccataaacacctctacacaaataaactagaaaatctagaagaaatggataaattcctcaacacatacaccctcccaagactaaaccaggaagaagttgaatctctgaatagcccaataacaggctctgaaattgaggcaataattaatagcttatcaatgaaaaaaagtacaggaccagatggattcacagccgaattctaccagaggtacaaggaggaactggtaccattccttctgaaactattccaatcaatagaaaaagagggaatcctccctaactcattttatgaggccagcatcatcctgataccaaagcctggcagagacacaacaaaaaaagagaattttggaccaatattcctgatgaacatcaatgcaaaaatcctcaataaaatactggcaaactgaatccagcagcacatcaaaaagcttatccaccacaatcaagtgggcttcatccctgggatgcaagggtggttcaacatacacaaatcaataaacgtaatccagcatataaacagaaccaacgacaaaaaccacatgactatctcaatagatgcagaaaaggccttcaacaaaattcaacaacccttcatgctaaaaactctcaataaattaggtattgataggacgtatctcaaaataataagagctatctatgacaaacccaaagccaatatcatactgaatgggcaaaaactggaagcattccctttgaaaactggcacaagacagggatgccctctctcaccactcctattcaacatagtgttggaagttctggccagggcaatcaggcaggagaaggaaataaagggtattcaagtaggaaaagaggaagtcaaattgtccctgtttccagatgacatgattgcctatctagaaaaccccatcctctcagccccaaatctccttaagctgataggcaacttcagcaaagtctcaggatacaaaatcaatgtgcaaaaatcacaagcattcctatacaccaataacagacagagagccaagtcatgactgaactcccattcacaattgcttcaaagagaataaaatacctaggaatccaacttacaaggtatgtgaaggacttcttcaaggagaactacaaaccactgctcaatgaaataaaagaggatacaaacaaatggaagaacattccatgctcatgggtaggaagaatcaatatcgtgaaaatggccacactgctcaaggtaatttatagattcaatgccatccccatcaagctaccaatgactttcttcacagaattggaaaaaactacttttaagttcatatggaaccaaaaaagagcccgcattgccaagtcaatcctaaggcaaaagaacaaagctggaggcatcacactacctgacttcaaactatactacaaggctacagtaaccaaaacagcatggtactggtaccaaaacagagatgtagaccaatggaacagaacagagccctcagaaataatgccgcatatctacaaccatctgatctttgacaaacctgacaaaaacaagaaatggggaaaggattccctatttaataaatggtgctgggaaaactggctagccatatgtagaaagctgaaactggatcccttccttacaccttatacaaaaattaattcaagatggattaaagacgtaaatgttagacctaaaaccataaaaaccgtagaagaaaacctaggcaataccattcaggacataggcatgggcaagcacttcatgtctaaaacatcaaaagcaatggcaacaaaagccaaaattgacaaatgggatctaattaaactaaagagcttctgcacagcagaagaaactaccatcagagtgaacaggcaacctacagaatgggagacaatttttgcaatctactcatctgacaaagggctaatgtccagaatctacaatgaactcaaacaaatgtacaagaaaaaaacaaccccatcaacaagtgggcaaaggatatgaacagacacttctcaaaagaagacatttatgcagccaaaagacacatgaaaaaatgctcattatcactggccatcagagaaatgcaaatcaaaagcacaatgagataccatctcacaccagttagaatggcaatcattaaaaagtcaggaaacaacaggtgctggagaggatgtggagaaataggaatagttttacactgttactgggactgtaaactagttccaccattgtggaagtcagtgtggtgattcctcagggatctagaactagaaataccatttgactcagccatcccattgctgggtatatacccaaaggattataaaacatgctgctataaagacacatgcacacgtatgtttattgcggcactattcacaatagcaaagacttggaaccaacccaaatgtccaacaaggatagactggattaagaaaatgtggcacatatacaccatggaatactatgcagccataaaaaatgatgagttcatgtccttcgtagggacatggatgaagctagaaaccatcattctcagcaaactatcgcaagggcagaaaaccaaacaccacatcttctcactcataggtgggaattgaacaatgagaatacatggacacaggaaggggaacatcacacaccggggcctgttgtggggtgggggaaggggggagggatagcattaggagatatacctaatgctaaatgaagagttaatgggtgcagcacaccaacatggcatatgtatacatatgtaacaaaactgcacgttgtgcacatataccttaaaacttaaagtataataaaaaaaaataaatagataaataaataaaaagaatttgagtcctgatttcattgtttccaatattacaaactatcccaaaggcttaaaaatgtatatgttgggccaggcgcagttgctcatgcctgtactcccagcactttgggaggccgaggtgggcagatcacaaggtcatgagttcgagaccagcctggccaatatggagaaaccccgtctctactaaaaatacaaaaattagctgggcatggtggcacaggcctgtagtcccagctactctggaggctggggcaggagaatcacttgaacccaggaggcagaggttgcagtgagcaaagattgtgccactgcactccagcctgggcgacatagcaagactccgtctcaaaaataaataaataaataaaatatctacattggccaggcacagtggctcacgcctgtaatcccagcactttgggaggctgagaggggtggatcacgaggtcaagagattgagaccatccaggccaacgtggtgaaaccccatctctactaaaaatacaaaaattagctgggcgtggtggcgcacgcctgtagtcccagctactctggaggctggggcaggagaatcacttgaacccaggaggcagagattgcagtgagccgagatcacaccactgcactccagcctggcgacagagtgagactctgtctcaaaaaaaaaaaaaaaaaaaaaaaaagaagtctacgatacatttagcttcccactgtctggaaagttcattgaaagacataataaatgctaccagttattaagtggctattacatgccaggcattacaccaagtgctttatatacattgactctgacctgcacagcagttacttcattctacagataaggaaactgagcatttcctgggggcttcaagccggttgaatgtgtgttggagccactatttaggtcatctgtctaaaaaagccttgctttttctgctgctctgggccattactacagcacctttgtcagggtttgttggtacctggtccagggctctcgaagtccaaacaggaggtcctctcctagcccaggaggaatgtgagggagcagagcactgcactcccaggagacaggctgcctctaccagtcctggagagaagttggtgaacattgcagttacccgtgtgcaggctgattctgaggaagggattggcacatgtatttaacttgaaggaataaggaacttaggctcagaggccagggaaacaccagagtacagagtgggatagagaggtccctgcttctctaactgcgagcaagacaaaggaacagcagcctgatgcacaatgaccacatttagattgccgaccatcccatggtggtttcaaagatgctggacccattcaaagctttgaatcaggatcagaacagacttacaggatcacgtgtcataaggatgctgacccagaacttctccctgacacaggatgtaagagaatgttaggactcattcctacaggcaactcactaatcccaaatgccccatctactgggggggaaatgccacaagacaccagagtcttcatcactcaacgtgacaagagaggagttggtctccttaggaaggtgagtcattaatacttccagctcttcagccttcagaattaatcctgcatttcagcttcttgagtctttatggatataaaacatgctgactagtctcatcctcggtttgcttagttttctctctcatttggagggaaatgttaagaatcattaaacgaggctgtctgttgctactgatttgcagctgtgtgtctactgagataacaccaagtggaaatctggacacttcaggcccctgatgtctgtttcctagacagactatggtgattagattggagttcttgaaacaacacaccagcgcagcttttgaaactttgaggcagattttgaattagaactcatattgactaagcatccaaccttacaagtgaagcattggaactaagagagttggaaggtaactaaaaaaatagaaattgcttatttggggaaatggctttatttccctcatcttcaggggacagtaaatctgtttctaagaagggggatgaggcaggcatgggttgtaatcccagctctgtggcttacaatatgtacgacttttgttaaggaacttaactgccctgagactgtttcctcagctacagtaataccagcttacaccatgcttgtgaagattaaatgaagtaccttgcttagcccggtgtgtagtgcataataaatgttgaaaacccttctttgattaactaaacaaaagaacacagcagcttattttatgtacacatgatataggatatttttatttgaaaggtactacatgatcctgggaccttcattagaaattttaaaatatttcacttccagagtaaaattcagaggcaaaagaaatgaaatatagcatgagatgtagaactgcttttggaaaatttcaactaatttttgtcaactaatattcttaaaaaattaggtcaggtgcagtggctcacacctataatcctagcactttgggaggctgaggagggaggatcacttgaggccaagagttcaagaccagcttaggcaacatagcaagactccatctctacaaaaaataaaataaaaattaaccaggcatgatggtgcacctatagtcccagatattcaggaggctgagacaagaggatcacttgagcctaggagttcaaggctgcaataagctatgattgcaccactgcactccagcctgggcaacagaatgagacgctgtccctaaaaaaataaaaattaaaaagttaaaaattagttgattcctctgagctcccatttctcgctctataattagaaaatgtttgtcaggggaacatcacactccagggactgttgtggggtcgggggaggagggagggatagcattaggagatatacctaatgctaaatgatgagttaatgggtgcagcacaccagcatggcacatgtatacatatgtaactaacctgcacattgtgcacatgtaccctaaaacttaaaatataataataaaaaaaaaagaaaatgtttgtcatgctttcatctcctcctctctgaaaatgtctaccaagcttctcatcattggaagttatccaagtctgaaattatcaaggcaccgtgtgaaaagccagtgaagtgcagtttaacaatgcagttgaacaatggtcacacctggatttgagcccctcctgtacgctttccagctccgtgaggggtagttaaactatctaagcatccatttcctcatctacaatatgaggaggatatcacagtatatatcttacaatattatcttgaggattaaatgagataaagtagcatagtatctagtaagaaatcatgttagctatcattattattcataagtaattcacaacacatgtgactgcttcataacacacgacttaagaagtgggtgtgaatctaataatacactattctcaaaatttcataagcaaaaaaagtacacaagtaaacatgaaaaaccacatagaaggcatattctttttttagcatttatctttcagtaaatatgacagcaacattttccctcttacatataaatcacaaataaatgattgacactttttacaccaaaaataggcagttgtttcccatctattcagatagctttcactgatttaaagttttcagccaggtgcggcagctcacgcctgtaatcccagcactccgggaggctgaggtgggcaggtcacttgaggtcaggagttcgagaccaggttgaccaacttgatgaaacaccatctctactaaaaatacaaaaattagctgggtatggtggcttgtgcctgtaatcccagctactcaggaggctgaggcaggagaatcacttgaacccgggaagcagaggttgcagtgagctgagattgccactgcactccagcctgggtgacagtgtgaaacaccatctcaaaaaaaaagaaaattaagttttcatttcatatatacattcttagaataatacatagagcaactacaaataacagcatacattacaaagaaacttaaaactatcctgatcaatcagtttaatcaaaccaagttttcagaaatgtctatcaaatttaacctggggcaacagaaagcaccgtccacacctagaattgccaaccaacatattctggttggccagtgttgtaggaagtcttatctagaaaacaaaacccatgaatttccagacccaaagtggaaagagattaactcttgccctgaagataaatcacttcccagtgttttcacttccagacttctaatattttccctgcctttgactgtaaccagatctgttacatgtctagaataaggataattaattacactatgattccgaattaaaatgagaacccacaggctaggatctcttcattgtaatcccaatggcatcatccacgttacatgactggtgatgactttgctgacatctaacatatctttgaagaacatctttaaagcatgagaagaggctcgatataaattaggttgccggtaagtaatgcaagagtagaaacacgtacttctgtggctgcaaatgaagttgttaagccagcagctgttgccaggctgattacagcattaatcagtgttaagagtctgacatgttctggccgggcgcggtggctcacgcctgtaatcccagcactttgggaggccgaggcgggcggatcacgaagtcaggagatcgagactcatcctggctaacatggtgaaaccctgtctctactaaaaatactaaaacaaaattagccgggcgtggtggcgcgcgcctgtagtcccagctactcgggaggctgaggcgggagaatggcgtgaacctgggaggcggagcttgcagtgagccgagattgcgccactgcactccagcctgggtgacagagtgagactccgtctcaaaaaaaaaaaaaaagagtctgacaggtttattctttctttttctccctaggatatataaatagcacacaggtgggaaccttttaatgcagcaactacagaatgtttaagaaagtagcacctgccttctctctgctcacacactcacgtgagaaagaacaacactctcacctattgataacggtgctacagaaatagacattatttttgagaactcatggacacaaagtagggaacaacaaacactggggccccacttgaggatagagtgcgagaggagggagaggaacagaaaaaataactattgggtactgagcttagtacctgggtgacaaaataatctgtgcacaaatccatgacacaagtttacctatataacaaaccagcacatgaacctaaatacccctgaaactaaaataaaaataaaagttaaaaagacctactatttgatagcaaacgaggtgacgattgtcgtaataacttaattgtacattttataatatctaaaagtgtaaactggattgtttataacacaaaatataaatgtgaggggatggctattccattctccatgatgtgattatcacacattgcatgcctatatcaaaacatatgtaccccataaatatatatacctagcatgtacccacaaaaactaaaaattaaaaaaaaaataatttttcttaaagaaagaaatagacattgtttgttcttccagttatcaagtgcactgctgtttcctaacactgttggtttttctccatctcagtatccttgttacattagggaacagctaaatcaggacccttcacagcttccagatcatcataagagcatctgctggtgcagtagagtcttggggtgaaggatttgtatctacagaaaccctgagtcacagtatccaccctctgcttcaaatcatctattattagaggactcattgacctgggaaaaagttcatagttgaacagctctagataaaataatgttattatttgtgttgagtcaaaactggccttcaggaaacccactcttttgtacaagttctgtacttgacggcagtggaagtttcaatataaaatatagaaatatccccaaagatggcctttaatgaggaatcccttgatagggttagctgttacttcaaactctcagcaggagggtaggcactgaacatgaaggagggctgaaaataggtggcagggccccagacaccagactggggttctggaacaattttttcgttcctaggtaacccaacacagattacagaactagaagaaataagaaattgttgttttaagacagttcatttttaagttaactctggagtggttttttttaatccaacaacatagataagtgaaacatgcacatatatttagtttcaaataaaacttcatagactaaccaaagcctattcccagatttcttagacaatcttcagaccaagtttggaatccctggaatggaatgctcccaggccccagtcttacaaatttagggctacatctcccaatatttgtcccaagtgatgctcccctttatgcctctctcttattattccctctgctcggaatgccatctcccaccccctttcttcttacccaaaacctacccatccttgaggcccgtgccatgctccccttcctctaacagacctttcctctcctgtctcctagtgctgcagtcaccaccagcaatagccatgcgtggaatgggcttcagaaaggcctttgctaccagggtctcaccccgcttcggctcccaatagcattctttcacagttgtttcatgacacctggagcctccctgttatcatgatatgtacactaccagggccttcctaaaagtgctctgaggaactgtgtttccctcatctctgtgtgccctgtagtgcctcagactgtcacgggcagcattgccaggactttttccaatcctccttctaactccatggtataggcctggcttagattaatgatgccatcagaattggtatcacaaccagatctttgtgttcgtcttattctcgcacctggaaagcagcatgagagcagtatctgcacacatgcaggtcctcttcataggaaaacccaagtcttctgaaagctcaggacttgagtcaaatggccctgctcccctcttgattcctgagtttagtattaaatgtttcctaactggatgagcctgagcagactattaacccctttatgttatgttttcttcatttaaacattggagttgttccaatcctgtaatgtagctttgtgttttaaatgccatgtatattcaacacccatctagtgaccaacacataacacattctataaaatgttgggataaaaaatgctctggtgtctgactattgttatgttactgcagatccactctgcctcattatgaccttgttgagtgggacttcttgtatttattattacctttttttgcaaaacggaaaattctaaaataatttactatttaaatttaaatctaagaattcttatatttgagggaaaagctaccgtattgagagctcgtctccctagtttcatatcaaagtctatgcccctctcaagcattaaactagaactgagttcattagtcattctctttgtctttctcctgaggtttttatttttggtcttaatattaaatgagactaaacactaacaatttaacttccctctcttttcacaatagtgatgttcgcgtccttaaaactgaatgccacacggctgacacagtgccattagcagactttacaccttggttctgtttgctttggaaagaccaaatggaaaataaagtctgtgcatcactcaagctgttatgcctcattcttactggaaaaaaagaaggtgatgactgatttatccaaacttggttaagacatctgggtctattttatatccttctcacaatcaagaggcacagttttatggccaaaaaaagggattatgatacattgagcattgtaatgagcaatacaatagcaggagaggacattagaaaatctctatttatagtcaagacactattattagtaagattttttatgccaagattgtaaaaagtgagtgtctatagcctgaagactaggttgtacaactgacactctgatttggttcttaaatatgttattagacacttacagaaataactctttggaaaattggttattttgaagatgaaaatgatacattcaacccatgcaaattctaacaccaccagcccagcagggtgggaccagcagggtgagccaagaatggtaccctatcagcaaaggtcccatgtcctgtgtgctggtttatctcttgcaaggagtagacattgagtacataaaagtggatcaagacagagatctagcatgtttcttccgtgcagaggcaagaaccacctcatatctacaatgataatgaagaggaaaagcacttcatttaatttcttttcatacttgtatatcccaactccttagagagcttttctgctttcaacacgaaaagaaccacataatccaaggaaggttccagtcgaaagggtcttcagaggttacctaatcccagtgctttacagagagtatgttgctatccagacaaatgacttgcctaggccacacagctaatatgtgctcaaacttgaattacttctaatttcataggttgggtgattttaattaaattgttgacaaagtcactttctctaaataattgtttattgatccagaagattaactgaactcctgtgattggggttcttatgggatgttcagtcaagtgggcctgatgccggtcagctgaaacaccctgtgcagaccatgttccagacttagcaattagccccatcacccaggcagatgacctcttattttataaccagagttttcctctgtcttccagttcctgctcacaaagagcaacaaataagactacacctgggaaaatagcatgacccctttattatgggtgagtaggatcatctttcagcagggaggataatgtgttataaactgagtcactgttttgggctgaattgggttccttaaaatatattgaagtccttccccccagtacttgtgaatgtgaccttatctgcaaatagatgacttaacttaagatgatcaagttaagatgaggtgattagggtaggccctaatccaatcactggtgtccttacaaaaaaagggaaatttggatatagacaccttcagagagagtgcaagattgatgatacttcctcaagccaagaaatgctaaaaaaaaggccagcaaaccaccaggagctgaggaagaggcctggacagatcctccctcactgcccttaggaaccaaccctgctgataccttgatctcagacttccagcctccagaactggcagacaataaatttctgttgtctaactaacccagtttatggtgctttgtttgacagtcctagcaaactaatcctgttgccacatctgaaaaggaagacttgagctgatggatcttaaccagtccttccagctggtctaagtggaaccatccatgctgccatacaggactggggtgcataggggctctgagcccactcctgactctgagaaacctgactgtggtcatgggaaggaggggccacatctctcagacaagaaacctattcattaagcacctatgatatgttaggcaccaggacacagccatgagcaggaagacacagtccctgccaaggaggacccagagtttcccaggaagatcagctctataaaagtgactgcaagtgtgatgtgtgctgtggaacagaggctgtcctggggaaatcagtctatgggccaagggagactttcataagccaatgaggtttacacagagatggggaatggaggcaaggatttagcacccaacagagtaaggagggggagggcacagtgtgtgtgctgcaggcaggaccagtgcagagctcacagggcctcccctttctctaagggaaggggctgtctagacaggcagaagggggagaatgtagggctggcaacagaaggagcaagagtgtcctgtgggatgtgatgacggccagtcacagctgacatgagccctcctgcctgcctaggccaccagtgctgaggaggcagtgattacagctgcggcagcagtgcatgtttcaaaagaaacctacacttccagactcacggcatgagtcacttccaaacttcaaagatatatttaagacttctcttgggcctgatggctgtctttctgttttctacttaaaaatggagtctagcaggctgaaaagataaattatgaacaagtattgtattatttaatgtgaaacacaaagccagttttcctttccgacactttttggttgttaggtttctgtgagaatgtgttccgtgtgtttgtttgaaaacaaagaatagtttgattaaaaaaaaaaaaaaagtttacctaggtctggtgcggtggctcacacctgtaattctagcactttgggaggccaaggtgggcagatcaccagaggtcaggagttcgagacagcctggccaagatggtgaaaccccatctctactaaaaatataaaaattagctgggcatggtggcgcattcctgtaatcccagctactcaggaggctgaggctggtgaatcactacaacccagaaggtggaggttgcagtgagccgagatcacaccactgcactccagcctgggagacagaacgagactctgtctcaaaaaaaaaaaaaagtacataaaagcaaagattcacagaatactgaacacccattcagttggtttctgaagaatggagacagcatccagccaggatgaatattgtgatgctgtctttccttctccctccctcatgacattccaggagcacaggcttccttctgggcagttgggttttccacatcttaggggaggctgcaacatcgggctgcagcagctgccacacagggtacaagcgtggggacgttcaaaggaacacgcagagtggacaggtccagattcaaggggacagggctcgtgatgtagcttcccgtgtccccacccaacacccatgacaaggaaggtggaagaggagcacgcagactccagtgtggggtatgtgctctctccatactcccactcgtcctccaggtctcaggtggagactgagagggaacctttcctacaccagcctgtctgtgtccacctccctgtcttactgctcctatgactgggcttctttctgacatcatgcggtacgtcgtctgtgatgatgtagtaatagtttaccaactctctgtcctactggactgtaatctccacaaggtggggatagtgtcccttttgttcactgccatattccccagtccttaatacagtgcctgacaaccactgggccctcagtgaatctgtggtgacagcttcctatattcattacttggtgtaaaaacttctgggaaaaagttccaaaagaagatgcctatgaagcacatggtgggcagagacagtgaatgttttttcatttgggtggcagactcacattaaccaacctcaaagagaataatgtataatatcagaatgccactttgttcatcttacaatgggaatcacagctgaatactcaagccaatatggcccattcattctttccccgtacatagatctacaaggcaaggcaaattacaatcacaagattatatagtgaatgaggaaccaaaatcaaatgcaaaatggcatcatgctaatatagccatgtgtacttttatctacaattgagaaagcctttcccttgggaccccaagaatccaaaccaattcactgagaaggcctctcggtcagagtgggcagacaggtggcctggtctttgtgtgctgtgtgccttcctaggccctccatgactgctccccacttctgactgacacataatcttcctataattacttaatcatccaaccaggacttgctctcctgggaacgtaactttgggcatttttcttctgctcttttttgcattattaataagaacagctaatatttattgagtatttagtatgtgccaggcatggagcaaagctctttacatgcatttttaaaaatcctcacagcaaccccagaacatagggatttttattactctcattttaatgatgaggaaactgaggcttagcaatgttaaataacttattgttggttggtcatacaaaaaaacaagtggtggaaccatttataatgccagtgatttccaaattcatgagggaactggaggcttctccagattttgtcccctgtggtgactatgtggaggaaactggagagataagatcctcagattgttctcattcatcaccagagcacttcattttcaccttacaatgtgcctggcacatactagggaacttgaaagcatgtgtctcacaccattcttgttcacacccaacttccttaagataaaagagcacaagcgtcttaatgtccttgcccagagtaagttggtgtcagctgaagaagtacttatgtcagcattctgtctcccaagtcccacacttatcacactaaaggtacagaaacatcctactccatttttcaaggaggaagataaaatatcttcaacaacatatctccaaatatctcaagaacaaaataactcaagaacaaaataactcaggaacactaccaccagttctggccaattgatccaattcaattcaacaaacattattttgggcagtgtagcagggattgctagctgtctctcaaaatgtattcttcccttctttttaataaaaagattctgacttttttccctaatccatgcatatttcccaatctctgtcgcagccacctgtcaccatgtcactgttccaatcactgagctggaaacagtagtgttatgtggtaccttcagcaagactcatgaataaagaggggtcccctttttctccccttttcctccttcttgttctagaatggttgaatagctggagctctagcagccttcatggaccataaggtgaccatgggaatggtagccaatcacagcagaatggaaaaatagagtctggttttagcactgtaggtccaccataccagccctggactatatatttcacattttttaatgagaaagaaatatatgtgtctgcttttcatgctgcttttgtttgaagccaaaattatctgagagaagcttctactgtgtgccaagcattaggctacagacaaatccccctctacctcccctaaccacaacacacacataaacaagaaaataaatcatttggatgtataggcaaagcctgatctaatgaagtaatcacagatcacaccaatcacaagcatttcttccataaattttacagaaatgcttcagaggacccaagaattttgttacatggtctcaaatctatgcatttacaagaggttttctaccacacaaaagaagggtgattttttttttccctgaacctacaaagtgaggtccagcttcccattgcttattgcttttaaagtccattacactgaaaaaataatgacctcaaaaccagtagtagtatttttttcttctccatcccacctgctaaaaaataaagttctagaagcctgcttacctatatttttactttacttttcctcaggaagtctcataataataagtgaaattcctgtgactttgataagctttgaattatgctttaaaaataaagccttttgtagtttcctgaaaggtattaggctctgagactgtaaaaaagatgcctagatactgatgtccaggttaaactggcccatttaccagaatataatgaaagcccttagctgatggtaacagtgcacattccgcgactgagagactgacaaacatgtcaaataggcatttgggtgaaaagagacaaaatagttgcctatattgaagagtttttcttttaaaagttttctttggacaagcaaaagtcaaattgccctttgaactaccgtgacttgagtattgaaatcagctataggaacatcagggaacacccagggttcagggtgagcccagaactgcagccaggacttgcaagtgaattgattggctctattttccagacctcacaccgggctccctgccaccagggaggttcagagttcgtggctcacctcactgcctgcctcagctggctccacacagcgcaccttgggcctcggtaccatccgacattttagtgatgtctaacttagcacactttaaagtagttttgtctctgggttactagttgttggtttgagccctttgtgaataatctgtaagcattaaatatcttttacctttctttcactttcaaatgactggggtggaggctcagggtctggtggtagcagtggcgctgagctcagctgggagccaccatctatagctctccttggccagcctcaggttacaaaaccacagctaatgccagagaaaaagaactaacccactaagacaaccctcagagaagcagctggaaggagagagccaccaggtagagattctaaaatctgatggctttgacctgcctggcccattcctctagccactccttcctgggggagaaggaaatgggaggggcggggctttaccctgtgaggtccttcactcttctcagatgacacagccccaaaaacgtgagctgccctttgagtgatttggaaggagtcaacacagaaggcttatcattaaactttaactttcaccaacctctagaatagcttggggtcagctcactgccttctgaagcaggcttttgagtcttcccgtctccctctcttatcaggacgacactgattaagtttggggtggagagaagttgaagattattcttaagaaaaaggaagatgttaagggttgaactgtgccccacttccctgagctccactccagattcatatgttgaagtccaaccctcagctcctcagaatgtgaccatatttgaaaaatagagtctttgcagatgtgattggctaagacggagtcatcctggagtggggttgggccccgaatccagctgggctgtgtccttataaaagaggaaatttggacacagacacagggagaacaccagtgtgaagatgaaggcagagacaggagtgatgctcccccaagcaaggaatgtcaaagatggccagcacacccgcagagctggggagaagactggacagtgtctcccccagagcctcaggaggagccaaccctgctgacaccttcatctcagccatccagcctccagactgtgagacagtcattgtctgtttttcaagccgcacagtctgtggtgctttgttccagcatccctaaaagtctaatgtaggaagtaagtctgatgagagaccaggccagtcagaacccagatccccccaatccccgctctccacccccagagagtaacagtgagggccttgtttctcacataccctaaccacatgtgggctattgatgaactttgtggattttctctcatcatgcccctctatggcagggtgaggcaatcctggtgtctgggtggatctgtaagagcaaatggaccagtataaagggctttgggccagctaaggtttttggtttttgcaacctccacctcctgggttcaagcgattctcctgccttcgcctcctgagtacatgggattacaggcgcatgacaccacaccaggctaatttttgtatttttagtagaggcggagtttcgccctgttggccaggctggtctcgaactcctgacctcagttgatctgcccaccttggcctcccaaagtgctgggattacaggcatgagccaccacacccagccccagctaaggttttgctacttgctgttcacctccatggctggcccatctgtcttcctggaccttgcacactgagcagatcacaggtagcatacttctctccaggacattcctaagagcacatgccccacagaaactctctgtctctgctgcctgtaaatcccaggcaactgacacactcctgtctgttcacaccttctctctgagaagctgtggttctcagcttctgtgccaggcatggtggctcgcgcctataatcccaacactttgggaggcagaggcagaagaatcacttgagcccagcagtttgagaccagcctaggctacatagtaagatctcatctctacaaaaaataaaaaataaaaaataaattagttgggcacagtggggtgcacctgtaattcctgcagatgtgtgcccacaggttactgaaatcaacaaccttgccaactctgctggcttctcactgagctctttcaatcctcaaagagactggactaggaaattcacatctcccaccacaaggaatcaatcaggtgtgctgggtctctaagtccaataaaattggcttgctcaaagtgtattggtaactagggagaaacagaattctaaggttcggagtggaaacagctgcaattcttctctaaccccaaagcacagcctctctgcttattcagtgtgtgtcacagagtccaccgcttctatgagcctgtttttgtcatctgtgaaacgggactgaaacaatcaccaagacatcatgaaggtgccatgagacagtgtcaacagcgaacacttactgaacaccttttattgtcacaacaaccctctgagctcagtacttccattctgtgttttatccagaggaaacttcattttacagagcttggtcactcgcccacacttgcactgtgaagtgctggatctaggtttccagcccaagccctggctccagagtcctcaccccacccctctgcagcaaatgagctcagtacctgcacccggtaggcacccataattggtgacattctttttagtggcatcctcagaccctgcaatgaccaaagagggaaagcctcctagtaaaaaagcttacattaagaaagccctccagagactgaagaccaccactgtaatggcatctgtccactgtgctgaccagtcccgacaattccgggatcatgaataccaggacagagatggaggctgccaagtgccacccagaggagatctgagttgggcaacaactccgcagcggtctctcacaccagcataacttgaaatagctcctgggatgagtttactcacatttctaatgaaatagccaacatttctgctgacacggattagtcctttgttgctatttccatttgctagacaaatgtattgagatttagggccaaggtgtgaagattttggttgtcaaaaacaaatagtaggccgggcgtggtggctcatgtctataatcccaacactttgggaggcagaggcaggagagtcacttgagcccagcagtttgagaccaccctaagctacatagtaagatctcatctctacaaaaaataaaaaataaattagtcaggcacagtggggtacaactgtaatcccagctactcaggaggctgagggaggaggatcacttgagccgaggaattcaaggctgtagtgagctatgatctcgccactgcattccagcctgggaggaacaagaccccatcgcaaacaaacaaacaaacaaaaaaaccacacacacacacacacaaatagtaataatagctgacacttgtaagccattcaaaatgtgctggactcttaaatatcaagcacctctgcaagggagatattttatctacatcacatatgtggacatgggtacccggggaggtaactgagccgagaagatgagatggtccctgactcgctgccctccactcactgccagtctttccttctgagagaggctctgaggagcccataacagagtgagcgtgtccctgaggaatttcctgtgtggtcaagggaacaagaggccctcctccctctcagcctgttcccaatctcagatctccttaggaagccaccagcagccagagtggagcctgagaccaggaagccagccctgagggctgactcttctgctctgaggtgtggggggaaacaaattatgttttcctctctctctctctctgaagagctgatttaggcttgaggaacagatgataggatgtaaagttaagagtaagagtctacagtcattactgggacatctttgactgctgtaggactgggcctaccaggggcctcagtaaagggtgactccatatggcctgcctggttgaccagcaactgcattatccattcaggctaaagcctgtagaaatagaaggcattcacctgtctccgtggtctttgcacagaactccctggggaatttcaaagacctttggaaaactgctttgctcttctatgtgaaagaagatgccatctatctgtctagcacctgctagaaaaatgatttttgatcaattaatgttgaaatctaatgtgaaaattatcaacttatactaatacttcacctatcctaatattacttaaaagatttttttttttttgagacggagtttccctcttgtcacccaggctagagtgccatggcaccatctcggttcactgcaacctctgcctcccgggttcaatcgattcttctgcttcggcctcctgagtagctgggattacaggtgcctgccaccacaccctgctaatttttgtatttttagtagcaacagggtttcatcctgttggccaggctgaccttaggtgatccacccacctcagctccccaaagtgctgggattacaggcgtgagccaccacacccagcctacttaaaatatttcttttaacttattctacagactggtttatataccaaatgttattacagcctcaggcatgcgttctctgaaatgttaaatagcttcagatgtgaatcatgcaatttaataaaagcaataattgatcagtctttccttttttaatgaaaaatgttgctcccatattcatattcactagttttacatgtgagcatagctatgacatgaaattttaaattcggagtttttatcatttgagtaatagcaaagctgctgagtttttaaaggttgattcactttaaattacttaattttaactgtcaggatctcatatttctctagacaagtttgaggaccatccattcatttgacagtcaatttcatataccttctgtagctaaggtactttgttgtgataagtggcatttatgttaatgtccctgaaatactacaaaaatttgaaataccttctcaaggaaaagcaaaattattttcatttctgttttactatatttccattgattattgttattgtatgcaggatatcacagtattaattcatatattatcaggatatataattaattgaaatacaatattcaccaatcatgtatagaaagcagtctatccatagaatgttccagcaataatgcttgttattgatctttttctgttagataatgattcaaattcttctttaagtgagtcaacctagtgtaaaagaatccaacggcaaaagtttgcacatttctgccagttaatcatctgaaaagccacatctcacttttttacaagctgaccatctgtgatgttcactttctctatgacttggccagttaagtcatgcctgccaaacttctctagtatttccttgtactgaaggaatccttcaaccatggtaatgcccaggtcttgattgtgtatacaagtttctaagggtgctgtttttgctctgttatgttgctattaaatggttctaagatactaagtaaaataaatataaacagaaactaaacacctattgctgtggagtcgatgacaagtaatttaaacaaccactttgtttactcggaatctgagtttaaaatttaaaacgtgtaaactctggccaaaaagaagaaggaaaatgatttcatggtatatttttgtggaagtattatgccattaattttgaatttaccaaatgaagtaaagaggtttactagggatttagttaagaagctctaatagtagaagcttttgatggacttgctttttcagtgtatagggtcagactgagagatacccttctgaggaaccaatctcccagggtggctcatccagtggccacccccccagtatatcccccacttccacccatttacactgtgtggtctttccccatcggctgtggtctccctagcatccagatcctgtgtcacaccccctgagcctgcaaagtggcacctgtctccaatgccgaggggagtgagagaacatgccccctgcctgcacccccaacatggaggctccagtccaggccccacctaaagccattggatgctattgacatagagatggccctaaatgtgctgcaggccatgtgggtctcctgcttggatgacaagctctaggcctgtcagacctagagcaaataagatctgtttctacgttgagtgctcacaatgtgctaagcactgtgtgttgtggccttacacagccacagcattattcccaacctacagatatagaaacagaaacttaggtgagagaaggtgcacgggatgaacccgtgcagcaggtgttctgaaccactgcgcaacgcttgcctccctcgcagaaaccttagggacctgtgacctgcttctcacttataaaccggtgacgtcatgttggagagtgtggaagagcagatagagcactaagtgagttaccagggggcttctcacctgcaccatcggcacctacactaagacttagggcctgcctccacatccgcatccatacatgagaaaggaggactcagcgggccccaatgctccttccagctccagctttctagcagcgggcgtgtgaatgtctgcacagcagtcagaacaactcgtaccttaactgaaatgaaaacaaacttccacttgacctgctgagaaaaaagtgatagctgacattcagagtgcgttcacttagaatatctcacccaacttccccatccccaaaactcctgggggatggaggtcccaaccctcacatcaagaggaattccgaggcacttggctgcagtcactcccccaggaggagctgggttcaaacgcagacccaccccagcctccacagcccaagctcctgccatgatgccctgaagcttctcctctcgagctacattctgccggctgcaaatatgtttgtggcttaacagttactaattcaacatgaaaaattacagtctcaacaatatgaaaaattaatatcatccaagttagaaaccacagagtcatattaaacttctccttctcccagttggggactgagtccctaaatatgtccccaccccatctcatcttgtccatactctttttacattctttgctgtggcctttctcagtctctaatagtcatcctttatcatactgtctccatagcctcctaactggtctttgtgcctccagccagtcctgcccgaacgtgacccactctcctccggaaaacctaagacggatcatgctgttgttctgttcatcaccctccaggggtttccccaggccttaaagatcaaatcacaagtcgtatacatggcccacgtgtacaggccgtgaggatatctgtccaaactccctctcaaaactacaataccttacaaatatctgcaaaaatgcctcacaggaaaaatggttcactcaccatccccacagcaaccaagacacagttatttagctcaggccttccactgcttgctttaccatctttggcatattttccataccattaagcaacctttcacatttaaataaaagttaaacatctcctcccttttaaaaagcctaattataaaaacttaaatgttcgttatcattccctataaaacaggcaaggagaaaagaaaacacatatattttacctgtaatttccaaaatgtttgtagaaactcctcagttgcttctagaatatcttaatgaagagagctggagcgtggaagagtcggagtgaagaggctgaagtctggtgagcctgttgctcagatgctgcctacgagtgaaccctcctctaattgtgctggacctaggaactgcaatgtttgccgtgtcacctggattattagtagcgactgcaaacacttcacagaactcccaaaccacacactggcaaagaacagaactagcctggggtcatgagtgttggtatgcctctcattctgtgaagacctgcacacaagttaaatagcaaacaaaataacctactttgttctcgttatcatttgattttttgtggcatataatgaggcatggaaacataggagcttttcacgttattttgaagttcaccagttttaatatttgtctggagaagtatgtgtttgtttagttcaacaccatgaagtggaggtcatgtccccataactagcagattggttcagttcaacaaacatttgctcagtgcctgctctctttagaatatgaacctgaaacaaagaaacaaaacaaaaaatgacttccaagaattcacaagtcagttatcttttgtacagtgacaaccatcagtaagcatgtattctttctactttttattcattatttcaacaaccacacaaacacttatttaggccaagcacagctggtcactgggcactgcgcagtgcaggccgcccagggagacaggggcctgggagggtgatacatgtatcaaatcactcaatgtcctcatggccttaattttggtcaccaggaccccgggtaaaggtctcaaattaaaaaaaacaaaaaaacagttttattgaggcataatggatatatagtaagtcctcacttaatattgttgataatttcttggaaactgcaacttcaagcaaagcaacgtataacaaaaccaattttcccataagttgatggatataaacaagagtcaagttcctacagcatatatttggtcataaaaacatcaccaaacttctaaataaacactacaacactcctaatattagccattgaaataaatgtgaaatatacacttgagaaagattaataaaaacaagtaacatatttatccaatttttgataaatcagcaagtcacagtggtcgtaatggcagtgggttaaatcaaggaataaatgtttgcaaagcgaaaattgtcaggagcacctcctcccacctcgcagtttgaaaaccattacaaatacaacaggctcccaaaacacttctttgtttattgtcgtgcatttgtatgattatcacagatcttacgaattttttttccaatcaacttgtattcattcattcattttccaacctgtaacttttattcattcactcgttttccaacccataactttccttcattcattcattcattcattcattcattttccaacctgcttgtaccagttcagggtcgcaggtggctgagcatatccagcagctcagggcacaaggcaggacccacgcttgcacaggataccatcctatggcagggcacactcacacacccacactcatgcactgggaccatgtagacatgcaagttcacctaatgtgcacagctttgggttgtgagaggaaaccggaggacccagagaaaacccccacagatacggggggaacatgcagattccacacagacagtggccctggctgagaatacattattttttcctcatcaacattataacgaaacaacattattagaggatctgctgtataaggaaccgtaaatatttataatttgatgatgtcatatgcatacacccataaactattgccacaatcaaggtaatagacatacccaacacctcccaaagtctcctgtgtgtctttgctgttttgtttgttttcatggtaagaacacttaacatgagatctaccttcttaataaattttagagtacaaaattccatattgttaactatagccactgtgtcacacagcagatctctagaacatactcatgttgcataattgaaacttgatacactttgaacaacatctccccatttcccctcctctcatcacctggcaatcaccattctgctctcagcttctatgagtttgactactttagaagccctcacataagtggaatcatgcagtattcttccctctgtgtctggtttatttcgcttaatgtaatgttctccaggttcatccatgttattgcaagagcatgatttccttctttttaaaggctgaatagtagtcatgtattttatagatagatagatagatagatagatagatagatagatagatagatagacagatagacagatcacattttctttatccattcgtccatttatggacacttaggttgttttcacttcctggctattgtgaataatgttgctatgaacatgagagtacagatatttcttcaagaccctaatttcaattcctttgggtatatgctgtgtaataggcttgctagttctgtttttaatttttaatttttgtgggtacagaggtgtatatatttataggatacacgagatgttttgtatttttaattctttgaggaatctctgcactgttttccatagctgctgcaccatttcacattcccaccaacaatatacaaggattccagtttccccacatctccaccaacacttgctgtcttctgtttttttaaaacagccatcccagcatgtgtgaaatgacatctcattttggtttcgatctgcatttctttgagggtcagtgatgttgagcatcttacaatgtacctgttgcccatctgtatgtcttctttaagaaatgtctgtttgaatccttttttaaatcaggatatttggttttaggcaatcaaattgtgatctcttggttttaatgtttagagcagaatgcaatctgtttggctttctcctcaatgcagaaaatatcttctttgtgaagcggaacacacaaaaagtaaatttccttcaaatctgatcttagaacgtcaactatagagaacaagaagttctcgaagaacccctgccttttgaaacacctactgtttcttgacaagtcaagcagcagggggcaggatggtgcagtgggaaaatatatggctgaccatctggaaatctgagtctgatcccattccagctggaagtcttttcacctcccttggctacggttaacttatctgcaaagtaaggagctgggtgggttggatgggctttcctgcatctagcattttctttcactcagtatttttgtgtacccttcaggtcaggagcttgagactagcctggccaacatggtgaaaccccatctctactaaaaatatacaaaaattagccgggcatagtggcacgcacctgtaacaccagctactcgggaggctgaggcaggagaattgctacctaggaaatggaggttgcagtgagccaagatcacaccactgccctctagcctgggcaacagagtgagactccatctcaaaaaaaattatatatatatatatgtatgtatatatttgtgtgtgtgtacctgctatgtgccagatactgtgttaggcgcttaaaaaagcaaaactcactaacctgtttaagcctactgaaagaacttgaaataactaccaaaaataaatatgataattctgttctaagagttaacctcagtatgaggtgccaacagctagcgaatgaatgaatatgctagccgggactacagtgaagtttcagtatctctaaagccacttcagtctcaaatatgatcaaaggttacccaagtgtctggatttaacattgggtagcagaaggttgagcagcaagatttatatatatatatatatatttttatatattaatatatatttatatatataaatatatatataatatatataaatatataaatatatataaatatatatattaatatatataaatatatatattaatatatataaatatatatataaatatatatataaatatatataaaaataatatatataaatatatatatatatatataatttttttttttgagacggagtctcgctctgtcgcccaggctggagtccagtggcgcgatctcggctcacttcaagctcagcctcccgggttcacgccattctcctgcctcagcctcccgagtagctgggactacaggtgaccgccaccacgcccggctaacttttttgtatttttagtagagacgaggtttcaccatgttcgccaggatggtctcgatctcctgacctcgtgatccgcccgcctcggcctcccaaagtgctgggattacaggcgtgagccaccgtgcccggacaagattaatatattttaactactccagcttcatttcgaaccttcccagacacagccccaactcaaagccacaaacatagtactatcaaaagtatttatcctttctccctacaacttatgcaactgcaatttttccactttgttttggtggccccgttttgctcccaggtttcccaaccaagtaagctttgagtcacattcaacttctctctcccctttccttcctgaatttaataagccaccaacaaatctgcggagacccactccaacaagaagccctccctccctcggcaaccacagtgcagacctctattgttacagctccctgtctcccggggaattccagccgcaggcgttccttggggcccccgtggaaaactggaaaggaactgttgaagcctttcactgcctgttttcctgaatcccatggccagggagtcggggagaaagggagggaacccacagcaactgctttttaccagttcagtgccgccgagaaccggggctttcccatagggccgggccaggttctaggcagagaagcgtctgcattccgaggcgcagtctgggctggagcctgtcaccacccttcaaatccctttgaagctgggcaaaaatcttgccaacgccaagcttcagagctcctccgcttaacctgggaggggctgtttcctgcctgcatttcacagcctctcacaggagggaggtgcagtcataatcattttacaggattctcactgtagacatcaaaatctaaaaacacgagaaacataagttttacacaaaataccatgtcagatggaccaagacctatttaatgctgaaaaattattctactaactcagagacctattatcataatatatacatacaagcacacatatatacatatgtatacacatatacatatacatataaactatttagagacacttcttccttaaagtcatattaaacattctcagtttcctaaataatttcagaaacttccccaccttcactgtccttctctgaacacagtctaggttgttaatttctcttaaaatatgattcccaggaggaaatgcaggatccctgatggagccttacaggtgagttttttgtccccacattgcagggttttcacatatcgacctgcgataaaatacttacttctttttcacatgcactgctcccaagtcagagtcttctgttctggacgaagggaattgggtttgaaagttttttttgtatttttgttttttaggagagtcagagaacattagaatgaaagagtccgtagaaattgctggtacatattttcaagtcatgggttatatagctcattcatgggccatgaaatcaatttaagtaggtcactgttatgagccaaatgcttgtgtcccccaacttccaaattcacatactgaggtcgtaatcccccgacatgatggcattaagacatggggtctttgggaggtgattgggtcatgagggtagaaccctcatgaatggtgttagtgcccatatgaaagagaccccagagagctcccttgcctcttccaccatgggaggactcagtgagaaagtgctatatttcaaccaggaagcagaccctcactagacactgtatcttctggtgccttgatcttggatttcccaacctctggagctgtgagaaataaatgtttgttgtttaagccaccccagtctatggtatgtttattatagcagcctgaacggactaagacggtcacccccagctttctttaaaaactgaataagatgcagtagaaagtatcagagtacattgcacatatgaaagacaagtattatcaataaaacttatgtttcagatttagatacacaagtatgtgtgtgtatagattataaccataattgagttttggtcaaaaaacttaaatgccactgatccagttcaatcaggaaatggcagtgttctataatggataagcatttgtttgaaatttagagtcagaaaatccctggtttatggtcttggatctcgcctttaagaactgcgtgaccgcagcaatttattttgcttcattgaaactcagatcagttcctcatcaataaaatcaggtatcaacggcactttcctcaaagagttattgaggagaaacacgttattactcacttccttttactgagcacatgcgatgtgccaagaaacatggtgtcttcaaacgcactatacttctgaccttcactacaacaaccctgtgtattgttatccatcaaatgaaggaaccgaggcagtctggtccagatgtatgtacttaaccattccactacaccagctcaaagtacatcatgtctctacaaatacaaagatgcatttgaagtacttaacacaatcagtactaagtacttagtacggacacaggggagccttcaaattttagcaccattctcagggcagatcctctgcaagttgaggaattcaagccagaaggtagattgatgccctgcttccttcgggaaagttttgcttattcggctgtactaaaaaatgtgatgaagtttgtcataatgtccattgaaactctaaccagagctccatatcttgttgaggccaagcaacaagcagtttgccagctcactgtccatgaaccatactctgcggagcgctgtgtgagatgacattgtaataaccatcacaggcaccatgattattgttagtatggtttgggacagattcaggtctcctctttcaccatccaaatctgtttttactactccatcgaagacacacctatgcatgtgctcccgctcactttcacctggtcagtttcatcctgctgaaagtttttagaatctttacgatatcatccaaatgcaccaactatcccttctggctttatgtcacctgcacacctgctgagcgtgtcttctgtgccttcatggagacgctgatagcagtgttcatcaagagaaagccaagatcaggtctgcttcctttaggacaatcctgtggctcccctcagtggctgctcacctcgtccttattgtgtttgcctctctttcctaaaccctcacaaacccagacattgacttttcacagggggaaatggagaggaagcactaggaaatgacccgctttgaaggctccatcttgtggcgcatgagcatcagtgcagctcgggactgcagagggaagaggcgagctctgggaggaccgcactcatgcagaggcactgagggagcattggcagagctaccttgatctggaaggcgagtctttttttttttccataatgtttccaggtaaaatcagactggctttattcactttgttcatcactgcgaataaataaaacactacacctgcttcattaatggtccagaaaaaaaacattttttaaatgagctacatgggtaaagagaatttttaaaagattttctccaccattcatcattctaaatttgaaataaaaattccctattcttccagtaataatctggaaattatctttaagaattccttcactttaaatgggcagctaaaatggaggcaatgctgggccggcaaggcagcttcctcatcatcttaaaggaccgataccgatgtcctgtcactcaggcctgcttctcccacaccgggatctcacctccttcaggtggggctatgttgccttctgcagctatgtagatttttattccttctgggatgcaagacagctagagccaaggagacatttctagcacacaaccaggcacaagttttcaatgtgagtttaaatagtcatgacttaaaactctgagttgcagtgcaggaatcaggcgtgcagatgtagggcttgttggtgttgaggaagggaaaggagaaagttgaaagatgatgaaaataaggcaagtgggaagcagtagtcactcaggatactaacttagaactcatgatcagaaagggcaagtgtaagaaaaacagtagcgttatttatttggtcaacacacatgcatcagtgacaggttctaagaatcaagaaaacagtgaggcctgaatcctgcccagcagtgtgctgtggggagggagacagatttggaaataagtgtccttaacacccttcttgtgcagtctctgaaagaagagcaggtggaggtgaggtctggcaagacttccctggggttgcttcctctcaggacagaggtcattttctgtcaattctctttactatcaatttataaactccaaaattgtagcatctcaatcctccaatgcctctgaaattttgatttatgattttaattttttcttaaccttgaaacaaccttagagctgatttaatagagcaccttaattgtacagatcagaaaaacattggcagataagatggagtgtcttcatacacagcctctctacttgttacatcgctggctatgacactcatgtccaggctcatctcggggtgagactgctttgagggccagagtaatacagaattaagggtggcaaacaacagtttatgggtgaaagacaggctgcttcctccaataggaggtctactctttactggaggaaaataattaaagttaaaaaaaaaaaagtatagtcagtatgttagtaattagcgaaataccaagaaatttaatcccctatacttaaacgtcacattcaaataaactaaggctataatataaactccctggatatatatcaaaataccttgccttcttgctgtcatgtagacaataaccattgtatttacaactcataaagtgggaaagaagataagaaaaatatcactaaattctgtatttttaattcaagttactaaggagggtggagtttgaattggccttgacctgaatctctctcttttaaagaaacagagggagacactttgcattttggtcatgaacagaattcgcatcacataaaacttgtgctcagtcctctcccagctgatccaggcatcagagggagtggatcaggggatggggagggactcccccacccagaaacaagcaagtagaattgtaggtcacgttttgttgacattgtgcttgaccaatggaaatccctaggttccagcaatgagactcacaacaatgtgcaggagctgttgccatgtgatcaacagggatttcagacttggcctgaaaactggggttttaatgcccaggggaggacaggagatgaaggaagaagggaattggaaccgagtcactgtccgaatgtgttaagggctagccaaactgaaacgtaaacttctagtctacaggtgctttgtattaaaaagaaaaataattacttgcaagaaatcaaaacctcagaatacaccatgtagagatgtgagttataatgcctacaggtacctgagaattaaacagaaagattgagccagggcagtagaatcctgaaaccctggcagaagcaaacaaaaaacttcccttagtgcacaacccaggatgtatagatcaccatagaaggcatagctcttactgacaataaatcagaattcaaaattacatagtcaaaactacacatgcaagcaccatcaaaactgcatgaggaaccatcgtgacacagagatgggcaagaattaacacaggtagaattagtgctcaagaggccaggcgcggtggctcacgcctgtaatcccagcactttgggaggccgaggcggggggatcacgaggtcaggagatcgagaccatcctggcgaacatggtgaaaccctgtctctactaaaaatacaaaaaaaattagccgggcttggtggcgggcgcctgtagtcccagctactcgggagactgaggcaggagaatggcgtgaacccgggaggcggagcttacagtgagcggagatcctgccactgcactccagcctgggtgacagagcgagactccgtctcaaaaaaataaataaataaataaataaataaataaataaataaataaataaaaaagaattagtgctcaagagtgagaggaggctgggagcggtggctcacgcctgtaatcccagcactttgggaggccgaggcgggcggatcacttgaggtcaggagtttaagaccagcctggccaacatggtgaaaccccatctctactaaaaatacaaaaattagccaggtgtgatggcgggcagctgtaatcccagctatttgggaggctgaggcaggagaatcatttgaacctgggaaggggaggttacacagagcccagatcacgccactgcattccagcctatgtgagacagggagactccatcaaaaaaaaaaaagaaaagaaaaaaagaaatgagaggaaatagaaaaatctgaaagccaccattaaaaagatagtttaagcttattttacaggtaaaagaaaaaatataaacaataataaaatacaagacagtattttaaagcttgaggatatttggggaagaaaaacgtgaaacacagaaattaaaaaaaagatttggccaggcgcggtgactcacgcctgtaatcccaaaactttgggaggctgaggcaggcagatcacgaggtcaggaaatcaagactatcctggctaacacgatgaaaccccgtctctactaaaaatacaaaaattagacaggcgcagtggcagttgtctgtaatcccagctactcgggaggctgaggcaggagaatttgaacccagggggcggacgttgcaatgacccaagatcaagccactgcactccatcctgggtgacagagcaagactctgtctcaaaacaaaacaaaataaaaccaaaaccggattcattggatttccagattcattgtggaggtatagagggctggaaagagtgtcacacacacccttacaacaagaaaaatgctggacaataacaaatgaataatttattttattttattatttattctttatttttaacttttaagttcaggggtatatgtgcaggtttgttacataggtaaatatgtgtcatgggggtttgttgtacagattatttcatcacccaggtactaatcctagtacccattagttatttttcctcatcctctctctcctctcaccctccaccctctgataggccacactgtgtgctgttcctctccctgtgtccatgtgttcttcatttagctcccacttgtaagtgagaacatgtggcatttggttttctgttcctgcattagtttgctaaggataatggtctctagctccattcatgttcctgcaaaggacatgatctcattcctttttatggctacatagtattccatggtgtatatgtaccacattttctttatccagtctatcatcaatgggcatttaggttgattttatgtctttgctattgtgaatggtgcttcagtgaacatacacgtgcatgtgtctttataatagaattatttatattactttaggtatatacccagttatgggattgttgggtcaaatggtatttctgtctttatgtctttgagtaattggtacactgctttccacagtggttaaactaatttacactcctaccaaccgtatataagcattccgttttctccacaacctcaccagcatctgttatttttttactttttaataatagccatatgaatgacttttccattggagagctgaggtcacaagagcaaacaaataaccagaaatcttcagagaagatttgtctgtggggagaaacaggacccaaattcttgcttacctggaacagatgtagatgccatcaggtgccatataagccaataagaagattcagctagaaatttttgatgaattgctgaaggcccagtgtggagataaaaccagagttggaagtccctggggctgcagacagaggaggattgcagcagttcaactctacaacaaaggctgagaagatcttcactgtgggaatataatagaggtcagaaacttgaatctacacaaataaatgaagagcatatacatagaaaatatagaattaagatcgaatttattattttcttactgtagttactttttatgtttaaagaaaatagtaacaatatagtctctattcatagctatgtaaaagtaaaatagatgacagcaatagcacaaagaatggtagagaggaattaaggatatgctataataagttccttacacaatatgtcaatggtgtactattgagagaagactcagattgtttttaaatgcaaatgattacttaaaaattacatgtgggccctagggccacaacttagaaaaaaaattaagaggtataaataacatcaaataaaggtaaaatggaataataaaagattttccaataaacacagagaaagcatttaaaaaggaaaaaatacagaataaatggaacaaataaaacagatagcaagatggtaaatagtaaattttattctaaccttattaacaatcactctaaacatgactaatctaaataagccagtttaaagaaaaggatttgtcatactgggccagaagaaaaaaatcaagacccaaccatatgttgtctacaagaaaccaactttaaaatgaagacatagatagaagtaaaaaatatggagaaatatatatcatgcaaacactaaccaaaagaaagctggagtaactatactaatttcaggcaaattacactacagcacaagaaatattatcaaaaataagcaggaaagtaactaatgataaagctatcaattttccaagcaagttttcccagaagaaaaacaatcctaaatatgtttacaacatattaacaacaacagaccttcaaaataaaatagacaaaagttgatatatttgaaggtagaattaacaacagagcttcaaaataaaagaggtaaaacttgatatatttaaaagcagaataaacaaatccacaattatacttggacaagtcaagacttctgtcttagtaattggtaaaacaaatagaaagaaaattattaagtgtataggtaacctgaacaaacctatcaacccacccaacctaatgacatttaggaaacatgcaacccaacaacaacatcagcagcagagtacatgttcttcacagcagcagcacatggaacagtcactgagatggaccatattctgagccataaaagaaaccctgataaatgttaaagaatagaaatcatgtaaagtatgttctcagaccataacagaattaaactaaaaatcaataacagaaagaaattaggggaacctcaaaatatatggaaattaaacaacatacttttaaataatactaggtctaagaggaaatcccaagcaaaattggaaagtactttgaactgaatgcaaataaaaacaaaatttgcgagtgcagctgaaatagtgctcaaagagaatttacagcaatgaatgtttatgttaggaaagaacaaagatctaaagtcagtaccctaagtttttatcttaaggaattagaaaaagaatagtaagttaaacccaaagcaagcagagaaatgaaataataaggatgagaacagaaatcaatgaaattgaaaacaggaaaacaatagagaaaaccaatgaaaccaaaagctgattctcaataaaattgataagcctctagtgagtctaagaagaaaagagagcagatataaataacaataccaagaataaaagagtagaacttcattttttgcctcactgacatcaaaggaataataagagaatacaattaacagctgtataccctccataaattcaacatcttagatgaaataggccaattttctaaaggacataaaccaccaaaactcactgagaagaaatagagaacttgaataacactatgtctattaaagaaattgaattgtaactgaaaaccttcccacacaggaaactccaggcatagatgatttccttggtgaaatctaccaatatttagggaagaaataagaacaaatctatcagtcttctccagcaaataaaagaagggaaaacattccaagtcattttgtgaggccagaactaatctaatttgaaacaaaagacagtaaaagaaaattgcaaaccattattatatcaaaccttagatataaatttcttcaacagattgagcccagcaatatattaatagaaaaaggattacacatcctaatctagcagaatttatcccaggaatgtgaggctgcttcaatatttgaaaatcaagtaatataattcatgatattaagaaactaaggaagaaaacccttacaatcatctcaattgattctaaagccagcatttgacaaaatttagcattacttcatagtaaaaagtctcagcaaactagaattagaaaggaatgtccttaatcttatgaaagacactacatactatatacatatatacataaaactataaaacctgcaactaacctcagtggtagaaaatggaatgctttctccataagatgagaacaaggacaggctatcttctctcaccacatttgtttgataccatactggaattcctgtccttttcagtaagtaaagaaaaagaaataaaagtcacacaaagagaaagggaagaaataaaattgcccctattctcaattgacatgattgtttaaaaagacaatcccaagaatctacaaaaacatctctcagaactaaaaagtgagtttaacaaggtcacaggatacgtggccaatatagaagagccaattgtcttcctacatacagcaatgaccaactgaaatttaaaatgcgaaaaacagtacaaccaagtgtaatagcaccaaaattgaaacacttaaatatgtccttaaatatgcaaatacttaaatctaacaaaatatgtacagggtctgtatacagaaaagtataaaacactaatgaaagaattaaagaagatttaagtaaacagagagatatgctatatttatggactgaaagactcaatattgttaaggtatctattttatccagttgatgtacagattcagtacatcaaaatcaaaattccagcaagcttctttgtaaatatagacaaactaattctaaaacgtatatggaaaagcaaaggaactagaaaagccaaaacaaagttctttggaaaaagaacaaagttgaaggactctacctgatttcaaaattcattataaagctacagttatctaaccatatgatattggctaaaggatagatacatatgaaaatgaaacagaataaaaatcttggaaatagacacaaatatagtcaattgatttttggcaaaggtacaaactcaagtcaatgaagaaagttttatcttttcaacaaatgttgctagaacagttggtcagccatgtgtaaaaaaactcatgccttatacaaaaattaactcaaaatagatcattaacctaattcaaaatttaaaaccttaaaacttctagaagagatgtaggagaaaaatctgtgttaccttgggtttggtaacaagtttttagatgtgaaactaaaagcttgacccacaaaagaaaagtttataaaatggactttttaaaaactgaaaacattgctctgtcaaacacagtgttaagagaatgaaaagataagctacagacttggagaaagatatttataaatcccatatctgatacaagacttgtgttaaaatacataaagaaactatcctcagagcaaacaggcaacctacagagtgggagaaaaattttgcaatctatccatctgacaaaggtctaatatccagaatctacaaggaacttaaataaatttataagaaaaaaacaacctcattaaaaagtgggcaaaggacatgaacaaacattcatgcagacaataaacatatgaaaaaaagctcaacgttgctgatcattagaaaaatgcaaaccaaaaacacaaagagatagcttcttacgccagttagaatggcagttgttaaaaagtcaagaaacagcagatgctgttgaggttgtggagaaatgggaatgcttttacgctgttggtgggaatgtaaattagttcaaccattgaggaagacggtgtggcaatcctcaaagatctagaaccagaaataacatttgacccagcaatcccattactgggtatatacccaaaagattacagatcattatgttacaaagatacacgaatgtgtatgttcattgcagcactattcacaatagcaaagacatggaatcaaccaaaatgcctatcaatgatagactggataaagaaaatgtggtgtgtatacaccatgaaatactatgcagccataaaaaggaacaagattatgtcctttgcagggacatgggtggagctggaagccatgatccttagcaaagtaattaaggaacaaaaaactaaatgccgtatcttatcacttgtaagtgggagctgaacaatgagaacacatgggcacagagaagggaacaacacacactggagcctgtcagggagtggggtcgggggaggaagagcattaggaaaaacagctaatgcattcagggcttaacccatttatgccagaggttgcagattttttgtgtgaaaaatcagacctcggtgatgaccatgagcagtaggatataaacaactccaacaagcttgtgttccaataatggaacactaggcataaatggcttaatacttaagtgatatgttgataggtgcagcaaaccaccatggcacacatttacctgtgtaacaaacctgcacatgtacaccagaacttaaaattaaagttagaatatatattatatatatatacacacacacatacacacacacacacacacacacatatagatcaaaatgataagatcaagatggaaacaaattagtaaagtgtggaggatttttcccattaagaagcttcatctgatgataatatatatataaagaactcttaaagctcagcaattagaaataatccacactttttaaatgaaaacatacttctccaaagataaacagataacaaattttagaaaaaaaaatccaacatcagtagtcactaagaaaagtaaaatacaaccacaaagagttaccaccacatatctagaatggctaaaatttttttaaaaaactaacaatgccaagactggggagaatacagagcgatgggaacccctgctttttgcgggtgggaatgcagatcgtatggccattttggaaaacaatttaacagtcgcttataaaattaaacatacacttgccatatgacccagaaatacaatttttaggtatttacccaagtgaaatgcaaacatatgtttgcctaaaaacttctacgcaaaagtttataacaactttattcataatatccccaaactggaaacaacctagatatgcttcaaaaggtgactggatcaacaatctgtggcatgtccacacaatagaatgctactcagcaataaaaaggaaaacagtattgattcatgcaacaacatgggtaaatcttaaatgcatttttctttttttaacttttattttaagttcaggggtacatatgcagatttgttatataggcaaacttgggtctgttgcacagattatttcatcacccaggtattaatcctagttatttttcctcatcctgtccctcctctcacccttcaccctccaataggccccactgtgtgttcccctctacatgtccatgtgtctcatctaaagtgcttttttctaagtgaaagaagccagacccaggagatgtcatatcatgtgactccatttacatcatgttctggaagaggcaaaactatacagacggatcagtggttggacatggtggctcacacttgtaatcccaacactttgggaggctgagttgggaggatcacttgagttcaggagtttgagaccagactgggaaacccagtaagacccctgtctctacagaaaaatttaaaaattagccacgtatggtggtgtgctcctgtagccccagctacccaggaggctgaggcgagagaatcacttgaacccaggaggcagagattgcagtgagctgagatcatgcaattgcactctagcctgtacaacagagtgaggcttcatctccctcccccaacccccccaaaaaaaggaaaattaagtcaaaagaaaattcaacaagtatttttaaaattatatattgaccacattatctgatcaaaatgcaataaaattaaaaatcaatgatagaaagatttccaataacttacccaaacatgcacacatatactttagaaatgataaaagattcttctaaataactcatggatcaaagaagaaatcataagaaaaattatatttagacttaaagatgaaagatacataaacacacacagagatgatggaaaataagagagaaaggcgaagagatgcagaggataaattcaggagatccaacatctcatcctagtttttccataaacacctaaaggagaaagaaaagtgagagtattatcatagaattatagaaatttccctactctgtaacaatatgagtttccaaattggaaggacttacgaagttcccaggacaataaaggaaaaggacccacaccaaagcacattatgacaaatctccagaataatacagatgagtaaaaatgccaaaatatttcagaaatgtttaagaattacataaagtgatccaaaatattatgcacccattctcagaaagctactgcagaatgtgctccaccaaaataacagcattaacaacgggggaggtgcaggcaccaaaaaatcagtgacatgaaccctgaagaaaggcagatgggctgggcgcagtggctcacacctgtaatcccagcactttgggaggccaagacgggtgggtcacaaggtcaggatttcgagaccagcctggccaacatggtgaaaccccatctctactaaaaatacaaaaattagccgggcgtggtggcaggcacctgtagtcccagctacttgggaggctgaggcaggagaatcgtttgaacccaggaggtggaggttgcagtgagctccagcctgggcaacagagtgagactccctctcaacaacaacaacaaaaaaaaaggcagatggactccccagcatgacagtgaagggaaatcccaagacgggagctgcacagcaggcgtaaagcacaagtccagattgaaaggatttggaaggatcggacagaggatgctaggagggttacctctgggaaagagttacaagcaatcgaatacaaaatgtgtatgaccacagtgggagaagatttgaattatagaggcggccttagggatgaaagagtgataagaaaatggaaaactaaaaaaaaaataaaagcccattattaacttttgaaaggaaaaaggtggcaaaacaggaaatgtaatcacagcatactacatagctcttctgtgaattatacctatatatctatataataatgcaaactctgaatattgatttactgcaaaatggagacaaggctctattaacagatggaggaaggggaaagctgtggggacaaatcccatcttccgtagtaggaagtcagtagatcatatttaaactccaatatcaagaaatgaaaatagctcatgtggtggagaaataaataaatagaaatgaaattatatcatgttaattagaaataaagcaataggctccaaaagaaatagctaaaaatgttttaaaaatagtcgtctctgtggagtaagattagggtaaggatgttaagaagggaagtgactcttttattataatccttggtgactctttaaaccaaacatgtagtactccatgggatgccacaaaatcagtatttaaagggaatgtatatgcttaagtgtatgcattaggaagaaatggaaattaatgagctaagcatatgactctaggatttagtaatacagcacagttaacccaaagaaagtaaaaggcaataatgaaaaatgatgaaattaagaagaaattagagaaatgaaagcaaaagctaaatctttgaaataaactagcagggccgggcgctgtggctcacgcctgcattcctagcattttgggaggccgaggtgggcgaatcacgaggtcaggagatcgagaccatcctggccaacatggtgaaaccccggctctactaaaaatacaaaaattagctggacgtggtggcgtatgcctgtaatcctaggtacttgggaggctgaggcaagagaatcacttgaaccagggagtcagaggttgcagtgagccgggattgtgccactgcactccagcctggtgacagagagagactccgtctcaaaaataaataaataaaaagaaataaactaacagaacagattttactctttctatgagagaattggtcataacaggtatagtaaagctttaagacatcaaaaaagatactatgaacaattttatgccaataaatttgacaactagaaaatgggaattaccaaaattaactccaaaagacattttaaaatatgaatggacatcaagcattaaataattaaatcagccatcaatgtcagaaaatctccaggcttaaccggttacaaatgtgagttttgccaaaattttaaaaaacagattattcctatttttacattaacacacttaaaagaatagaaagagaatgaaaactaaagaactcattttatgaaggttgcaaaatcttaatatcaaaagtggatagatgggtacaaaaaaatagttaaaaagtatgagaaaggcctagtatttactagcacaacagggtgactatagtaaaaaataatttaattgcacattttaaataactaaaagagtataatagattgtaacacaaaggataaatgcttgaggggatggataccccattttctatgttgtgattactatgcattgcctgcctctatcaaaatacatgtaccccataaatgtgtatacctactacgtgcttgttagccaatgtcattcttttttttttttttttgtgtgtgtgtgtgtgtgtgtgagatggagtcttgctctgtcaccaggctggagtaaagtggtgcaatcttggctcactgcaacctctgccttctgggttcaagtgattaccctgcctcagcctcccatgtagctgggattacaggcatgtgccaccgcacccaactaattttctgtatttcagtagagacgggggtttcaccatgttggccaggatggtcttggtctcctgaccttatgatccacccgcctcggcctcccaaagccaatgtcattcttatgtagcagtactagcagtagtagtagtgattgataggatctgttgagctctttatacatgtcagacacagttttaaggcttttataaatattaattcagtcatcaaaacagccctgatcaagaaggttctattattatctctattttataaattaggatactaagtcataggtagttaaataatgtgcccaggacctaggccatcttccagagttctgtaacagtcaggctactgcagactataaacagagaaaacacctgattccaactggtcatttgaaaacacagagctgatttgttgcaagtacacagctgcatcaagacaaaaacactggccaacacaactgcacaagaaaaagaaataatactttgaagaacagacaaaattatatgttttcatagatgatataattacctacattaaaaatccaagagtatctatagacaaatcattaaaactaataagttctttagcaagattgctagataaaagttaatggtttactacacacctgcaaaaatctgttaggaatgatgcctttttaaaatctcattcaaagtgcaaccaaactacaaggtacctaggaataaatagaacaagggatatacaagatctgcattgagaaaaattataactactttttaaaaggataaaggagaaaaatactatgatttataaatggaaaaacccaatgtcatataacaatgataattttcccccaaaagacctgtaaatcgagtgctattctaatcatgcaactaaccacatttttcaaagaagttgacaagtcttgtaactcatttggggaaagtaagatacaattttgaagaagaataaggtggaagaagggagaaggagtattcctttccaaatagaaagacttagcataaagctataatagtttgttaaagtatggactttcttaaagaatacacaaacttggaaaagaatagcctagaaacagaccattatatatgggaacttgatatataacagaagctatactatgaatcaaagcaaaagctctagttaataagtttggagaatttttattcaattcctatcacatcttttactcaaaaaataatcgtaatagattaacaatctacatgggaggctgggcatgctggctcacacctgtaatcccagcactttgagaggccaaggcgggcggattgcttgagcccaggagtttgagaccagcctaggcaacatgggaaaaccccgtctctactgaaaacacacaaaaaattagctgggcatggtagtgcatacctgtagtcccccctactcaggaggctgaggtgggaagttcacctgagcccaggaagttgaggctacaatgagccatgatcatgccactgcactccaacatgggtgatggaagtaagaacctgtctcaaaaaaaaaaaacaaaaaatctacacgggaaaggcaaaactataaaacgtttatacgataacatgtaagaatatttatctgatatcaggatagggaaagatgcctaaaacaaaatggaacccgtaaaccatataaggaaagcttagtaaaattgaaaaagtttaaataaaatgttctgtatgacaaaagacacataaacattgtttaaaaacagagtggagaaaaatatttgaattgtgtacaatgaacaaattaaagtcagtcctcactatttgtagattccttatatgtgaattcacctactcgctaaaatttatttgtaacttcaaaatcaatactgatggtactttcacagtcattcacagccatgcacagagcagtgaaaaatttgagctacctgaaacgcacattcccagctgaagccaaacaaggcagcattctgccttcttgtttcagctctcatactgtaaacaaatgtcctattcaaggtgtatttagtgccacatttttgcatttttgtgctttttggtagtgacttccctatttaaaatggccccaaagcatatcactgaagtgctgtctaatgttcctaagcacaagaggttgtgattgccttgtagagaaaatacatatgtcgcttacctatgtaacaaacctgcacatcctgcacatgtacccggaacttaaaattaaaattaaaattaaaaaaaaagaaaatacttgtgttacataagcttccttcaggtaggagttacagtgctattggccatgaactcaatgttaatgaatcaacaatatatattaaacatgtgtctttaagcagaaacatacataaaacaagtttatgtatggatcaggtgaagaaaatgtagtgaaggaaggctccctggaacctagccctgtatttcccctgggagcaacggttcagtattcactaattcagtgttccctgtgactttatagaatgtaactactgagaatgagaatcaactgtacattcatgagtctatgaagttctacaaatcaaaaggaaaagacaaacaacttgatagaaaatagcaaagcatacaaacagacaagactcaggagaagaaatctgaagagccaataaatataaaaagttgctcaccttatttgttcatcaggaaaatgtaaactaaaactatagtatgtcttttcacacctgtcaaattggcaaagacacaattgtaaatgttgacaaggagacagagaggacagaacacttatacatgcactgttgttgaaactgtaactttgactactttggatagcaatgtggcaatccctattatggctgaaaatgcacagtttgtatgacccagcaaatccacttctagataacaccttacggagccaggtaaaatatgtataggataaacattggtattgaaaagaataataaaatggccaggtgcggtgtaatcccagcactttgggaggtggaggcaggaggatcacaaggttaggagttcaagaccagcctggccaatgtagtgaaaccctgtctctactaaaaatataaaaattagccaggcatggtggtgtgtgcctgtagtcccacctactcgggaggctgagacaggagaatcgcttgaacccaggaggcagaggttgcagtgagctgagattgcaccattgcactccagcttgggcaacagagtgagactttgtctctgtttttaaaaaatgaagtgtctaaatgtcattaatattgcaatgagtaagtaaactccaagttatatatcagtaaaaatcagtaagctagataaacatatatcaaacaaatatcaaaaacattttgcagactgaaaacacattatagaagaatatgtataatagcaactatagaggctgggcatggtggctcacgcctgtaatcccagctctttgggaggttgaggcaggtggatcacgaggtcaagagatcaagaccatcctggccaacatggtgaaaccccgtctctactaaaaatacaaaaattagctgggtgtggtggtgcacgcctgtagtcccagctactcgggaggctgaggcaggagaatcgcttgaacccaggaggcagaggttgcagtgagccaagatcgtgccactgcgctccagcctggtgacagaacaagacttcgtatcataaaaaaaaaaaaaaagaaaagaaaaaagaattagcagctatacaaatttttaaagcatgtacataattttgttatggtagcacaaaaacccacacaagaatggtgcaatgatgcatataactttaaagaggaaggaaatagtattggagatgggacaataacaaattatattaatactaaaaaactttacctattgtataaaattattcacttaatcctcaaaatagccctatgaagtaggtaccattattctgacttttcaggtgagaaaactggggcacaattaagtaacatactaggaaatccttctaatagtaatattgagaaggggaaagaaatataattatcagtgtcttcctcaggttttggagttggtaaaatttacattctgaacagtctggtgagagctgggcctttgagtccttgacttctctcaaagaacaactataggatgccacgtttgggctcacaggctgtcagaaaatgggctctatgtttattttgattaattcaaaatagtgtgaggaggtgttaatgagacatcattttatactctttcataccctcaaacgttggaacagtggggctaccgtagtaaaactggtcaaggcatcctttcctttcattccaggtatcactttttaaatttcaaatactttattcacttaacacattttgggttttaatatattagtgtgactttttaaaagtcagattggcaaatgcagaatcatgttgcaagttacttcttacagttcagtgttgtgtgaaatttaatttatatggaatcagaaacacagaactggaagagacactggagactacttctgccccctcattttaccaagtagcttatgcaacatcccatacagatcaaaactaggatgctatcccattgcccaagaaatattaactccaggaaaagcaaaacaagtcttagaatatttacagcttctagcagtaaaaactgttcagaacttgtgtccaatctgatttcctcaaacctcctccatgtggatatccctgaatgaagaaaaacaacaacaggatgccactgggaccaggctctaggctcagacagagccccagccctccattgggtcaattatttggtgaccatcctgtgtcattacaaacagaaaagtctcccttgctataaattaactcattgaaatctaagatacatttgttctattttttctttttctaagataaagcatgttaaattccttatcactaacaacaggcttatctgtagcaaaaaaaaaaaaaaaagttgtaaggatgagtgcactatttcatgaacatttccttacttagcatgacacttttattctctgactaacccttacaaacaatcaaacaaagctctaaaactcaaaccccccaaaagagaaaaaacaactctaagacatatttaattacctttagcatattttagctgactttgtggtggcactccaatattgtgcattagagagtttgacaacacaaatgactttttaaaatcctgataatccatggatatttcctttaagcacttcaaatatgtcataaacaagcatggacattgcattggctctcatgaaaatctcattctaaaacctatcaagatggttttcacttttcttcctaaaaaagagtggtaaagacagattctaattactaaacataaatgataagtatttccatttaataatttcttaataaattacatttacatgtttatattgaacataaaatttgaagataaatgggtcttacaaacagagaagtaaactttaaaacgtagtttagtgaaattgtaagaaaaaattcaattctgacttaaattctaatattttgtgcttaatataaaaatagtcactaatagtttatgaacctgggcagctcatatagtgaaaacaaaataggaggggcagagggtttttttttctcccttttgtttgttcctcttggctcaaacctctcataaaaatacacacccctggccccatcagatgttagcattgcctttcgaagaagctaggaactatcactaggaggcccttcatcttccatccaccaaagaacaatccacttgcttcttttcccatactgtgcaccccattctactgctagcaatgaaatgtcctatcaaaggccttatgctttttcacttcggaattccatttacaacctatatcatctatttctccttctgtcttgtttcaaatatgctctagaatttcctatctttaaaaagaaaaaaattcctttttcctctagatccagcttcagctatcaccccataggcatgtgtatcatacggagaagaaggaattggtggggccatctttgaagaggatctaccataatagcaacttcacaatcctttctttacttgacttcatagcagcaaaagacatactaacacccaccccctttcttgaaagacttttattttgcattccatgacaacccatgtattagtctgttttcacactgtggaaactaaagacatacctgagactgggaagaaaaagaggtttaattgactcacagttccacatggttgggcaggtctcacaaacatggcagaagatgaaggaagggcaaagggacttctgacatggcagcaggcaaaagagagagcttgtgcagagaaactcccctttataaaaccatcagatctcatgagacttattcaccatcacaagatcagcacaggaaagacccacccccatgattcaattacctcccaccagttcctcccacgacatgtgggaattgtgggagttataactcaagatgagatttgggtggggacacagccaaaccatatcaccccacctgggttatccacctccctgcttagaccatccatcccagtcagctttggtacacttcctttgagatatcccacatctcttgggggccttgctcttttcatggccattaaacattgactagatgacctcatcttgccccatggttttcaatacccgctatgtgccaacaagtcctgaatctggactccagctcacatcccaccccttaccaatcattgtacatctcaaactgcctactagaaactccaaagctagcttgacctcttttcaatcaagcctttagtcaaatattatctttagcacttccctgagcattatgtaaaaaatggcactttcacaccatcactctctatcccactaattatttctttttcttagcacatatcatcaactgatatacaataaatttacttcactacttcatcatgtctcttccaacttcacctgttttgttggctatgtgtccccagcctctcggtgccaaatgtatttctggttccttatctgctgcttctcttgagggttaacacagtatcccaaggattttgaaatggccacatttaatactcaccatctctcctcctcttaatttgccgataaaattgctaaattcccattgctatgaacactgcccattatccttctagctcctaatctgcctcataacttgaggatgggggggaaatggttttccgaagcctttgctgtgtaagcctagctcttatactgacacttctggtattaacatcatccaaagtgtaataaaaatcagccaataactgttctctgaaaatagtttaattctcactctaagagtagtgatcaggtacatagatcaaaagccaaggtctttcctagagtttacttctctgttgatttatgtatgtctttatgatattttaaattttaaaaaataacaaatgcatgtagatacaagagaacttcatagtcctgagacctccaatatttagaagtgtggagattgcaaagtgactgagaaagagcaagagaggaggtcccagaagccagagagcatttcaagggggaagtgatgaactgagccaagaattgttgctgctctggacagaaggaggatgtgcagggaaggccatggtggtctggagagctgctccagtgaagagaaaggggtcaaatcagtgagcaatggttctgtgcatgataacgagcaggtccaagtgaaccaaacacaagtgataacaccaagggctttacattgcaattctggctccaatccccacagggtcactgggtctcagagcaaatcacttaaactactgctctttggtatcaattgcaaattgatgagtgtaacaaatagcatctacccaccccacagaatccttgggttcaagggtacaatggactgaatgtctgtgtccccccaaaaatccatatgctgaaactgtaatcccaatgtgatgatgtttggaggtgggacctgtgggaggtgataaagtcatgaggctgggaccctcgtgactgagattagtgcccctatgaaaagaagccaaagagattgctggctgtctttctgccacgtgaggatacacaggaagtcagcactctacaacttggaagaggccctcaccagaactcaaccgtgctggcatcctgattgtggacttccagcctccagaactatgagaaataaattcctgtttgtaagtcactgggtccatgggacttggttacagcaatctgagctcgaagacaaagattgagcatgtacatgaaggaacttttaaattaggaaagctccgtgtacatgttgggtcctatttcagacacttctaggagccaaacaaccatatcatgggctcaaactcaagatttatggactccttccttctcagtataaagagatgtttttataaagttcacaaaatcttatcaaactagaatttttttagtagaaaatttagaacttttgagagtagaaaacagatttaaaaaggaatagaaagctgatttataaaaaatcattattgtactgaatctttgactttcaatgatgaggaattttattttagtcaatgtattatacatcaaatgtaggtttaaaaaaggtaatacaggtagtcacacaattatactatgatacttgctagtactgaaatgctgtgctagaaatattttaagattgaatcacaaaatttaagattatttatcaataaccaataatttctccaattaaattatcatgagcagattgagcacaacagctcatccaggaaactttttttcaatatggagatagagtttaaattcaggatgaaccacagagcataagagttcaggttctggggccggaggctgaggtataatccaggctctcctgttctctaagctattgacaccagggcaaactatttaacttctccaccctgtgtcactctccccaatctcatttctctctcccctacaaagaaccaatatcctgaatttggttttcaacattgccgtgcatgcacttgattctttttaaagtaagaatgtatgccaatgtaaataaaatatagtcttgttttgtattttttacattttaaataaacaggatacactaattacagcttctgtaacttaccattttttcagtcacctttgatatttatctatgttaatatctacagctctaatttatttatattcataaaaatacacaaattccattatgttaaaaggaatgtaatttatttagccattctcttactgatagacctttagggcatttacaatttttcacttttggaaataatgctgcagcaatcatctctgcacgtaaacaacttacctacgaatggaattacggtgtcacaggttattagacattttaatttttaatattgccaaattgctcacagaatcgtagtactaatttgtatccctaccagcagcatgagtttcctcttccttgccatttcagcaacatttcattgtatcagacttgtaaaattttgcctatctggtaggtaagaaatagtatacattgcagctccagctgccatttgccggatcattgtggaggttgagcatcttgtagtattatgtatattggctatttctgtttcctcttctgtagctttcttattgatatcttatgtctattttctcttgggttgttcaactttctgtaactgatttttaggggtttattgcatattctttatgctaaagctttgtcaattatatgctatgcaaataccttcattcagtctttgtcttttaactttcctgatggtgctttttaatttacttgaatgcatcaattatgatttgtgctttttgtttgttgttcttttttctagaaatcagttcttgccctgatattatagaatgttgttctgtgttttccaaaactttcaaaatacgatttttcaaataaaattctgaagaactcttgagcatgtgtgtgtgcaatagtgtaagacagctattactttctttcacatccattcatttattttaccttttcatcaatctgctctattcatagagtagatactatcagaattgacgagtaaaataaaaacctgaaaatatatttcatagatacgaggccacagagcttgtcactaaccaagaaaatcaaagtgagcatctccatctaaatgagccccaggcatttccctcgtatcaacatgtaaatctgaagtcttatcttcactcctcaggccacctccccacccacactgctcctcttcctgcgttcaggtgtagtcctgggttttatcagccgggctgccccatcaaccacggagatggttgcacactggacttcccgaaagctgggtgggcaccctccccaacccccaagcagagattagaatataatcagtctgggcgaggccaggcactgatagctcctaaaactcctcagatgattttaacgtgaagccagagtggttaacctctagatcagtgcctcgcccccactcccgcccttgcatatttggtaatacctggagaagtttttggttgtttgtctcctcagcactcccaagagtgctactgtcatctcatggccagaggtcagtgatgctgtccaaccacctaccatgctcacaatgccaagccccataatcattaaacagagaaagcgtcgacagccaaggttgagaattggacctagagtatgctacctccacttttgtgacttaaaatgctactcagcaccaatggcatggcatggacatcaccagagaacttgttagccatgtggaatctctgggtcctccccaggccttctagtcagaatctacactcgagcaggagccccaggtagctcatgggcaggtcacaattcaagaggccttgcactgggcagcttcctccctctccccttccccctgcagatctaatcagataacacatcctgtcagcaccatatctttattttctctgaaattgtcctggcccatccatcccgaggacaactttatcagcccaagacttcattattagtcatctgaagtattgcaataaccatccaatctgatcaccctcttctgtcctagttgagctcctcaccctttctgagagttatgacacattttaagatggaagaacataaccaaaccttcccaggggaaaacgcacacatcacacacacctacccaccctcacatactcctaacatattgcacacaatttcgacaggtttgcatagcttctaatgtgctcctcagacccctccaggcaaaaatctccaccttagtctctgagtaaacagatgtgaacttttgggtcccctgctgaaagcctcagctctttggtgtggatacccaggccccccacaattcctctccaccaccaacagcacagcctacaccagccaatcatattcatggcagctgcctgtgtgcaagtgctctgccccaccacagagtttagcagatgctgttcctcctgcctgctgcatccttctttccggagttgtctggcttaaccctgctcccactttgggttagattccctttactgctgatctcttagttcccagagctttcatctgccacagcacttcctgaagtatagtatagggtgtgtgtgtatgtgtgtgtgtgtgtgtgtgtgtgtcttacaagtctctcatcacatctgagtcaggaaagggtatctttcatcatctgcattactcctgtaatcccagcactttgggaggccaaggtgggtggatcacgtgaaaccaggagttcgagaacagcctggccaacatggcgaaaccccgtctctactaaaaacacaaaaattagctgggcatggtgatgggcacctgtaatttcagagtttcatctctgcaacttcagttcctgacacaaacagaagctcattaaaggttactaataaatgtaaaggaacaataaagctagcattatttctactctgtcatattgctttccaatgtatgctttggtagcttggcattttctccttattaataaggtataaagccttgtttcttagtcaggcattgtattcagtaagtatgagtgttcatgcttttaaaacatacattttcttatattcctgaaacataagtaaaaaagattaaacgtatgatcatgataaatgagtgagtgcctaggagtcccctgggttctgaggaaacgtaccccaagatctatgctcccataatattgcctccagaagctcagccctgtcttccgcaggtcttcctctgggaattcacagccattctcagctgattatgggagatgagaatctagaaacattttccatgtttgaatgtccagttgaaagagttcattaaagacatagatcttgaattcggataagagataaaagttttaaagctagaaatgtttatcactgcaaacattttaatatacctgcagagattacaaactagtgcattatgtttattttaaagggataagagcctccctaacaccaggtcaccggttttcaggtaaaaccagaaattacaaactcaccatcctcatttagtgaaatgggaaagttgcttaataagaatagagcatattcattaaagaaaagccttttacaaacaaataacattaaaatattttacagccatgttgttttatatcttctactcttttgcaattacaacttatttctttctgccttccaaaacaaacaaacatgaaatgtcttttgcttttaaggtgtcacctcttctttgctttgatttagtgctctttggccacaagcccactggccccaagccacatcatcaggttcctctgcattgccttggaagggaaggatttggcattggagcgcaggaagcctgctccagccagagttcctacaaagtgccctctgcgtggcagctgccatctgttcggctttctctccttagacggagcaggtcctcaggatgccctgttctccttttcccaagatgacccccttccccaaagacaaaggctctgtccacaccccccagggaaacagggtagaagggcagatccttctcagggaccaacataaaggaaacagcaaacagcctacatatttgaaagcgttgacaaggtcctgtctgaggaaaacaacaactaacaaaacaaaacaaaacaaaacaattctcttctcttccagacacccttaagtcctcaatcctagaatcatttcctccctgtccacatgagttagagctgcactgaatttgtcactgcagacaggcaagataacagagaaaaacaagtcagcagacaccaaccagtaagattttgaggtcttacataaagagagcgttctgccagtgtctggggttggtacacctggtttgagatgggttcttctatttactggctctatcacaaactaatcacagaatctctttgagcattcatttcctcccctgtaagatcagaatgaagataaaaattaaacctacctcacaacagcctccctcatactcctctttaattcaagaaattttgcttgaattatcagagtaagaatttacaatgtccagccaggcgcggtggctcaagcctataatcccagcactttgggaggccaagatgggtggatcacctgaggtcgggagttctagactagcctgaccaacatggaaaaatcccatctctactaaaaatacaaaattagccaggtgtggtggcacatgcctgtaatcccagctactcgggaggctgaggtaagagaatcgcttgaacccaggaggcggaggttgcaatgagccgagatcgcgctgttgcacttcagcctaggcgacagagcaagactctgtctcaaaaaaagaaagaatccatggtgtacaattcaaatctggtcaataaagcatcgatacaacactttacaaatgcaaaaacctctgcatccaaggatctattcacgtctcaggctctgaggtcaattactcccttccattaaacaacttcctgttttgctctatagtatcctttatcacactggactctttacactatttttgttctgctttttttctacccgcaaaatcattgcacctgaacaagaaactgatttgtttttcaatcaggttttctcacagaattagtgacataagaggattgtttgttttcaatcttttttctcctcctagatctatttttaaaacaaattttattttgggatgtcctgactgggatgatactaaattgaaaagcctggtgcaaattttattgacctccatttcctactatgaaggatgtccccgactaatctgtcatctacagggcagacaaaggccagaggccagggaagccaaaacagatgttgtgtgcaagaagcccagggccagactctttacgttttgttgattggttttaaaatagtcaactagaagaaaaaggaaaaaacacatgggcatttttcttcttattccaagctgtgccaaactaaatgtgacttgaatgtgcatggcaaacacaatgcctacaaatagacttttaatcaatgtttcttaggtatgatagaatgaatggatggaacgatggatggatggttggatagatgggtagataaataaatgaatgagtgaatattattgaaggttttctatttaaaccatgcccagaacacaaaaagacaaaagttatcacttagaaaactctgaattacaggccagtcgttctgcccgctggtcctcgcaccctctcccttgccggtgtcctgctcgccatccccaccatactgtctctagtctttttggatgatgtgcagtggatgaacaagtggcggctctattatcaagtcctaaattttggaatgattgtctcatcagcactcatgatctggaaggggttaatggtaataactggaagtgaaagtccaattgtgttgctcagtggcagcatggaacctgcatttcatagaggatatcttctctttctaacaaatcgagttgaagatcccatacgagtgggagaaatcgctgttctaaggatagaaggaagaaagattcctatagttcaccgagtcttgaagattcatgaaaagcaaaatgggcatatcaagtttttgaccaaaggagataataatgcggttgatgacagaggcctctataaacaagatcaacattggctagagaaaaaagatgtcgtggggagagccaggggatttgttccttatattggaattgggacgagcctcatgaatgactatcctaaacataagtatgaagtgctctttttgctgggtttatttgtgctggtccatcgtgagtaagaagtctgccttgctgttcctgggaagatgccacattttttgttactggatgtttggagtagatattggtctgtgattggtggaatggagaacacacgtgttggcgcttcttggcagcactggtttgcatgagtttgtttccacgccagagtttttgtgggcggccgcatgtgcaccacagagtgcatttgaggggactttcattcacaggatttcatagttgtcattgtcacactttcacatttttgtatacagcagtgaattttttatattaaaagattgagccaaaaaaaagaaaattctatgaattacaaagtgaatgccttcctactttttagcgattaacaatgtaaagttttatccatatccttccctattttgtcatattttaatacttttattgttttatattatttatctatttatttatatatcattaatttttttcccaaattacaatcaccattgtccgtagtgatctacatctcatttttttcacttatacatcaagaatatttgttcatgtcagtgtatagagatccacattgttcttttttaatgactacgtgatattctgttgtatagccatactgtaagtgatttagtcagactcttattgaaaattaaattgtgttcaattttatgccattaccacaatactacaatggactgcctcatataatatatatattatttatatcactgaccatctatataaatatatatatatatattttttttttttttttgagacagggtcttactctgtcacccagactggagtgcagtggcacaatcacagttccttgcaatgtcaacccgtcaggcttaagtgatcctcccacttctgccccactgagtagctggaactacaggcacacatcaccatgcctgactgattttttttatttcttgtagagacaaaggtttcactatgttgtccagtctggtctcaaactcttgagctcaagcaatcttcctgcctcagcctcccaaagtgctgggaatacaggtgtaagccaccacacctggcctattttttctttatagaaactctgcactttagaaattttaacatttgtaattcgtatgtgtggcaaatatattctctcaatctgttgcttgccttttaactttgtttttggcatccttcactgtttaattattttaagcttttctattgttaaatttagtttttcctttattgctttttcttttctaaataatcctaaggaagcttcctcaaccccaagtttataaaaatgtatatctattcttgataattatactttttacgattgagatatttaatgctgacttaatatccatgtatgttaccatattccaacctttttcggaattaagttacatggatgtgactcattctagccaatgagatgttagcagaggtgacatagacagttctatgtcattttcaccccgatcgtgaagacccctgtgtgaaccttcagatttctcttccatttcagcagtacaccttgaaaccaaatggttcaaattttgtgggaacaaaatggaagcagccttaatccctgagtcaccacatggaaggaagcttccttggaagaatctccaggctcacttcagacttcacataatcaagaaagtttcctggctgggtgtggtggctcatgcttgtaatcccaacactttgggagggcgaggcagacagatcaccagaggtcagaagttcaagaccagcctggccaacatagcaaaacactgtctctactaaaaatacaataattagctgagcatggtggcacgtgcctgtaatcccagctacacaggaggctgaggcagaagaattgcttgaacacaggaggcggaggttgcagtgagcagagatcatgcccctgcactccagcctaggtgataagagtgagactcagtctcaaaaaaaagaaaaaaaaagaaactttcctatgttaagctactgtgatcttaagatatttttgatattgcagcatagttaacctagcaatgttttttctctacatttagaagtttaattcacctacaatttatatttacatcatgcaatgtgagagtaagtttgttttttcaaaatactgtcattatcgtaatattaaactgtttttacttagaatcttctcttttttttttggatggagaccactccttcaatgattagatagatgagatataagatggaaataaatatttgactacttacaggttcatggggtgcacagcatgcctggaggccacacacacacacattgcatacacacacacacacacacaggtcagggagtgtgttgggagagggatccgtgggccagtccctttattggagtccaggacattattcaaacagatttcccaagaggagttttagttagtaggttcaaagcagcaggcacaaattccaggtcacaccgtgactgagaggtggtcactgtagcacatctgcactgtccatgtaggatatggggatcagcagggccagtcaggtaagttgtatccagctgtcccatagggagggggttaccaggaggcagttatataaggcagatagctgaatcaacaacactgagcaactgggtgtgggagtggggggagcataaaactggagactgtcaagacagactaactctgctactgataagagaaagttaaatgttcaaaatgcatgttcaggcaacataaaattataagattcactacataaacccacatatatcaatgtgtctgtttctacattctgtcttatgtaccactgatctatttctctatctctataccattacccaaccatttttatctaagtaattatgtgttatcttagggagcaaatttccccttctgattcttcttttcaaatgctaacttcattgttacaaacaaattttaaaaccaacttgtctatttcccaaaacaattcactgggatcctaatcagatttgcattatctttgtaaatttacttgggaaggaacagcatctgtatgtcatttagtcttcctcccgtgaggaattattactatgtctcatttattttagtcctattttatgtcctttaataaaaatatatatagtgctcttattaagttattcttagatgctttacaaactaatttgacattatcttgaatgtgatttttcccattttaatttctaattgttcaatgctagtaaaagaaagtaatacttttttctgtattccatcttatataaagccatttttaaaaatttaatagtctaacagtctgtaaatttgttgttgttgtggttgttgttattgttgagacggagtcccgctctgtcgcccaggctggagtgcagtggctttgatctcagcttacaacaatctgcacctcccaagttcaagtgattctcctgcctcagcctcccaagtagctgggactacaggcacttgtcatcgcatccggctaatttttgtatttttagtagagacagggttttgccatgttggccaggctggtctcaaacttctcagctcaagtgacctgcctgactcggcctcccaaagtgctgggattacagacgtgaggtacctcacctgtcctgttgaatttattatatttttaggtatattgtcatgtcatctacaactgataaatgtgtttcttttcttccaatgtcattttcttgtattcctagtttacttaaagcttataaaaagagatttaggggccaggcccggtatacttgacttaatctgttcaggctgctaacagaataccatagatgggatggcttataaacagcagaaatttatttctcatcatcctggaggctggaaagtccaagatcaaggcatcagtaggttcagtgtctggtgggaaactgcttcatacactgctgtctttttgtttgcttttctctgtgtcctgacaaaaaagggaaagagatttccctgggacctctttcataagggcactaatccctttcatgaggacctcaccctcatgatgtaaccacctttcaaagctctacctctaaatatcatcacattagggatcaggtttcaacatacggattttggaggatacaaatattaactctttaatagcaatatctaattctgagtttcaatttcaaataggatctaagtagaagcttggttgtaaaatctcagataaaagctgcaggtgaccagatactgaggctcagcatatgctaaagttgcctaaatgccttcggcagaaatcaggattggtcttggagactggagcagggctgagacttgtaaggaggccatgaaggctgggaatcctgcaggacttgagaacaaggagtgagctgcatgcaaaggagtcctgtgtgtttaaagcatcactgaagtgagagtaccaagatggttaaaaaactctcatgacagcttgtggttgcctatgtgtaattccacatttagaaatcgtgagaaggtctgtatgtcatacaattttattgttatccataaaatagttcatgatatttacaaccaataaaatttaaaatgttttaaacaccttacatctaaatagaatcacaaacatgaaaaaaacacagaccacatgttgaaggctgttaatttggagattgctcaccctgagtgttaaccttaaagctcgtagggggagtgattattacaatctaagattactcaactgaaacttttcttctatgtcaagaagccactctgcttgcttggtactggctgcctagaatgtgtttcagaaggattctgaggtcaagaccatgtgcacagagaaagggacgtgataaatcagtggtggacaacagataagaggatggaggcatttgtgccaaactgagacaacttcctcatcctcacagcagcaggctctgcaggttcctcccagatcagaaatagcaacaccttttcaatgcctcattctcgccagtttttgagataggaatagcactgggtggtcgcaggaggatggaaaaacccaaacaacagcaaaaacaggaactaggcaaagaaatcacaggataacagaaaacccaaaataagggagaaaatggccaaaacgccagtcagggtgacatgttcatgactcttccagacaaacccaaacaagggagaaaggggatgataaccaggcagctccctgcaatcccctccttttccagaatacctaatgattattccacccattagttaaacacccataaattagaaacccaaactccattgtgcacaagtcattctcacgagcacacacacacttcttctgtaagggtgtgctttcacttagcaatggaggcttcttgccctgcacttcattctgactcgtccctgaattctttctcacatcagctaggggtggggtctcactggcatcaggagacccacctgagccctccaacaatagttttgttaatatccatctatcacattgcaccggagattacacatgtactagattgtcagccatttgaaggcaaagaacatattttaattatctctgtattccatcagctatttcggtaactggcatttaataaatacttgttggtcaaattaatatctttgatgagaaaaaaaatagataagattcctaaaaaattctccttgccattctgagtatctagcccatttctgttcctagttcccaaagaaacacatctacatattttgatttgggtaaccactaccacaataaagagacataataagtacatcaatgcaaagattttccccacactaccccgtttagttacgcccacattccgccccactccaccacccctaactcctggcaaccatgaatctgttttctatgtctatggttttgtcatttccataatgatatataaatacaatcacacagtacgtgatctgtagagactggctttattcagtcagcgtaatgcccttgagatccatccaacttgattcatgcatcaacaggtcattctttttattcctgggtagttattatgtggtatggatacaccagtttgtttaacaatttaccttacatttgtttgtttgtttagagatgaggtctcccccaggctggtcttgaactactgggctcaagctatcctctcgccttaccctcccacagtgctgggattataggattgagccatcacatccggtcccatgtacctaatgagggatattttggtggattctagtttttggctattaccagcaaagccactatcaataattgcatacaggtttttgtgtgaacacacattttcatttctctgggatagatacacagccgtggaattgctgggtcatgaggtagtgtatgtctagtttaaaaataataataataccaatactaccatgttattttctagtggttagtaccatttttcactcccaccagccatgtgtgagagaggaagtttttatacacctttgccaggatttgataatttcactatttttttaaattttaggcattctaatagatgtgtagtaatatccttgatagctagtaatgctgaacaccatgtgcttatttgcaatctctgtatatctttgatgaaatgtctcaagatctttgacccgttttctaatcagattgttttttactgttcagttttgaggtttatttataaattctagttatgaatcctttattttatatgtggtgtgaaatactttctcccaccctgtaggttgttcctcatcctcttaacagggtcttttgcagagctaaggtttttaactttaataaagtccaacttattgatttttcttttatgatttatgccttcagtatcatgtccaagaactcttcacaagcattagatcccaaagatattctcttatgttaacttgtcagttttacacctttacattttatctatatttgattcatagattttacattaaatccataattcattttagcttatttttgtttaaggaatgaagttgaaattgaggttcattttttttttgcctatggataaccagttacaccagcagcatttattgaaaagtgttctttccttcactgaatggcttttgcacctctcataaattggatgggtgtatctctattgagaatgatctattgatcattatgtctatccctctgccaacaccacacacagtcttgttgtcaaatttatgtatgtacaggtattcatagtcttgatttgttaactctgttgatgtctgcaaagttgatagtgctatctcctgtctcattcctgatattagtaagttgtgtcttctctttgtcatgatagacttttcccagtattattgatctttgcaaaggaccaacttttttttccattgcctttctccattaattttctgttttcaattttaattttattaattttctatttaacatttatagcttcatgccttctccttactttgggtttgtactcttctttttctaggtttttgagatgggagcttagattattgatttgagatttttctggttttctaatgtaagtgttaatgctatgaagttatttcctagtattgctttagttgtgtcccacagagttttatatgtgtattttcattttaattcagtttaatatatttgttaaatttcccttgaaactttctctttgacctatgaattatttacaaatgtcttgttcagtttccaagtgtttggagatttttcctattatatttccaatattgatttctagtttgaaacctttgtaagtcagagaatatactctgaataatttccatttttaaaaatttattgaagcttattttatccccagcgtatggtctatactggtaaatagcccatgggcagttgaaaaaaggatgggtattttgctcttattgtgtggaataatttgtaaaagtccactaaattctgttggatgataatgttactaagttctcctgtatccttgctgattttctatcaagtgttctatcaattatttgcactttcaattgtttacatagtatatattaatattttcccatttatattagtcagagttctccagagaaacacaactaacaggtggtatatctatatatctaggagatagatctatttagatatagatatagatgatatagatatagatatagatatagaaagatatgcaataatggaggctaacaagttctacattgtcctgaaagatcttcagctagcaagctgaagacccaggagagctgatatatacttccagtccaagtctacaggcctgaaaaccaggagagctaagggtgtaagctccagtctgaaagccattaggcttgagacccaatgtttcaacctaaagataaaggccagaaggaccaatgtcccagctcagtcagggagaaggcgttccctcttacacagcctttttgttctattggggtctttaaatgattggataaggcccacccacattagggaaggtagagtaaatctattttactcagtctactgattcaaaggtgaatctcatccagaaacaccctcacagacacacccagaatattgattggccaaatatccagacaccatctgacccagtcaagctgacctataaaatgaaatgtcataccatccttttacgttcaacctccttttattattatatttgaaattagtttcttgtggacagttccttgcaaatattgatatgttaaggctgaaatatgttatttcattttctgtttcctgcttatttttcagtttatatcttcttcttgctatcctgtgtattatttgaagattttaaagaattctgacttgatttctctatgtgtttggggcgtattgctttgtatagctttttaagtggttactctaggtattccattatatgtatacaatacaatgggtgttgacaatttagcagttcagatgaaggcagaaactttatctactgttacattttttactctcttccatttataatataattttcttaaatattccctatgcatacattgagaaccacttagatggtgttgtatttttgcttcaactgtcaaacataatttagaaaagtcaagagaaggaaaacctattgcatgtacctctatttttgcttgccatgttctttctttatacccaatgttccaagattctttttttaaatgtaatttcttttctatttcgagaatctctttaaccatttctttaaggcatgtctgctggtaacatacctctcttagtttttctttatctgagtatattagtttcctgttgttactgtaagaaattaccacaaactaagtagcttaaaacaagacaaatgtattatctcaccgttatataggtcagaagtccaaaatgagtctcactggactaaagttaaggtgtcagcagttctagttccttctggaggttctagggaggatctgtttctttccttttctacattctttgtcttgtggccctttcttcttcaaagccaacaggtagcatcttcaaatctgtcacaaactctctctctccactctctacctcccctctgtttctatcatcattttcttttctctgacactgaccttcctgccttcctcttataatgaccctgtgattacattggacccacccagatagtccagaataacttctccacctcaagatcttgaaccaaatcacatctgaaaagtccttttgccatggaaggtgatatgttctcaaattctatggattagggcatgagcatttggaggagagtaactattcagcctgactcactaagaaggtcttgattttcccttcattcctggaagatattttctctgaatatagaattctgggttaattgttcttttctttaggcacttgaaaaatgtgccactttgtcttcagcctccactgtctctgatgaaaactccactatcacttgaattgttacaagtaatctctcgcttgctgctttcaaggcttttttcttggtctttggtttttagaagtttggttatgaagtgtcttgacacagaaatatttgagtttatcctattgtggtttccgcagctccttgaatctacaggtttatgtctcttgccaaatttgggatattgtcagcttctgtgatattttgatggaatagagcagatattatctaaaagttgtctcattagattggtgtcttagtctgtcctgctataacaaaatatcacaggccaggtaatttataaacaatagatatttatttattttggttatggaagctgggaagtccaagattaaggcattggtatttagtgtttggtaacggctgctctctgcttccaagatagcatcttgtagctgcattctctggaggagagaaacactgtgtcttcacatgctggaagggacagaaagggcaagagagcacttctttcaacctacagccctttgataagggtgctaatctcattcacgagggaaaagccttcatgacttagtcacctcccaaagaccatacctcttaatattgttgaactgaaaattaagttgcagtataaattttgcaggagatgccatcatttaaaccatagcaagtacacttttcttggtcatttgggaaacagattcacctttgggcttttttagtctaaatcctttggcatttccacattacgtttctcgaatacccaatctagaatacctgaggcaacacaaaaacccaggtcccatgatccctagccagtcctttttgtttctcatcttttaaagtcttctgatatttactttttgtgtaatgcccacagtttttagctgtagttagcaagaggaatagagaaaagtatatctattgcatcttcctggaggcaggagccaagacggcttgttttttacaatttgttgttgctgttgttgttgttgtttttgagacgaagtctcactctgttgcccaggctgaagtgtaatggtgcgatctcggttcactgtaacctccgactcccgagttcaagtgattctcctgcctcagcctcctgagtagctgggattacaggcacgtgccaccacgcccagctaatttttgttttttggagagatgcggtttcaccatgttgccaggttggtctcaaactcctgacctcaagtgatccacccacctcagcctcccaaagtgctgggattacaggcgtgagccaccgtgcccggcccgttttttacaatttttaaatggctttactcttacactctattgtcttaattgcctcatgcaaaatttcattccttaataaatataaacataattagtccacatcttcaacagcatatcatcttttgtgcgtttcttctcttttcacacattttaccatcaataagaaatgcttgagaatgtataaaagtatgtgtaacttgggtacccactgtggctttttcaaaatagttaaacagaaaattatttaaatgtctatcaacacagaatatgtattttactttcatacaagaggatactatgcagccacttaaaaaattagatacacatgtaaaaaactctagggtatattgctatagagtaacaataattaaattgcatatcatttttttaaattgtgattttcttaaattttgaattttaagttatgctgagccaaataaataacaaatgtttcagttttcaatagctatggtctggaagctatttcatatgacttatttcatttgatattcacaatgtatgtactcagggcaagtattactcccaattaacttcggcccagcacagtttctggataccactcaatttcctataaatttcttgaggtccagatgcaaaggtccaatcatgtttttctctttagtaccatctctccaaaaacatttgaaaaggtaagataaataaatgtgacattgtacagaaaacccaaacttgcaaagctctgctcccaaattcctcagaattcattttcaacaaacaagtgtttctccttctccatctactctacatacatatcagaaaaacagccttacagtttttaattacaaagaggtctatgacatatgactcttctacttcaaaggactctaataatagcacatgcataggaatatagcactctgagcagagtaaacaaacacttctctctcctgagagagatcagatgaacctgctgatgtcagatctctcccagaattccattgttgtctctccaaacagcctttaaggaaaatcaccaaatctgggatggggagcttttctcaaacgtgtttcctttcaaaacatagggaaacaggatttttggccacaggaggtcaaggtcagcaatctaacagaattggtccttttgaacttcctttctaagaaacacattatgttatctgatgaaggctgttacattgaaaatcttgttgatactcaggccatgatcaattttgttcatcacccaatgatctcaggaagcacacgtataaaatccacaaatcagtctgatctcaaaatgcatattttcaagataatgtgagcagtgtaaattctgtgaggactgagacagtgttttatcattttttatgcaccatacaaagaactgtatagtgcttgcacattagtaaataataattatttatttaattagtagttatattttaacagtaaaagaaaatgaaatttatgaaaaaacacagactcaagaatgcaaagatatacacatataacactcaaatcgagctcctctcagagactgtattgctttcagagacctggatttatacggagttatttgtaaatatgggcattcttaccaaataaaataaagtccatttttaactagtattgttttagcaccactgtcttagatttgtacaatatttttttgaacatttaaaaaattttccagcaaattttgacactttagtattacagaaatttctgtggagaaattgagatttatctaaaggcacccaataactaaacaacaaagcttgactcttctctaaccttttctcctatagatgggacagcctttcatcgtcgcaaaggaaggcagttcctgatgctcccctctcagtaagaagggctcagtttagctctgtgcacacaggtttactccctaatcactttcagtaatcatctgattggctttctcccaatacttacatgtcactgagctttggtttagtttctaagttagaaataccaggaaagcaccaacatggcacatgtatacatatgtaacaaacctgcacgttgtgcacatgtaccctagaacttaaagtataataataataataataataaacagaaaatccaacacagaagagggaaaagaaaaagaaaaaaagaatggcattagagcccttacaagtgtccgaagcaaccagagtgttccttttccacgcgaggacataacaagaaggtcccactcaggagccataagcaagccctcaccagacactcaatctgccttcactgtggacttcaaggtctgtgggaactgtgagaaataaatttctgttgtatataaaaaaaaaaaaaaagcaaagaaatactagggaagaaggaaacacaccaagaaggggaggtagatattttgtcacaccatcagcttttcctcccatctgacggccacgtcttcagtgaacactgcccacttccacttcctgcccagaaggagaatgttcaaggaaaatgtctgaggcacatttcctcttgctttcaactgaatcatgagagcccataaagatttctcactcttcaccagaaagtgagaattcctggatattgttgcagttttaaattaggaaataagaatcattaaaagacagagtagtttgtttacatgatgtccccccatatcgttattcatcacttggcctaaaacctaagttggtctatttctgcttactatgagaaagcccctggtttctctttttaaagactcatttcactaagaatccatcggggagatgtccatttgttttttagtttttcttttttaaaaaagagtgcaacatctgccaccaataaacctctggaaactgtaatgatgaaaagtaacaattgactagtatgattccccgaaataaattttctttttaatgcctgaaacacccagaagacccaatgctgaaccatagtttgtcttgtggcatattaattatgaactagttaaaattgtttttgagaaaggagcaaaatgtctagccagttatcataccaagtggacacaaatgctaaacatggttagcatcatggcaggaaaacagacgtttgtctggtgatgaacaccaagaagccagtgtggcagtcacatgcaccctaccctacaatattggaggcaaacatttttggcccaatatacaaggctgtccccaagccaagcacagcgggcagcttcgcaggaaggtctgctctctttaagggctctcacttcctcttttgccccagatactcattttccacaaacaacagcaggagtttgagtctcaaggaaatgtagactcaccttaaatgtactgctactctggattatgtgtaatctttgttagtagccataaaaataatacaagtctacaccttcccaaacagtaacttgcacagagtgagaactcgattaaagcacatccaactgaataaacagagttctattgggcagtattctaccagctttttgttagaatttctgataatcctatgtctgaaaagtggtcttgacattttgctttgagaaacacctgtattctcttaaaacagaagttattttttacttcaaaagaaaaacttgaattctggaactgtacaactttaagggactaaaagtttcatgttgtccagtaattcctaaaatgttgtcagagaccactgcctagccaactgataatcatcttgggggcttgttaaaaatgtagattctgtccctgccaccgggagaagctaagtgcaggtattctgacccacagctcagacactcgaaagtgaatgccttcatcacacctgtaatcccagcactttgggaggttgaggtgggtggatcacttgaggtcaggagttcaaggccagcctgacctacatggtgaaaacccatttctactaaaaatacaaaaaaattagccaggcatggtggtgcacgcctgtaatcttagctacttgggaggctgaggcaggagaaatgcttgaacctgggaggtggaggttgcagtgagcaaagatcgtgccattgcactctagcctggacaacaagaacaaaactccatctcaaaaaaataaaaaaaataaaaacagaaacaaaacaaaacaaaacaaaaaacagaaagaaagcaagaaagaaagtaagtggatgctttcagaatgactccagcctcagtcttctgctactgccctgcatgatagacccagagcaggccctgcctcactaggccccgtcaacccctggaactgtgacaggcgataatggtaataataatgaatgattattttatgccactcatatgcaggcacacacacacacacacacacacacacacacacacacacacacacacatatatattccaggttttattcagcagctcaggtcctggggtagagacagtgtggggtatgactcaagcatctgtatttttcacaacctctttgggtactttgaatgagcagccacatctggaatcagctaataatctcttaatcccttgtttttaaaatgagattagatgctttttctctttctggcacagccagtgaatggcagagcatggttaaatcccagcagacatgactcccggcctggctcctgttacccagaagcatcacatctgagagcaggaatgaacctcagaagtgctgacctccgcgctcaccctcttatcccatccactctgcctctgtcaggcctcaggcttggggggctcagacttggtggaccactgctcaggtgtgagttgaggattcaaaagcagaaaggcaggtgacttgaacaatgaacctattttggaaattttctgcaaagctcactcatcatcaataaaatttggcaagcagcagctttcagaattttttttaatctaattgtctcctataaccaaacagcccatttaaagaaatacccactgtcagctaagcaaatataaggatgttcacctagaagaggcctgcctcccggaaagaacaggcatggagggcccctctctccacctgcttccccctggacagcagaggcagggcggccaagcttctggtcaccaacagcagaactttctatttgaagtcccggttttggaaagaaggtagttactgtgtccatttctagtaagcgcaaactagttaagagggaaatagcaattctacttgaaggcaacagagtgctaaaatagtgaagaatttccaagacagaaaccaagaaagttggaggaccagggaattgagtcctgcgctgggacatttctgccctagggaatgttgccaattccagaaagaaagactgagaagctgaagagctgagctgcagttttgaaggactcatgggtctagagggaaaagttttagaatccaggtcccatcaggccttagtgaatgcccctcactcctactgtgcactgagtttgaatttaaaggaatcacctctggaatgagggtaaactggaaggcctatagacactgaaggaacttaggttcaaattatctcaatgcctgaagttggaccagcctgggcaacatacagaggatcctgtctcaagaaaaaaaaaaaaaagtaacaaaaactactgaaaacattctctagattggagactttaaaatcactatgctaattatttgaaaataagaaacaagatagaaaatgttatcagataattagaaactgttttaaaagtatcaagcaaaaattctaggacttaaaaatgcagtaactgaaactaagaactcatcatatggattaacagtagattgaaacaggctgaaaataaaaataacaatttcacacaatccttttgagataatagaaaaagaagctaacaaccttgattctaaatctgacaaggacactataaaaaaggaaagtgcagaccaatctactcctgaacacagatgaaaaatcctaagcaagatattagcaaacagaatctatcaatatatatatatatatatatatcataaaccaattggtgtttttttttaactttatcaattttggtttaatttaacatggcttttacagcattctaggactatattggaacagtttggtaaaacaaacaaacaaacaaacaaaaaccttactctgaattctttgctaggactcttacccttacaggaagggctagtacatagttctgacatttcaggacagcacggcattaaaatacacccaacttttctctcaactttcaatgctatccctcttattttaatatcttactaagtttgtaactaataaaaatatattttagtattcctagttcctgatggagaacttttaagacttttttttttaagtatgttacttttctttctttctttctttctttttgagacagagtctcactcttgttgtccaggctggagtgcaatggtgcaatctcagctcactgcaacctccacctcccgggttcaagcaattctcctgcctcagcctcccaagtagctgggattacaggcacctgccaccatgcctggctaatttttgtatttttagtagagacagggtttcaccatgttggcaaggctggtctcgaactcctgaccttaggtgatccgcccgccttagcctccaaaaatgctgggattacattttctttccttttttttttttttcaagctatgtatatgcttttcttttctttttttctttttttcttttctttttctttgattttattttactttaagttccgggacacatgtgcaggacgtgtaggtttgttacataggtctacgtgtgtcatggtggtttgctgcacctattgacctgtcctctaagttccctcccctcgcccccaaaccccccacggtcccagtgtgcgttgttcccctccctgtgtccatgtggtctcattgttcagctcccacttacgagtgagaacatgtggtgtttggttttctgttcccatgttagtttgctgaggatgatggtttccagcagcatccaagtccctgcaaaggacatgactcattcccttttatggctgcatagtactccgtggtgtatatgtactacattttctttatccagtctatcattgatgggcatttgggttgggtccatgactttactattgtaaatagtgctgcaataaacatacatgtgcatgtgtcttcatagtagaatgatttatattcctttgggtatatatccagtaatgggattgctgggtcaagtgatatttctggttctagatccttgaggaatcgccatgctgtcttccacaatggttgaactaatttacattcacaccaactgtgtaaacgtgttcctgtttctccacgacctcacctgcatctgttgtttcttggctttttaataatcaccgttctgactgacgtgagatggtatctcatcgtggacaaaccaattagatttatcccaggaatgcaaagttaatttaaatcaatcagtataataactacatttacaggacaaaaggtgaaaaaaatgcaaatcacttcaaaatattcagaaaaagatcccaattaaatctaatgtcaatctaatcaacaaattacataatttaaaatttaaaatatctaatatttacaaatttacatttataattatttaaaatcttaaacaattttaaaattaaaataaaaactatagaatgaaactaacttaatatgagaaaggtatttatataaacaacaattctacagaaagcaccagacttctaggtcaaatgctgaagattttccctttgagattgggaacaagacactgttatcaacaatgtgaaagaaataaaaggcatgaggattagagaagaaaatataaaactatcattactcacagatgacatgactgtggaacaaaaatatccaaaagaaaattcaaacaatgaaaagacaaactgcacacacaaaacactggatgtctgctaagataactgttaaatttcttgtgtctatgcaaatttatacacacatatatgcatatacatatacatacacatacacagatgatttttaattaacaatacaaacaattgtatataataagtataaaatactttacttttttcatttaatatagaattttccatatcagcacattacttgtaatagttgtacaataatctattatagtgtattctaatgatttctatataaattatttaaaggtctttttgctattgcaaacaaggcaacaaaactcttataagaatgtactagtggctgagcatggtggttcatgccagtacgttaggaggctgaggcaggaggatcacttgagcccgagattttgaggttgcagtgagttacgatcatgacattgcactccagcctgggcacacagtgagaccctgtctctggggagaaaaaaagaatgtactagtatggctataagtgacaagaaagaggactcagggaatccaacagcttctctaagttctccatcctgttccatgtccttgattccacagagaccaaggcagcaaaaattcacaggacagaggacaagagaaaagagagttgccagtgacatggtccatctggatttttcagtagaatgcagatcaacggattcatctaagaaaaatagttgaggttatggaaaaactcacccaaaagtatctgaaggaacagcatgctcacataggatgaggaacagtgtgtgttcccactagccagagtaaaaacaaaatcataattcacagagtattgagtagaggtcttacctcggttatacaagggtaaactgaatattgcactggactgacctaacacatcataaaagtaagacccaaaaggatcaaactgtttttaaggaacataaccacatcacagaacaaagttcaagctgtatagaaatacgaaaacacccagcaccaacaaggcaaaatttacaagtctggcatccaataaaagattaccaggcattcaaagaggcaagaaaatatgacccaaatgaagacatttattaatcaatcaaaaccaatccagaactgataaaattagaattaacaaagtagatgttaaagccattattagaattgttttccatattgtttaacctctgaagttaagtagaaatattgaggaaatatatatacattatttgtttataaatatatatatatattagatattacagatatctaattatatattagaaatagtgtctcactctgtcacccaggctggagtgcactggcctgatcatagctcactgttacctcaaactcctgggctcaagtgactcttctctgttagcctccagagtagctaatactacaggcacataccactatgcccacctagtttttaaaaatttttgtagagacagggtcttgctatgtttttcaggctgatcttgaactcctgacctcaaacaatcctcccacttcagcctcacaaaatgctgaaattacaggcatgagccactgtgcctggcccaagaatattacaaagatgaaaattaaaattaaacttctttttttttttgagacggagtttcactcttgtcgtccaaggctggagtgcaatggtgagatctcggctcactgcaacctctgcctctcgggttcaagtgattctcctgcctcagcctcctgtgtagctgggattacaggtgcccgccaccacgcccgaccaatttttgtatttttagtagagacatggttttgccatgttggcccggctggtatcaaactcctggcctcaggtgatccacctgcctcggcctcccaaagtgctgggattataggcgtgagccaccgtggcttaacctaaacttctagatatgaaaactataatgtctgaggtgaaaaatagactggaggaagaaaaaggcagattggacattgtagaagaaaggcgagatcagtgaaattaaaagtgtggcaatgaaaactacccaaaataaaacacgcagaaaataaaattccaaaaaatgaaaaagcataagtgatatgtgggatagtttcagtggcctaatacatgagtaactggagtccctgaagaagaaagactgaaaaatatatttttagaaataatggctgaaaaatttccaaacttagtgaagctataaacctacagatctaagctcaatgaacaccaagaaaaataaacatgaaaataactaccccaaattacagcataagttactaaaaaacaatgacaaagagaaaaatctgacagccagaaaatatacccgtattacatccagagaaacaaagataaggctgacatcagatttttcaccaaagattgcaggcaagcaagagacattggagcagcatcattgaagtactggggggcaggtgactgtcactcagtattcagtacccagcaaaaaatattttttataaatgaaggtgaagtggagacatttttagacatataaaagctagaataatttaccaccaccagaagaaatgtctgcactacaagaaatgccaaataacatccttgggcagaagaaaaatgataccagatggaaatctggatctacacaaaggaatgaagaccaccaaaaatatatctacatgagtaaatatataagaaattttttcttattacttaagtctccttaaaagatatgtgcttgtttaaacagaaataacaatgtattattgggtttataacacataaaagtaaagtacatgacaacaacaccataaagaccaagcgcagagaaatgaaagtatactatacatgaagtgatatatcacttgaaggtagtttgtgataattaaagatgtataccataaacaataaagcaaccattacatactagaacaatgagttataactaagaacccacaaggagaaaaaactgaatcatagaaacaaattaactaaaacaaaaaaaacaggaaaaaaggagaaagaaaaagaataataaataaagcaaactgaaaacaaataagaagatgttacagccatacctaaccttaccataatcccattaaatgtaaattgaataaatacactaattaaaacacagaggttgtcagattgaatatgaaagccaggcccaactatatgctgcctatagaaaacacactttaaatataaagtgtatatatatacactttatatatatataaatatatatacaaatatatatttatatatacataaatatatatattttatatatacaaattatatatatttatatatacaaatatatatattttatatatacaatatatatttttatatatacaaatatatatattttatatatatataatatatatatttatatatacacatatatataaatatatgtgtatatatatttatatataaagtgtatataaaaatatatatacactttataagtttataaatatatataaagtgtatataaaaatatatatacactttatgtttataaatatatataaagtgtatatatatttataaatatataaatataaagtgagtttatatatacactttaaatacaaacaggttaaaaaatgaaaagatggaaatgtagatatcatgctaacaataataaaaataaatctgaaaaggcttatatgaatatcagaaaaagtagatttcagaggaaaaaatattatgaggactgaagaatgtcatttcataataataaagaatttattcatcaagggtacataaaaattctaaatgaatatgcatgtattaacagattgcttcaaaatagatgaatcaaaaatagatgatatatacaggctgggcaaggtggcttacacctgtaatcccagtactttgggaggccaaggtgggcagattccttgagtccaggaatttgagaccagcctaggcaacatggcgaaagcttgtctctacaaaaagttagccaagcatggtggtgcacacctgaagtcccaggtacataggaggctgaggcaggagaactgcttgagcccaggaggcagaggttgcagtgagccaagatcacgccactgcactctagcctgggtgacagagtgagaccccatctcaaaacaaacaaacaaacaaatgcaaccaaactgatagacagtagtccctctttatccatggagaacacattctaagaaccctagcggatgcctaaaaccacagatagtaccaaactatatgtagtatgatttttcctgtgtatatatacctacgataaagtttaatttgtaaatgaagcacagtaagagattaacaataactaataataaaatagaacaattataacaacattctgtaataagagttttgtgagtataccctctctctctctctctctctctgtctttctcaatatcttattgtactatatagtggataaatgaaaccacagaaagtaaaaccatggattagcaggcactacagtaacatcaaggagaaatagataaattcccagttgtagtcagagatttgaatgcccctctgtcaatgacagaaagacctttggaatattctccaaatatttggaaattatataatacatttctaaatatcccatgaaccaaaaaaatcaaaacaaaactttatgagtattttaactgaataaaaataacaatatattatatcataatttgtcaaaagaccattaaatcagtacttagaagaaaatttatggtactaaatgctcaaaacaaaaatttatgagtattttaactgaataaaaatatatcccatcagaatttgtcaaaagaccattaaatcagtacttagaagaaaatttatagcacttaatgcttatattagaaaagaagatagttcccaactcaattttagcctttaccttaagaaactagaaagagaagagaaaatgaaacctaaagtaagctcacgaaaataaataacaaaaaataagtaaaaagctgtaaaatagaaaaatagaaaaacagtagaaaaaaacaatgaaatcaaaagctggttctttaagatcaatataattgataaacatctagccaaactgattagaaagaaaaagaagacacaaattaccaataccagaaatgagaggggtgatactacaggttctactaaaaagataataaaacattagaaactactttatgctgatacatttgacaatttagataaaattgataaatttcttgaaagacacaaattagcaaagctcactcaagaagaaataaattgcctgcaaagccctaaatgtttaatagaaattgaaattatacttttaaaaccttcccacaaaaaaactacagaaccaaatagcttcactggtgaattctaccaaaaaatttaaggaggaattatacaaattctacacaaattcctccaaaaatgaaagaagagtgaatttttcactgcatattatatgaagctagtattgccctaataccaaaatcagaaaaagattttacacaaaagtaaaactacagaccaatatcccctatgaacatgaatgcaaatattccaaacaaaattttagcaaattgaattcaacaacatattaaatgacatcatgaccaagtatggtttagcctagttagacaaggctggcttaacatttgaaaatcaactaatgttgatttgcaaataaattaattcataataatatcaaacttttaaaaactggccatctcaacagatactgaaaatttaaaactttggcaaaaattatcatccattcctgatataaattatctgcaaactggggttacaagggaacatttttaaccttttataaaggacatttacaaaaagatctgctactacccatcaccacatggaaaattctccaagaaagaccatatgataaggcacaaaacaaatgtcagtaaatttaagaaaaccgaaattatattgagtattctctcagaccacagtggaataaaactggaaattaactccaaaaggagccgtcaaaaccatgcaaatacatgcaaattaaataacctgctcctgaattattgttgggtcaacaatgaaatcaaggtgaaaatttaaaaattatttggactgactgataatagcgacacaacctatcaaaacctctgggattcagcaaaagcggtgctaagaggaaagttcatagcattaaatacctatgtcaaaaaatctgaaagagcacaaataaacaatctaaggtcacacctcacagaactgaacaaacaagaacaaaccaaacccaaacccagaagaagaaaaataaataaaaaagatcagagcagaattaagtgaaactgaaaccaaaaaaattacaaaagataaatgaaacaaaaggttggttctttgaaagataaataaaattgatagaacattagcgagattaaccaagaaaatagacaattttcgagaaaagaagagagaagatccaaataagctcaattagaaatgaaatgagaactattactattgataacacagaagtacaaaagtttattcaaggctactacgaacacctttccccacacaaactagaaaacgtagaggagatggataaattcctggaaatatacaaccctcctagattaaaccaggaagatatagaaactctaaacagaccgataagaagcaataagattgaaatggtaatttaaaaattgccaacaaaaaaagagtccaggaccagacgaattcatagctgaattctatcagacattcaaagaagaattgttacaaatcctattgacactattccatggaatgaagagggactcctccctaaatcattctatgaagccaatatcaccctaataccaaaaccaaggaaagacataatcaaaaaagaaaacgacagaccaatatccttgtagaatatagatgcaaaaatcctcaacaaaatacttgctaaccaaatccaacagcacatcaaaaaggtagtccgccatgatcaagtgggtttcatccgaggggtgcaggaatggtttaacatctgcaagtcaaaaaatgtgatacacaacataaacagaattaaaaacaaaaacacacagtcatctcaatagatgaagaaaaagcattcgacaaaatacagcttccctttattattaaaactctcagcaaaatcggcatacaagagacatacctcaatgtaataaaagcaatctatgacaaacccacagccaacgttatactgaaacgggaaaagttgaaagcattctccctgagaactggcataagacaaggacgcccactctcaccacttctatctaacatagtaccggaagtcccagccagagcaatgagacaaaagaaaaaaatcaagggcatccaaattggtaaagaggaagtcaaacttttgttgtttactgatgatatgatcgtatacctagaaaaccctaaagactcatccaaaaagctcccagaactggtaaatgaattcagcaaagtttcaggatataaaattaatgtacacaaatcagtagccttgctatacaccaacagcaaccaagctgagaatcaaatcaagaactcaatcccttttagaatagctgcaaaaataatttaaatacttagtaatatacctaaccaaggaggtgaaagacctctacaaggaaaactacaaaacactgctgaaagaaatcatagatgacacaaacaaatggaaacacatcccatgctcatggatgggtagaatcaatattgtgaaaatgaccatactgcgaaaagcaatctacaaattcaatgcaatctctatcaaaataccaccaacattcttcacagaattagaaaaaacaattctaaaattcatatggaaccaaaaaagaccccacatagccaaagcaagactaagcaaaaagaacaattctggagacatcacattactcgacttcaaactatactataaggccatagtcaccaaaacagcatggtactggtataaaaaataggcacctagaccaatggaacagaaaagagaacacagaaataaacccaaatacttgcaatgcaaccaaccgatcttcgacaaagcaaacagaaacataaagtgggggaaaggacaccccattcaacaaatggtgctgggataattggctaatcacatgaaggagaatgaaactggattctcatctctcatcttaaacaaaaatcaattcaagatggatcaaagacttaaatctaaggcctgaaactataaaaattctagaagataacattggaaaaaccctgtagacattggcttaggcaaggatttcatgaccaagaacccaaaagcaaatgcaataaaaacaaagataaatagttgggacttaattaaactaacgaacctttgcacggcaaaaggaacagtcagcagaataaacagacaacccacagactgggagaaaaatcttcataatttatacatctgacaaaggactaatatccagaatctgcaatgaactcaaacaaatcagtaagaaaaacaaacaaacaatcccatcaaaaagtgggctaaggacatgaatagacaattttcaaaagaagatatacaaatggccaacaagcatatgaaaaatgctcaatatcatgaatgaccagggaaacgcaaatcaaaaccacaatgcaataccaccttacccctgcaagaatggccataatcaaaaaatcaaaaaacagtagatgttggcatagatgcagctatcagggaacacttttacactgctgatgggaatgtaaactagtacagccattatggaaaacagtgtggagattccttaaaggactaaaagtagaactaccactggatccagcaatcccactattgggtatctacctagaagaaaagaagtcattgcacactcatgtttatagcagcacaatttgcaattgcaaaatcatggaaacaacctaaatacccatcaatcaacgagtggataaagaaactgtgagatatatacatatatacacatatgtacacatatgtgtatatatatacacacatacacatatgcatgtatatatatatctgtatatatacatgtatatatatacacacacatatgtgtgtatatatatacatgtatatatatacacacatatgtgtgtgtatatatacgtatatgtatacacacatatgtaagtatatatacgtatatatatacacacatatgtatgtatatatatgtatgtatatatgtatatacgtatatatacatacgtgtgtatatatacgtatatatatacacacatatgtgtgtatatatatacatgtatatatatacacacatatgtgtgtatatatatacgcatatgtgtatatatatatgatggaatactactcagccataaaaagaaatgaactaatggcatttccagtgacctggatgagactgaagattattattcttttttcttttcttttcttttttttgagacacagtctcactaggttgcccaggctggagtacagtggcacaattttgactcactgcaacctctgcctcctaggttcaagtgattctcctacctcagcttcctgagtagctgggattacaggcatgtaccaccgcacccagctaatttttttgttgttgttgttgtttgggtttgtttggttttttttgtatttttagtagagatgggatttcaccatgttggccagactggtcttgaactcctgacctcaggtgatccacccaccttgaccttccaaagtgctgggattacaggcgtgagccatcgtgcccagactggagactattattctaggtgaagcaactcaggaatggaaaaccaaacatcgtatattctcactgatatgtgggagctaagctatgaggactcaaagacataagaatgacacgatggactttggggacttggggggaaggatgagaggggggcaaaagataaaatactacaaatagggtgcagtgtatactgctctggtgatgggtgcaccaaaatctcacaaagcaccactaaagaacttactcttgtaaccgaataccacctgtaccccaataacctatggaaaaaaaatcccatgctctagtgataccgtacagtatataaccaccaccagtactcctgtcaccaaaccctacaaaatatctatacaggggcatgagatttgggccctgcataaggaaaatggcatgtcacattggcctcttgattctttcggcacctatgatgtgctaggagctatgcttttgatttgactacagaggcacaaaaaaccatgatcctagccttacaagcagtaagtgttatggtagctgtataaacacactggagcaacataaagccagggaccttgaactatgcccaagagatatatatatgtgctgaataacagagaatgaatgggacttctcgaagtctagagatagtggttggggagagtcagagacatgggcgaaacaaggagaccttaccttcctgttaagtctccgagcatcttgttttctgcctctgttgtgatttattacagtgtagtagtacctgcatgcctgcgtgtctccctgtctgaaatgtaagctcttagagggcagtgcttttattagcccagctcctaggacagtggctggcacataggagatgcaaaaaattttcaattaatgttgtggttgaaagagtaagttcaggacagcaggtaatttaccatgaataaagtaaaacatgtatatagtattatttttccagacaaggaatatctaaggaaggcagacttgggaatagaaggaagacgataattagtctggtttggcattcagaagatcaatagtatgtgggtggactgtgggtcccagaaaagagggtgagggaaagagaatttggagtcttcatctgaggttgcaccatactcaacctcctccaaacaacctgaataaaaaccagctgaaagccaggagtgggggctcacacctataataccagcactttgtcaggccaaggagggaggctcactggagcccaggagtttgagaccagcctgggcaacatggtgaaatcccatctcttcaaataatataaaaagttagctgggcatggtggcacatctgtggtcctagctactcaggaggctgagcttgggaggttgaaggtgcagtgagccttgatggtgccactgcgctccagcctgggtgacagagtgagatcttgtctcaataaaataaataaaatagtaaaatgaaataaaactaaactgaaataaaatagtaaaaacagcaactaaccgaacccttctgttgatgcattcgtgtattaatttaacacattgaggacctactatagctgtacaatatcagaaaataaacaaataatacacaatatatcagctagtgtataagactataaagacttgtgaaaggagactgcaagcatagtgcagcagttctgctgagctcaggaaacagaggttggagtttgggagactgaggcaactagaatttgtgagcagagtggcagaaaggatgatgtgagagaaagagctccagaaattgcatgcagggtcccttcgagtctgtggctgcatattagcctgcacctgtgtaggaataaaatccatgagaccagtcaaagaacaatttgatgtgcaatttgaataacaaaaactaccaggcagctgtcaggggaactgtttccagcattccaagagccatgcaggctctcactgatcataagcacattcaacagagacaacgtttccagtgcatttgccttctacacatgctcatttgcttttcttgcaacaactcacagcttgcacctctgcactcacctgtgcttctgtgaaaccttgaccctctcacagggacgggcccctcttggtttgacccagtttgtaccctggctgccacttccatccttttaattgttcccagccttctgcaatcttctcgaacccaccgttcctttccaactcacatcagttctctggaatttaggataagttgacaagtaggagtttctggggtgtttcagaagcaatgatgaggagagaaaggaaatgagagtctgaagacagaaagtcaaggcaagttttttctttatagctggccatgaagaggacagaaattgttcattcacttaaaaggaagaaggtcatcctaagaaatgggtttgctttaggtcagagaagacagcagagtggaaaggattagagaaaccattgctgaggcagaattgctagaggagcgctcatttttctcatctataaactggcatggccttactttacagacttgtctgtggatggaatgttactacaggaaagcttcagatatattaatgttcaagaatgtttacttttgccctctcttcctcttgaaatagctattgacattcaaatatattaaggagtaagatagagggggtattctgaataaatttttagccacagaggataaaatatatagtttttttataaagttaattttttttgttgttttagacataagatctcgatatgctgcccaggctggactcaaactcctgggctcaagcaatcctctcaccttggcctcctaaatagctgggactataggcgcacactactgtgcccagtttaaaatcaattattatgccatgaccatgacagactctctgagcaggctccctggggttgcaagaagacccaaagcaagaagaatagagttttacagaggattgttcatcagagctcaggtgcatgcctcctgcacaagactgcaccaggtgatgtcaagtttggcccagtacagcactttgctaaagagttatctaagtcatgagccctctctgcactgccacatctctgagaacccctcctagttcagttaatctctctagcaacccacatttcaaaacaaacaagaaaagcattatcaagagaaaggaaccagttgctacagccctcagaccagatgcaaggaggaccgcccctcaagggtctcatttgatgaccttagatttttttctattgttcaggtgtggggcatcttgtaatctatagaaactaccgattagcactgtcaaattcccaaagagaactgttgacttagcatcaagacttctgcttagttctttatcatcttgaagccaaagactcctttgaaaatctaaggaaatatttgaatcttcttccatagaaaaccttacatacacaaaaacctggcatacaacttgaaagatttcagttgttaaaagcacctgaatgttcagcaaagcagagattatataaatcctaaaatccaagctctataaatttatacctaagattttttaagtagacaataaaatgctttcagataagaaagaataaacactatcagagagaacaaaaggaaagggaatacaaactaagctatgtgctcactttagtttgcccggttccatttaagcatctctgtttctccgccttcctaatcaaaggcttacttcgtgagtatctgaatgcagctgcaaaagatgtcctaaaatccgtgggaaataatgaagacaaggctttccttgttctatcctgctacacagaaacagagcagtcttatgatgtatagggctttctccagagacttctcctacctggacaggatttttaatgatgcagccttcaatactggcctctcttaatgttagcctggttagaagagagaaaggcagataaaattattcatagcttgacaagtggaatatagcttaatgttaagacatcattttaattaggttcaatcaatagaagaaaaacagtttagcatctttccccaatggtttgttttgcacatcagggtctcttatcggccaaccatttctaaagagttccaaatatggtagctttgacaactttacaaagaaaacatcttctcctccacatataaatcattaaaattctttcagctcagtattctttcttgtctagcactattcatgtcagagcacttgacaatgaagtctcttaaaaccaggctaccaggggatcatgctgccattttatattttgttgattcttccctgatctaacacagtgttccccaaacatacttgacttgtactaggctggctacaataaaattccctatggccaggcgcagtggctcacaccaataatctcagcactttgggaggccaaggctggtggatcacttgaggtcaggagtttgaggccagcctggccaacatggtgaaaccccgtgtctaataaaaatacaaaaattacccgggtgtggtagcgcatgcctgtaattccagctgttcgggaggctgaggcaggataatcacctgaacctgggagctggaggttgcagtgagccaagcttgcgccagtgaggctctgtctcaaaaaaaaaagaaaaaaccctggaagcttatcaccaaccccagagattctggctcaggaggcccagtgtatttttgttaagtacccccagggtgatttacccagagtctggaaccactgctgtagcacctccttccttcttcctgttcagaactaacaccatgaagcttgagcttcacaaatactgtcattgtcatctcagcatatcacatcccagacagaacactcactacaccctgatccaacctgagatgttgggagaatatgtatatttcctccctcctttccaccaatgctcctaaactctactagttatgtcctttgtaagatcatcctgtgatggtcattacagcattttattatatatgatttcaggatacaagagctgttaggcataatagaaataagttaaaatttggaccacttaaacaaatacacgtcctccaccgcaccctttcccaccctgccccatttcccagtgtttgttcttcctaacatctcagcaggagcctctgagtcaatggagggtccaattcttggtttctccatctctcacagtactctttcaagtttaaaacacagagaacagtcttgaaagccatggattcagagaaacttaagaaagaaaatgttttgtaactgttgctgtttgctgtgtgtattaaaattccagatatttgcctgtgaccagcaagagcaaagcctaggagactcaagcacagaacgaatatgctttacagagttagagagggcgcagaaaggaatgcagctctttttttaagcaataggtgatttttttaaaaatctaaccagctagagaaaggagaaggttttcaatacttatgatcaaagcttactccttggcccctgctcaaccttgtcaaaacccttgtgagaaggagttagaaacaccaacacagggctggaaatatgtgagtaagctaatctgagactcaatttatatttgaagtgttaggctagaaatgatagcaagtatgtttaggttttttttgttgttgtttttttctttttttgagacgcagtttgtttcttctcacccaggctggagtgcagtgcacaatcctggctcactgcaacctccgccttctgggttcaagtgattctcctgcctcagcctcctgagtagctgggattacaggtgtgccctccatgcccagctaatttttgtatttttagtagagacagggttttgccatgttggccaggctggtctggaactcctgacctcaggtgatctgcctgcctcggcctcccaaaattctggaattacaggcatgagccactgcccctagccagtgtttttttttttttaaaggctcaggcagtccccacaggaaacagcagggtgaccaaaaattcttgtgccacagaaagatggaagtagctgaatgaggacaccttgaagttgggacaaaaacaacagatacctacttggagagcagaaggggaagcaaatgtttcatcagaagactgagcagggatggaagcccatgaagacaccaagaaagaagccacttccccgcccccatgcaccatgacttccagagcccctggggagaaaaccaaggaggaaatcttgaactgacagtatttacccaacagagactgggttttgcacaagaagcagccaacttaagatgccattaatggaatggggaccacgccatgtaggtacctcttgccatgtggatattagagcttctccagtcatcttgcctccatgtggtatctaaaaatggattcacctccaaggaaccagaggcaaaatttataaaaaggaaaggagaaaaatttggttctgagaatattgttgagtccctagatccagccatgcttgaaatatgtcttacttgtaaacattttagtcgtgtgagttaaaaagatcatggttacctaagcaaattacagttggattttctgttacatggaaccaaagtgtcacaaaaactgtaaattagaacatttaaatattgtagaacaccaaagctggggtagagagatagatagagaagaggggaagaagagagcttgattgacaattgatgggggaattgagtcaaagagagcctagacgatgagcaggactggtggtctagctaggaagaattgaccagtcatcaatgaagtgccaatctttttgcccgaaaagtcatctgaatatagaagcattcaaaccacaactgaggcctaggttctacaagaaacacaagttttgaaacagcaagtgacacaattctggttgactgttttaaagggaaccaatatgggacacgtagtctctatcctgaagtcacagagttaccataaaacaaggccagttccgaggtctacaaccagaaccttccctagcaactgaccagtgtgtgtgatgtccagtggatatgatgaccagtggatgtgatgcccagggcagtggaaggaccttcccaggtcaaagtcacagaggattcccagataagggcaggatgctgatgagcttaggagaaggcagcataaagcactgggggcatctgtgagggcacgtgaaggaagttgccctgaggcagaagcactattttcagaccaagaaggctgctcatcctcagcaagaaattggcattttcttcgagattatccagaaatgacaggggattacctaaaaagcaagcaaacctagttctcatgacacttcagtgggccatagtcaaggcctatctgtgtcaaaattccttgagactagcagtaaaatattattcttgtagatttttgacttttttgtcaatatcaaccattgtcaactagctgaatctccaaagcaagcatatatgagatgtgtttctttcagaggtcataagctgaaaagcatgactcctgttccactggcagtctttgaaactataaagatgtgggccaaatacctgagccctatcaaagacagaaaggcatgcacagtgcatggagcctgctacctccatctttgcatgacatggggtagcacatacaacacttctgggggctttgctcacttatgcaagaggcaaatccgctgtgagttggcaaaaggaaataaaagtgctgcacaagaaggtcccagttaccccgggctgctcagcaagggagagctgctctagctactagtgattctgtgccagacagggacaggtgcgatccaccagcatgtcacgcagcctggggagcatactgttgtcttccaaaagaaaataggatctaaatgttggaggagtaccataatgctatatataaaaatgtgtacatgtcacacttctaaagaggaacacaaaggtgaagaaagtgaaggagcaagaggaaaaggagacaaaatgaatttttcttccatttagatttgttagaactatcaccctaactaaattaagaaataatgaaattacattttaaaatgcatattgatttggtttcccttcagccatcaacctgataatttaaagcatcagggcccattttcacctaatatcaaggtgcaatcaatgctataaaagcacacgttcttgcattctttatctctgcctaacagaggagaaaattctgttttaaacaggatgtgtgcaggataaattttgttttaaactgcaataacaagaagctttaaagtaaatcagacactgtaaagtaaatttacaatgccttggaaagagcccaagactgtgggttcttaaataggttctccctggtaaatggagcagccaccctctctttaaacaataagtctattcccttaataacttcaagaaatacctactaaaatggattttagtctgataagaaaaagaagtggaaatatttccagatcttggaattgtttttaactcattgtaggaaaagttctttgcagaagcattgttcaagttccccccaccctggcccaagagccttgggttctcctccactctgaacaggccaatgaacttgtccttccagtatgggctttacctgctccagcctccatgcttgtgcacaccttttcttcccttgacctgtgagaatagtacacaccagtatacagtggcacaccatgcacttgacatgtccatcgtttccttctcaaaacatttaatgattctgctttttatttatttcatttcccacaattgaattaaaactgatttgaactcccaaatgtgtgactagcaggaagtacattttcaccctcctagaggctctctcttatcctcttctggatcattcaagaatttcagtcacatgcagtccaaacaaagatccctcaaacattcactgccaagtggatccaagactccaacagccctggtgtctctcaaaccattgccactggcattgccatatctctgccacccaggactgccatcaaacagtcttccctctgtccaaagcaaaggcccatctcccagcactggttggccaggacttctgaagttagatgttgcccctgtatgcctccatttcctcagagccacacatgatgcaaagactttctcaccatatttgccatgttgtagcctaagagccctatcctctcagttcaatgaatgtccattcttctctgagcccagcttccccaaagacatgtttaagtccatcagggacccataatcactgggcattcattctgggagatgagccactacaagtgttgagtcactcactttttcagttctcacactaccaaagttcactctactcccttctcaaactaaggtggtttgattgcctccaaaggtgagtgtcatggaggcagagtctagtaattaaaaatgtactttcatcctcttgggagatgacttaccaacgagtcatgtcaccagaaaaagaaggaagactcttgggtgtttctcctttttgagactgtacagaaagccctcaccagctcagtaacgtgaggaaaaaaagggggcatataaatgtggaaagatgaattaaaactgtctttattcacaaatgacatatgggtctacaaagaaaatctcaaataatctaccaataaggctattagaactaataagtgagctagcaaagtcacaagctaatttttttcattttaggttcaggggtacatgtgcaggtttgttacacaggtaaactcatgtcacaggggtttgttgtacagattatttcatcacacaggtattaagccctatagttatcttttctgctcctctcccacctttcaccctccaccctgaaggaaacctcagtgtctgttgtttctttctttgtgttcgtgaattctcattatttagcttttaagtgagaatatgcagtattttgttttctgtccccacattagtttgctgaggataatagcctccagctccattcatgttcctacaaaaacacatgatctcattcttttttatggctgcatagcattccctgttgtatatgtaccaagttttctttatccaatctgtcactgatgggcatttaagttgattccaggtatttgctattgtgaatagtgcataatgaacatttgtgtgcgtgagtctttatggtagaatgatttttttttttaggtatttgcctgtagtcctagctacttgggaggctgaggtgggagaatcccttgagcccaggagatcaaggttgcaatgagccatgattgtgccactgcactccagcctgggtgacagagcaagaaaaaggaaggaaaaaaggaaggaaggaaggaaggaaggaaggaaggaaggaaggaaggaaggaaggaaggaaggaaggaaggaaaggtggtgggggcagggaaaaacaagaaatcaataaaattgaaaccagaaaaataatagagaaaaccaatgaagcaaaaactgggtccttgaaaaactctataaaagttacaaacttctagcaagactgacaaagaaagagagaagataccaattactatatcaggaatgaaacagaatatcactgcagacactgcagatatcaacaggatagtaagtgaatactatgaacaattctataatcataaatttactaacttagaacaaatagaccacttacttgaaaatcacaaaataccattcaatataaaagagattatttgaataatcttatgactgttgaagaaattgaatctataatttaaaaacctcccaaaaaggaaatctccaggcacagatggcttcacaggaaaattctctcaaacaatccaaaaggaagtaacaccaattctacacaatctcctccaaaaaatagaaaagacttcccaattcattttatgaaactaatattaccctgatccaaaaaccagacaaagacagtataaaaaatagtctattcaaaatctttgcccatttttaaactgagttatttgtccttttattgttgagttgtaagtatcagacggtggctttgtattaagttttgaactcaggaaatagaaatcctccaactttttttttcaagattgtgttggctatttgaggacccttgtatttctatatgaattttaggatcaaactgtcttttctgcaagaaaaagcaattggcattctaatagggattgcattgaatctctagaccaggctaggaaatatgagatgggaatgaatcgtaaaaatatatattttacctaaagtaagctacaaatgtactatcattccaatttaaattccaattcttttcaaactggataagtatgattttaactttaaatagaataataaaagttaattaatagaaaaataaatttagggagaggggtacagagtcttgctctgtctcccaggctggagtgcagtggtgcaatctcagctcactgcaacctccacctcccaggttcaagcaactctcctgcctcagcctcccaagtagctgtgaccaggtgtctgccactacgcccagttaatttttgtatttttggtagagacaggatttcaccacgttggccaggctggtctgaaacccctgacctcaggtgatccacccaccttggcctcccaaagtgctgggattacaggcatgagccaccatgcctggccagaaaaagaaattttaaaataagaatagtaaataggagccaggcatggtggcagcacctgtgatcccagctacccataaggctgaggcaagaggattgcttgagcccaggagctcaaggccagcctggccaacttaacaagaccctgttctctgaaaaaaaaaaaaaaaaaaaaagaaatattgaaaatattttcaggaattaacaaataaggtacagaaaaaatatagaggatgcagaagaaatcaaatccaagtacatatgagaaagttaatatatgtcaaaaatggtgtttcaatttagtggaaaacaaaacaaaaccccaaacaaaaatacagacactcaagttatataacaaatttaaatgatggacacaaattgggaaaaaatgatcaatcataatagtaaaatttaagaaaagattatttcattttttaccagtcatattgaccaagattaacaaaatgatataacctggctatgatagattacaaaaatgatcacaatatttagcagtttgtcccatgaagaggtatagcttattttccatcttatggatcccagcttgaccaagtggcttgctttggccaaagggttattagcaaatgttacccaaatgcaggcttgaaaagtactgatgcaatggaacttgcaacttccagttcttgggaatccattggccaccaacaacatgctgactgacaaatacaaatgacctagttgtctccatcactccacctaacagccagccaactgccagacatgtgagcgaggtcactgacctccagctgactgtaaaactggggcactatggtcaacataggtgagccatcccatctgggccctgcctaaattgctgatcaatggaatggtgggcaaataagtggttgttggtttcaaaccactaagttttcagaagcttgttacacagcacaaattaaccagtacgttgatgttggtgggagtatggaaaagccaacactgttgtgaactactggtagagtgcaactagaaagtaatctggcaatatcaattttatttcttttttaagacagtctcgctctgtcgcccaggctggagtgcagtggcgcaatctcggctcactgcaagctccgcctcccgggtccacgccattcttctgcctcaggctcccaagtagctgggactataggcgcccgccaccacgcttggctaattttctttccctttttttttttttttttttttttttggatttttagtagggacgaggtttcaccatgttaaccatgatggtctcgatctcctgacctcgtgatccacccgcataccattaggcagcaattccacctctggaaatttgtcttataaaaaatatggacgcatgcttacaaaaataaaagaatgttatggaaagcattgttcatatcaggaaaaaaatagagacaatttattttcttttcttttttccttttttggatacagagtcttgctccgtcacccagtggggtgatctctgctgactgcaacctccgcctcccgggttcaagtgatgctcctgcttcagcttcctgagtagctggaatgacaggcatgtgccaccaagcctggttaatttttgcatttttagtagaaatggggtttcaccatgttggccaggctggtctcaaactcctggcttcaagtgatcctcctgcctcagcctcccaaagtgccgggattacagggtgagccaccacatccagtccatttaagttcttatttaaattttttttttattttagattcagagggtacacatgcaggtttgttacgagggtatattgtgtgacgctggggtttgggcttctgttgaacccatcgcctgaatagtgaacacagtacccattaggaagcttttcagcccttgctcccctcccttctccattttggagtccccagggtctattgttcccatctttatgcccatgtatacccaaagtttagcttccacttataagtaaggacatgtgacatttggctttctgtttctgtgttaatctgcttaggacaatggcctccagctgcatccatgttgctataaaggacatgattttgttcttttttatggctgcatagtattctatggtgtgcatgttccacattttcttcatccaacccatcattgatgggaacctagattgattccatatggagacacctttaatatccattaatagagattggccaaataacagcacagccctgaagcagaatacaatgcagcattttaaagaattgagtggatctatacagtggatactaagtagtaccaagcattctctctcaatttttctaaaaataaaatacctaactctaaaaaaccaggctcagcctaacccaatacccagtccccctacacacaataattgattcaacgataggcatatgacttcccctgcatttttctgtctggagctggtggagggcacacgccctatctagcaatgaggctggaaagagctgtcccaatagatccagtatattggagatccacagccgaaaggaatgaaaccaacaggccaacagaagctcagaagagaaaagaggaccgttccacttctggcctggcaagagctaatgggatgacttgaaactgctcaccccacaatcagctgagctcacatgtgcaggggatggggccctgtggcttccccttccacctccccactacactgaggtccacatcaaccctacaaagttcaacacttgtgtatgctacccatggtggagtgggcagcactcctggaagcagccaagactctggacctgctcgaggtttccaaagggctgattcaggggtatgagcattatgagaaatttccaagggagatgcaccacatgctgctcgagctggatgtgttagaggacaccttgcaatgcgcagagtctggacatctgtcccacatcagccgtggggaccccaacatgctactgagtgatgaggaaatgaaagttgaccacgccacgcaccagtttcttgctttatgaccacgtgtatctttgttgatgtagaccctgttcactagtgctgccatgcgcatccccaacccttgacccaaagacaaaccaaacatggtgttctatagcccaacagtatgcatatatattatcattaaaggttcaaaacaaaacaaaaaaaaattgaaaagaagaaaaaagtctacctgccctttctgtggcttaattacataatcaatacttcctttctttttatcagtccagtcagagttgggtttctttcacatgcaaataaagaatcactacaaacacagttcggatgtagtattatacaaaggaatacaaaggaccaactgtagaagatgtttgtttcttacgatgggtggtatgctattacactgtgtaattttgaatgtcttttttttgagacggagtcttgctgtgttgcccaggctggagtgcagtggcacgatctctgctcactgcaacctctgcctcctaggttcaagcgattctccagcctcagcatctcaaatagctgggattacagactaattttcatatctttagtggagacaggggtttcactatgttggccaagctggtctcgaactcctgacctcaggtgattctcccatcttggcttcccaaagtgttgggattacaggtgtgagccaccacacctagtccttgaatgtcttataaattacataataaataattgtaggttaaataatttctgaaaaggaagacaggctgggcatggtggcttacatctataatcccagcaccttgggaggcaaaggtggttggatcacttgagctcaggagttagagaccagcctggccaagacagtgaagcctgtctctactacaaatacaaaaattagctgggtgtggtagtgcgctcctgtagtcccagctactcaggaggctaaggcaggagaatcacttgaacctgggaggcaaagttaacagtgagccgagattgtgccactgcactccagcctgggcaacagagcaagactccatctcaaaaaaaaaaaaaaaaaggaagacagatgtttcaggaaatgcaataaaggagagttgaactttggtttctgatttgatgtctaagaatcaaatttgaaagaaaaaagaatttgaggggaagcggcagggctgggagaggggcagtaggggccatctcactaccttccagagtgcatggattttcctggtgtagagtgggcaccatgcaaagtgatcaggccctagtcatcttgccagtgcaccacagagaaaactgccttccaggtgagggcgcctgagcacagagctgtgggcttgccgcccaggatgggcaggtggaagtggaagtggccagccgcagcccatctcccaggaagaaggcagtatggtggcccccagcaccttctaaagcatcccatgtggcccatgagttggaccctgccacataagggatcttagtccagtaaatgacctgcagagaagcaccagagataagcacagcagcggctaccaggtaagtaaaatgacccttgtccctttccctctccttcctccacaccccagtctaacacgcacacagcagaagcctgccttagagagggaggggagaagggatatctgtaaggcagggtgtccctcctcttccatggctggtagatagggtcccagtttaaacctttagggaagggaataaaagggataagatttaaactatgtttgaggttttacagcgaattgactttttgcattcttagttttcaaataaatacagttagattttaacaaataaaagtaaaaagtaataaaatcttcccaagggatcattaaagagcaagacagggagatttaagagagcatggttaaagccatacttcgagaaaaaactgtttcatgtttctatcccagtgaattatgactgctcaggagggtggtcactcggaggctcaggctgcattgctcggtacagaattgcgctggtggggcagaagcttcttcctcatcagctgccccccagctcccgtggaaatatcaggtcagaggaactcaggtacacaggtctcctcccaataccatcattcaggcaggcactgtgcaaatatttccaatccttacagtgactctgcagttagttatttaatataattacctgcattttacagggaggaaacagaccttccgagtggttggggctggccccaggtcacagacccagctagggggctctcaaaatgaggtgtccagctccatcacctgtgcagcgcccaccctgcctgagtatgctgcttgcacgaactctcgccagagcccctcagacacccctgcgcccctgctccagctgctcaggctgctgtccagagaacccagaatgcgaggtgctcccatttctccctgtttgaggcggccctttgcccaccttcgctggtggatatttcaagtccagcctctttcatcatgttccttcccacagtttggactcacactgatctttctgctttcaaatcttcaaatctcaagaccctgaatccagtgtgtttgatgtgatcgtgaaggggcagaggaagctcttctccaggaacccctgaagttaaaaaacagcctccagcccggcctgagggaggaagtggggtggattagctagaaaggatgttgacccccaagggtcagacagaggaggggccctgtgggcagcgggaagtgaaaacagggagtgcctggaagagattgttcatgcattcaaccagggccaaactgcatgagtaacgggagtgggtgtgctggcccacactatatataaccgcacctggagactcccccacagcacagagccattgtgctcttggatggttctggggtgtatggttcagcaaaagcccgagtgagacagcccagaaagaaaagctgggaaaaggaaggcagaaagccctatcttcctcttttttgattctcctgagtggagtgagtggagcgggatgtaggatccacttgggaagaggaaggcctcccttcctttgcaaacatggacgtcgcagccgccgctggtaataaacttccaagaaagaactgactccaccttcacaccagcattggctgcagagggtctgaggatgctcccggcgttcattgactggtgaactcgggttctgtcctcgaaggtcttcgggcggctctgtctctctctaagtagggggcgcatcttgcagggtctgtgtgccctgtttttggagatcactggacttctctggaggaggaggctccaggaggacccctgcacgcatgtttccagcaccccaggtgcatccccctcctctagtgggaaattctgggaaagccagccaccttctgaagttccattatatcttgggtcagatagtgctcctcttgacattgggtgttgtccttgtgctgtcagatagagaacctggccctaatgctcagtaataggataagggaaggttctagggtctgggggaggggagaggaatgtcaagtgtgggaagtcaggcatccctccaggctgagcagaactgtaattgatgccagatgaatggggctttgcctcaaggtgtcaatatggagctgttgggcagaatattttttaataatgatttttgaagtttagcacccagtgatcaagatcaattaattctaactggaagttctcagcaggagtgcattgttgaaatcacttatctgtaaagcctgctatcaattacagagttgataagagatgctgtctaggttggccttgagctggtagcaacagttccactgttgcctctagcaaagtttcagaactctaggtcttttacccctaaactaaaaaaaaaaaaaaaaaaaaaatccagctttcagagggatgtgcaaggcttccttttatcactaggaacctctgtcctttttcctcagtattttcctgtttctccattgctctgttttgcatttcagtgccatgtccctatgttctcttttacctccccctcctgaatgatttcttcaaatccactcccactagacttgccttcccctctgggtggacccactggtgggcatctcatgaaccatgtacagagaggatcacagtcttcccctccccaccatggggggtttcagcatccacgtcccagagctccacaactccagtgacagtcaccccctcagcagtccatcctgcacattttggtcaccctgacctacttgtctctgaaattcccctctgatactttctcctgtcatcccagcttctccctccctttttcccaagctctcttcagatctcacttcctccatatggaaattggaactctcgaaccccagtctcaccaacactctctggccctcttgtctgccttcacccctgctgctgaaagcacagcttcggatgaatcctatagtctcatctctgtttacatgggagcttctgctcacaagagcctgaagagggatgctgatctatgaactcacctttatcagggccttcaatgttgcagaacagagctcactgcttttctcaggcccacccctgccaatgcccctgcccctcccaacacccagcactgtgccctctcaggttttcaccccactctgattttacaaagaaaacagaagggagccccctcagctcctccaccatctcatccccaaatcccccaacctcaacccagaaaaaccttccccatcccatctcccactcaccttcttcattgggttctctcctccttcaaggcctcacacacacatcagcactctctggaggccttcctcttccatagtaatgctcagttactgtcagccatagttacctttatcccatgcccctttacatggaatccaccactctgccttttgccaaaggatagtttttatacttttcattgcattgaacacaccattacaattatttgtctatacacctttcccttctacaggatgacaggctcctttaggacagggaatgtatgtgtcttatctttgaagacaacgtatagtgtctggcatataatagatgttcaataaatatttgatgaaataaatacctaaataagtaactgacttctcaggtagctctgtgatatcaatatgttcatctacttatggcagcaattagcagcacttcgagagattttaaaactgaaacaccctgactgcaggcaaaaccaattaagtcagaatctcaaggggccagaccaagcctcagtctttttttaaagcttccactgattgcagtgtgcaacctgctttgagaatcatttgtttatagaaggtagaaactcagtatctaattcagtatgttgtgttacagcaagagcctgactctaatctagtaagagagacaagcaaaccagagacagattcttgaaatgatgagcaataatgaatttggcagtgaggccagtggaaatgcatgaggaagcgggggctgcttgccgcctgccaacagggtgtatgtgttgtcagctcatgtcagtctcgatctaactagatcattgataagactttggagaaaagaaagaggatcctggtgagtcaggaggacaggctgtgccgaggtaaggagcagaggagaaatgacccaagattctcatctagtgacttttctgaaatgaatcttcagtgtccgttcctgaacttcaagtgttttaggttaagaatggtccctaaggccgggcgcggtggctcacgcctgtagtcccagcactttgggaggccgaggcgggcggatcacctgaggttgggagttcaacactagcctgaccaacatggagaaacctcatctctactaaaaatacaaaattagctaggcgtggtggcagcgtgcacctgtaatcccagctactcaggaggctgaggcaggagaatagcgtgaacctgggaggtggaggttgtggtgagccgagaccgcaccattgcactccagcctgggtagcaagagcgaaactccgtctcgggggaaaaaaaaaaaaaaaaaaaagaatggtccctatgaagtaagtgtagaccagggctttgctctctgagtatgatccatcagcctagcttgggaacttgctagaagtgcagaatcttggaacttcatttttagcaagatcccaaggagatctgcatgcacattcatttgagaagtactgttctggaccaatctaaagaagaagtgcagcgatggtctgagattcggcatttctggatgatctcaggcaatgcaaatgccggcggtccaaagagactccatatttggtatttccttgtgccagccagtggaattagcaatcactgctccagcctgccctgtaccctggttatctgttatgaatccctttgtttcaagtgaaaagaaaatgaactcatagtaaataaactgaatttgctcacataactgaagtagtcagaggtacagctcactccctgggagccttgatattgtcacctgggatccaggttctctgtgtccttgcttggctttgtgtccgttctccaccggtaacctcctggcccaactctcatgaaaatggctgcattggttatggaccgtcacccccactgtgtccaaggagggctgcttccagtcactctcttgtttgttcatttatttatttatttattttgtgatggagtctcgctctgttcctcaggctggagtgcaatggcacaatctcagctcaccgcaacctccacctcttgggttcaagcgattctcctgcctcagcctcccaagtagctgggattacaggcacccaccaccatacccagctaatttttgtatttttagtagagacgaggtttctccatgttggtcaggctggtctcgaactcctgacctcaggcgatccacccgccttctgagtcacgtctgtcctttaactggataactgggggggtagggggatgggtaatgccaacaagcttgagacatgccgggctcacccgagtgacctccacccagacctcatgactgacgatgctgaaagggcaagttctccaaagaaaaaccaaagttcttctggggagacagcaacaactgccatggtcgcatcccatctgagaggccaaacagggagctctgtccccaattcttaaagtgcaatacagtgctggtcaccagttcttaaacagcaatacagtgctggtcatgtgggtattacagtatttctctttttttgagatggaatttcaatcttgttgcccaggctggagtacaatggcgctatctcggctcaccgcaacctccgcctcccagattcaagcgattctcttgcctcagcctcccaagtagctgggattacaggcatgcgccaccacgcccagctgactttgtgtttttagtagagacggagtttttccatgttggtcagactggcctcccaaagtgctgggattacaggcatgagccattgcatccggcctatggtatttcatttcaaaatttatttaacatgaatccagggagttgaattgcacctttgatcacaaagatgcttcctgaaaaaccgattttagaaatcctctacagaaatcattcaccctacatccacatccctgattccagggaaaagcactcaaacattacaaagctcttttgaaaaccatagctaatttttggtcggaaaatagccaagctcattcaaagtcttaagtaagtagtatgaaaaatagcaagatacgtactctacatttatcatggagaatggcatgtattaatccattttattagctcattctgcaggtactaatgtatccccaacctttgaaaagcctcctcagaaactagtatttcaaacctctaacatttaagggacaaaacacaagctcctaagagggtgtcacccaacctttctaagaagtaatgtcaaccagagaaagtagggaaggaacgttccacccggcaatgttgtattgttactcatttttggttgggtccccacctgggccataaagttcttgagaatgagaagaacagcagctaagattccctcctcccatccctgacgctccgcacccataatatgacggtgctctgctaaacggcctcccatggagctgcttaaaggaaagcctggccctttccacctggatgtcccccagcatatgccctctcccccagctctccgggttcctgcgtccactggcctcctgtcctctggtttgggggtcaggtttggccagcaaaccaggtgggcaacaggattttctccgggatttatttcctagtcccatctttctgggccacaatcagcattagcttcaaggtcagagctcctggctggcagaactcctaaagccacagtcatcgtgggctccagggactgctttgccatcatcccagtcaggcctgatgagtgcagctttgagcgcctggggccctggatgcttccagtcccgagatggattcacatgtatagaccactcatgatctttcttcgggcactctttaagtatgttagctgtttcctgcggggccctgaataacacacacacacacttcatttaattttgcagaatataaaatctacatacacacacaattttttaagaaaaactttatttttcaaatttacaacatgtcaataaccaagaactttaaaataatgacttaaaatgtagaagatactcaataattgttagtaaaatgtttaaaactagttggaagaagattacttttgggggaaaaaagctgtttctgccactgcccattaattttccacttttaaaatgatcaaactttaatgcaaaatataatgtgcataagtagaaaatggaaatagactgactttgcatatgcttaagctgagcacatttttcactgcctcctttgagacgttaacagtattaaacgctgtctttactggaaagttccttctgagaaagacaggaatatttcctatattctgtcagtcttagtaatacatggtaagctggtaacgcaactcaagaggcctgagcagagaggttgaagtcggcaccggcgcctgggctgttcccaggagactccgctggctgcgtggggtcagcgccgtccagcagggcgcgtctttggaggcggcgtcagctgccccggcgcggcggctgcatctggaaaccgcgcgcgccgcccgccaagggcgagcccgtcgcccacagttcacgcgcatggcgccgggggtcgccagtaggcccagcgatgagggggctgcgggcttgcagtagagacctgcgcttagctgctggtgcggggcaggcctggggcagcgcggggcgaggaaggcggggtccggctccacgcggtcaaacggggacgcagggcgtgggcagtggtggcagtggagcgggagtacgaccagagccatgtgcggggcagcgaccggcaggagggaaagccctgcgcggggaagggcaggcccaggccgcccagggctacgcggccgcgaacggttgggggacggtcctggtctctggcctggtcccgcaagatccccgcgctgcgccgcctcccggaggaaggcagctcctcctcctgcgcccacctcgctgggtacccagttgtttcccaaactcacaaagcgcagacatctcccaagaggacaggaagcctgcaaagaggcgccccacacacttttatcacccagacgaacacagtgtgagtggaagttaacattaactatgacgccagagcagcgaccccatcagcctacgattatcggggcagatctcacctcctggacagaatcagcttcttaggtctcagccttacgacatgagggtcccggaagtgccaataagccatccacgcagaccagcacttgcccaggtaagcaggcaacggaggggcaatgctccaggaggaaataacccacccagagttttctatgcacctctctctgccagcacccctgagataaagaaagcaccggtcttgtaaaatattgcaattatggtgtgcacaatttttaccccttttcttatggagtgaaacgtgctccccagtgagtctacatttaagtacaggtactatctgttctgtgcataaactcaatttgtgcatgtgtgagggggtctgagggctcagactgtacacgatgtaaaagattaagtcacaaactgacattggactggagacgggacaagtggggctgaccccacggaagagtggagaagaccatcaaccggtaaatcgaagtccatcttctaggaatacaagaccgccaaatgtgtactctaaactgaaaaagcaagtttcagaatagtaggaaaatgcgatcccaatgggggcttggggggagaaactcctctgtatgactgtaaatagaaaatgtgtgcggctgggcgcggtggctcacgcctgtaatcccagaattttgggaggccgagttgggcagatcgcctgaggtcaggagttccagaccatcgtggccaacgtagtgaaatcccgtctctactaaaaatgcaaaaaatagctgggcctggtggcggacgcctgtaatccgagctactcgggaggctgaggtagaactgcttgaacccaggagacggaggttgcagtgagcggagatcgcaccactgcactccagcgtggtgacagagccagactccatctcaaaaaaagaaaaaaagaaagcgagaaagagaggaaagaaagaaagaaagagaaagaaagaaagaaagagagagaaagaaagagaaaaaagaaagaaagaaaaagaaagaaagaaagaaagaaaaagaaaagaaataaaggaaagaaagaaaagaaaagagaaaatgtgttcaagggaacacaggacacatatctgaatatctgaagttgggactggagcagggaaactgttttcatatgctgcttacatttctatgaaataagttttaaataaagctataatgcagaatagaaagggttttacactggtttgattaaaataaactcgggccattttattccttctcttaaaagcaaaaaacaggcggggcgcggtgggtaacgcctgtaattccaacactttgggaggccaaggcgggtggatcacttgaagtcaggagttcaagaccagactggccaacatagcgaaaccacgtctctactaaaaaataagacaattagccaggagtggtggcacgcgccagtaatcccagctgcttgggaggctgggacaggagaatcgcttgaacccgggaggcagaggttgcaatgagccgagatcgcgccactgcactccagcctgggcgacagagctagacgtcatctcaaaaaataaacaaacaaactctggccatgttattccttctcttaaaagcaaaaaacaggccaggcgcggtggcacatgcctataatcccagcactttgggagacagaggcaggaggatcgcttgggcccaggaggtccaggttgcagtgagctgcgatgcaccactgcactccagcttgggcgacagaaggataccctgtcaaaaaataaacaaacagaaaagccgctccctattaacttcaaaagactctggaaaattaactcgatgtgtgcacaggtagaggccatcctctcccaaacttcagcaacaaactagagctctagattgcaacctggctagcttgaaattctaaagctttaggcgttttcctgaaaggctgttaaatgtatttctagctccatgtgtggcgagcagttagaatctgtaataactcagcacccatctctcaattccttactcaataaatgaacaaggaatacaacttttttttcttttaacttggaataggggcatactttttaacttggaatagagctgtttcgtttttgcagaacctggcctaattaggcggcacattaaaacctttctcccaagactgcaaaattttgtgttatcgtttatacctggagataattaacaatttggttttgaactttttatttaatgtcatctccagctcccaagacgagtctgcaattgccggtcaagtctccctaaagggaaacactaaatatgagaatcgctaaacacgaaagagttttcggaggtagagccaccgaccggttcttgaggatgttcgccaagcccggcgtctccccgcgcagaagcccagccctcccacgtccggggttcccggcgcccgggttccccgcgctccgcctcccccggcgtcgggcgcagctgggcgtcaagctgggcgggggtccctcgccagcctctggcgctcgaccttcgccccacctggaaggcgccggatgcgagactcgcccttggctcggcccgcggccccggccggcgcctcgcccttcaccttcaagtccccgagggagctcggcaactcggcccaaggacaggggcccagcctagccgtcaccgccggcagcgcgctccgggtctggctctggtagtcactggcgtatcccgcatccggcctgctcacggcgctccaggcctgccccgcgcgccgaaaccctccgccggacgcggaggaaaagaaggtggtgagcgaggcacggagatgctccgacggctgcgcgggtctccgaggccgaaccgccacccgcgttccgggccagtcccagcccacggcgtggccagcgctgccgccggtccagcgacactgcgggcgcccccgggccgcggggcctcttctgagaccatgtggcccacagagaatctaagctcccgccgccgggctccacctcaacggcggagaactcgggcgccgagcatcgcccgatccctacccggcagcggacggctacagggtttgattttcccctccacaggaaagaacgtgcagaggcacaaatcccctcctcttccctcagaggaaagcctgtcccagcggtcccgctgagaacttccgaagccttggcgcggcaggcaggcccctgagccggtgcaccgcgaagttgcattctcaccttcgagtcaccgtggcttaggccgagtaaacgagcacttcatctagcgccgggcgggccccggcaccaagctaagagctcaaaactcctcgaagcgggcgcgcgacgtcgcggtccgagctctcctcgccgcactcccccatcagacctaagatcttttaccttttaaattaaagtgaatccagatccttgttaatgcggcctaatgtagcagcgggaagagtgtaggtccctggcgaggggagcgcgctccggtgacctctagcgcctcagacgcccgcgcaggaggaactcccgcagcccgcccgggacccgagggcaggagggtgcggggaacggggctgccactgcgcctaagcctttccccttttataggctttagggaaacaaatcctcttttcctagtggatgtaagaagtgagtgaatttaaagtcacagccacggcggtaagcggccccaattgtctgggattcataatgctgttaatatacacacgtatatgtaacagcactttgcaggtatacatacatatatattatatgtattttttttcatatgacgtttgcatcaatattctgcgtgctgtccctcccccaccccaaccccaatctgtttttaaaaatccacctccgcagaagaggagaggagtgcttcagggaagggtggaggcatccatgtcctcacctttcccagtgaggaatcgagacttcccgccttcgcgatggaactagaaaagggtatgtagtcctggactttaaaagacaattaacagaagtggaaataaggatgtaactatattccgaggaagagcgggcaggaaattcttagctgtcgtagcagaaagtaaatgtctaaaactcataagcctaaaattagccatgcaggtacattaattaattaaccactagacaagcagaattattaatgtaggtaatgcccagtagggggaagaaaaaaggaattgattctgacctgtggcactggggctggggagagatggaaacttctgacaactctgtttatattacaagcccgtctgcaatgttgtttgagttgttgtaagcgtgtgcatcatttacatttttaaaattatttttaaatgaataaaacaataatgttttctatatccacagtctcgttattgaaactacaaacctaaatttttattttctatttttccttcctgttatctcagtaagctttttcaggtcaatattcttggtgcgcatgtgtgcacctctgatccttactattgtattcaaacgtccaaacaaatatttattttaaaaagcagaaaaatccactatatagggggcagctataaaattgctccttccattttgctggtgtctactaattttcttctatcagtccgtccatatccatcagttcacagaaataacttctgaggactgagggatttaaaagcctgcggatcgcgtttcagtattacctggaactactggaagccagaatcttttcttaatttgcctttttccccattacactctgcttattcctcctcaagaattcagaccctgttcagttctcaaaaagtaaacggtatggaaatcgattcaggacttcagaaaccatactggtgggaggaggggctaacagaaagataaatgttggcaaacttgatatcgcattcagtatgtcccaattaactgtcccttttataaagatcttaagattttcatgcaggatgggagttcttgtgtattaagacattctatacaaagttctccaactgacaattatttttttctcattttataatcaaagagactaagctgtccaaagcacaaagtaaaacacagatgctgtgtctccagcaaacacagaccatcttatagggctgtaaaattctcattccactaaggaaagcacccggggaaggcgagttcctgttgttttttctttcccaatggaagaatgaaattaaattccccaagtcagctgagatagagagagatacataaaatcaaaagataggaagccggagagagggagagagatcactttctgtggcactgaagcactcccttcagcgtaatctcatctaatccctacaacagttcagtgaagctttcgccgttatccagagtcaactttggcaaaatgttttaccgtcacccctgctttttacagataagctggctggagtgcagaaatggtcggtgatgtctccaaactcacagagctaagtttccaagccaggtgaacctctgattcaaactgcagagatttttcttcttacggaggacagacactgctagctttattcatagagctattctctaatccttgctccagtagtttacagtctggggttaaatttttgtgttcaaacacattattcaagagaaaggaataatagtcaccaggtgactgcctctaatagaaaagagaggcaaagcaggaactcttgagtttccttggggcttcccagcaagttgcttccagcaagttattcagtcagttttctgagcaaccggtaacgtcaggtaatactgaaaatgagacagtccttaaccaagagcagaaaactgctgggtttaacttcacacgcaccacagttctttttcttgcctaacaagttatcaggcttatgggaaggcactgacttacagaactgggatccacagcacagctactgatgtttattttttttgttatctgaacctgcacacagagagtatcctcacaagatcatcttttggagcaacatcaatttggggaatacttgttaggaagtcaactttggcaaaaggtttaagacttcgattcaagtggaaaaaaagattgtcaaagctaaaatttcttcagcaagaagagatttttaaaatatttagccaaatggtttcttgaatcttagctacagagaaatttttacattaaagaacatcatgattatcacaacaacttacttagcacttgcgtgtactaagtgctgcactaagacattgtagtttccagtgtcttgaaccaacctgggaaaaatatcagtggtgagggttcagtgtttgtatatggaggatggtgcaaactgaattattcccataaagctgcttggtaattccagagaaagcacacagccaccttctcattagaaggagggtagggataggtgttatggtgaaaaactgagatgctgctggatcccaggccagaggacctaaagaaatactctctccattaggagcccaccctgtggaggaacttgagcctactccagatggggactgggtaggaacatcagtgccatttttcttcagatgaatattgtagacccagaaggaagcaccttgtaagcaggaaaaataaatttgtgctgaaataatggatgtaaaatacttctccctgtccactattgtcaaaacaaatcaaagaggaacaggaggaggaagggaatgttgaacatttattatgtgacaggcacagtattaaaaacaaaatgaaatgggacattttaaaatgttaggctgagatgatgtcttttggttcattgcaccctttccattttatctgaattcctttggcttgtatgtgcttttcctaatatcagtacaaattcaagctgatatcttctgcagcgtgattcaaactaaagaggcaataatctactgataagaataataagtaaattgtttcattgcaatattatctcttagctgcttgtgtaagtcatttacaagtttatctgtaatttatcagacccacctggtagctttaatagagatgtagtcagtattctcatgggggaaaaaataacctcttccttattgctccggatgtctcaaaggcatgcacattctgtactggcatcaagtctggctatcttagctcataaaagagctggattcttacctcctaatgtaattctaaagtaccaaattagacatgggtagaaaagcaatgtatcctttatgtgtatttgtctccaaaataaaacagtaaaaacttgagacagatttaatattttgtctcaaaaattcactagctggtacctgtggtcacttcatctgaatctacttgaggaaacagaggtctgcgtatttggtgatgtcatgggggtatccaggcacttggtaatgtcacagaggggatttatgcatttggcgatgtcatacctggtggtggggggaggtctgttcacttggtgatgacatagagtcgttcgacctaggcagaagttttacattctgtcgttcactttaaaactataatggtctgtaatggaccccaaagctctatttctaattttgccaccagggcccacatccctgtactttaaaatgagaaagggtttaaggataccaaatgttttggtaatttaaaactaccaaaaaaaaaaaaacatagaaggaataagacctagtatttgatagcacaacagagtgactatagccaatattaatttaattgtacattttaaaataactaagagtatcattggattgtaacacaaaggataaatgctgcagggaataaataccccattttacataatgtgattattacacattgcatatctgtatcaaaacatctcatgtaccccataaatatatacccctactatgtacccataaaaactaaaattaggaattaaaaaaaatcactagctgctacctgcagtcacttgatctgtgtgcttgaggaaagagaaggaattggcttgatgcttcttacccaaaaaaaattatttgtgaacaccaatccctccatccatgtaaatgcatgaacattaacttaacaattttagctcttactgcttttccacctgcgcctagtgagtagttaaagatgtaatttacaggactttagatctttcccctaagaactctttttctttttcttttctgtacttatcttaatatcgttaagagatggcagccaagggtaaaactgagtcttcttgggctgactatgatgaaaatgccaagtgtaatctgagcacagccctgaacttgggctggtagcccttctgtccactttatctactgggaactcttgggacaccctgcagaaggagctcaggctggaagcagaaacaacccatctgagctaagagaaagaatttaacctttttaaaggcagcctgttatgcctgacagaataaacttacctttcctcactaaaactgtctatccttcacattccaggaatcccttctaaaaaacatattccatgccctttttcaagagaatccagccaatcatttcagctcagacatctctcccatgtaaatgctggaagctatcctccaagcctttcctttttctatagcacttgctgctaaggataattatatggtttctcatcaacagaatgtaaattctcccagtgcccatgaatacatactggcccagaggaaaacaggtgagaaatatgtcaaaagaacttgtaatacaagccttcatatacatggcaggggaaggcctggtgcctccttttcttacaaaataggaaaaatagcacctaaacctgcaggtttgttgaggctcacactgtttagaatggcattgaacaaacatctggcacaggaaatgcccattataagtcacctgtttccatttatgtctcaatctcaaatgtggtgagacgtgccacagcgattagtatggcagattacaggggctgatccccatcttttactcacaaccctgtaactgtttcttcttgataaagtaatggtgatagatagggacactacacacaaaccattcatggattctcccctaagtctgtgcaatcgtccgtatatgtattaaatctaaaagcaaaaaaaaaaaaaaccaatcaaataaaatgctaaagtgtattaaaagttgtcataatgcaaattttattttgattagtttttgtgactcctttatcttaaacccagcgatgcttgccacttcccaaggtgtaaaaatgtgaagattaaggtaaactgaatgtcgaggagtgtaaagagatggcaaaacacagataaaaacatccaaaaagcctctgggggcaggtcaagcttatgattcaacagttagaaaaccaaaattacttggacatccccttctacttaaagtgatatactggaattgaaaatattaactgttagttttagaaactaagattacttgaagtaggctcattccagaatgcttttcttttttccttcctgaaacaattacatcaaacttagatatcctaatgtttatttttagatatactccttaaaggcatttatgttcacccttttcgaggatgagaaatttacattaactaataaacttaacattgatcttaagaactggtttttgataagactagtgtgacagaggtactagtagagcaaaaaagcaggattccagattttattttttagaagattgaaaaaacacacccaggacaacatttctttgatcaataaactttcaggaaatggaggaagctgttttgggacacattcaaagctagttaacttgaacttggaaatagggttttgacaatccaactatgggaaacaaatctctgaacaaattttaaatgaaacctcacccccccaaactgttcaagtggcagacaaaataaattaccataaattatatgccaacacaccttttaaaaaacaacaacagcaacaacaaaaacccaggagtctgaggatttccttagctcctccaggaagtgtgtaacactgcttctggcctgcaggctggggcggatcagggacctgtcacacgtcaggatagttgcagtaatataccgcggagctggcgtcggacaccaccgaggaaatggccccgtggctgtcggggagattcacaccggagtcatgcccctggtaggggaggcccatctcaggcttgcacacgaagtgcagatactgttcaaattccgtgcggtccacctccccgaggagctcggcgggctgactggggtccgtgccgtcccggcagggcagtgcctccggagggggcgacggctgtccggggcccggggggtggtgctggtgctggtgctggtgctggtgttgcggctgcatctggaagccgcgcccgccgcccgccccgggcgagcccatcgcgccgtagtacacgtgaagggcgctgggtggcgccaggaggcccggaatcgagggacccgcgggctctgggccgagtcgggggtgcatgggaccggcgggaggctccggggggccagcgtagtccgagacctgcgcgtagctgtaggtgccggccgccgggcagtccccgggcatcggggcggcgaagaaagccgggtcggggtccacgccgtccagcggggacgtgtcgggcgtgggcaacgggtagccgtcgagcggaggcgcgcccagactctggcagtcgcggtagtggccgcccatgtgcggaggcagcagcggcgggccggcggggaagccctgctcggggaactggaggcccaggccgtccatggccacgcggccgccctcggggcccagcgcggccgcctgcggctcagccaggccgtgcaggaagccgccctccacccgcttcagccgcttcacctgcttgcgccgccgcggccggtacttgtagttggggtggtcctgcatgtgctgcacgcgcagccgctctgcctcctccacgaagggccgcttctccgccagcgtcagcgccttccacgacttgcctgcacagtggaaggaagggggagaggggcgcagggcttatcggctgcgctcccgctccaggccccacctggccccacctggacgcacctcccccctcagactttgaattgcgcaaccggggtgaagttaaagagggagatctgggactcctgagtccgagcccttggggaacacccgtcctctaaaggcacccctttcttttggtctcctggaagcggctttccgctcacccatcacccggtcgttcgaaaaacagaaaaggacacctaactagggaaggggtcgagggatggacacaaccggcccagttcagggccaagggtgctctcgcgccgcccggaggtgccgggaagtcgccttcccagagccgttggacccgcgcccccggccacctggggaatccgggagccggagagcaaggcggaaagctgctttggagggtcggagggcgggaagcgggaagggaacccagagccttaagaaaggacgtggccgctacacacccctggttttgggcgtcaggctcgcaaagaacagtttggggtttaagaaatcggcctagcgattcgcgccagcgcgcccggccgcctgggtctgcgactcggactcacccagcatcttgctcaactcggcgttgtgcaggtctggattctgctgcgccagccgcttgcgctcgtccttagcccacaccatgaaagcgttcatcggccgccggatacgggactcgcccttggctcggcccgcggccccggccggtgctccgctgttcgccggcgcctcgcccttcaccttcatgtccccgatggggctcagcgactcggcccaggggcaggggcccagcccggccatcaccgcgggcagcgcgctctgggtctggctctggtcgtcactggcgtatcccgcatccgggctgctcatggcgctccaggcctgccccgctcccctcaaccctccgccggacgcgccgcctcccccgacccgggggagggggtggggagtgaggcactgagatgccccgagggctgcgcgggtctcccggcccgaagccgccgcccgtgttctggcctgtcgcggtctggtctacagcgtacccagggcccccagccggcctagtgacactgcgggcgcccctgggccgcggggccttttctgcacagatgtggccaatggagcggcgagggcgggccggtcccgcgtcgttaggcccacgcccaggccgtggtccgagtcccacgtcccagtccaaccccacgcccgccccttgcccctcccccggccccgcgcccaaggctacacctgcccccgggaaaactagccggagctgggctctggcgccgcgtcctctcccaccggggttagggagactcgaaaagccgtctgggagggctgattgtaccttggaatcgacgtacttgcccaaggtcgtttagatgaacataccgagcgtccattctattctctttaaagcacatctttttgcagaagccgagggtgtttcagtggtgggtgacctagtttacttccaaggaactgcatgggcatcttcaaatgtgttttctcaaatgcgaaagacaccgttgataataaatttaaaaatacaatttttcccccaggactcaacttgcctgtgttatattcaaaatgctgtgtccaagataaatcctaattttctaaagcaagattaaatatggaacgacgttctgtatccaatattccttcactctaaagaataaagcatttactcatgacaagccaaccagtttttatgtgtatcttattatacacatcatgtgaaagtacgaaaatgtatacatgatgtatataagatacgcataacaaaactgtttctcgtatgtgttcagtaacaggtgagccttaatactgatttctaaaatgtaaagacagcagcaatatttgtctaaatgtccgagtttgtttgggggaagagaacaatctgttttagctgcaaagtaactgtggttcttacagtcagtttaaagcggttattctggcagataattagatttctataagtttctttagactggaatgaaatctgaatgactattaaacttgtgtttcgatctggaaaaaaaaaaagttttcagtgggacttttaaaacaagccgttatacaacactgagaaatgacacagcctgccactgctattcctagcgccctccagcattagcaaagaagcatatcctcatattaaccctgaggtagactctatcttacaggaaaggaaacggaggcagagaagttaaggaacttgctggagactacagcgttgagaaggtggaattcacacccagcagtccgccttcagacttgcagctcttaataatcactaagccaggctgttgtgtttgtgtatttgtgttggtttttgagggcaactaacagccattcctgcataattagagataactttgcaaagaaatcaatatacgaatctccagaacagattttctttattatgaaggcgtgataaaaaagtagagcttacacctggaatctgagaagtaaaatgctgctgctttgagtgtgatactacaacaacaagaccgtctgtccagtcttgcttattagtggcatccataaaaatacaaaacttttgcaaactcctggccttcagtttctctggcattgctttttctcaaaagaactcttacacaattgttttaagccaacttatctttaattctgcaagtatctgtgaagccttggctaggggacaagttaagaaagtgtttctagttcctgggtctctaagattcaaacaagaaaaaaaattaaatctgcataaagaaatcatagagaggtgttacttctagttggtagttttgaaagcggttgattttagacaaatttaaatgatgatgtacttttaaagctttattttttctgaaaaaaaaatgggcttcagtataaagcaaaagcacattgcaaatgattaaataagcaacaaaactataggaggagagagagcaatctacaaattaaccccgtagtaccttgttttttgctgttttttttttttttttttttgagatcttttctaacttttctggataataataaatatttttcaaagctctcaaagcagaattttctcttaacactaaatcttttatgagctaaggagttttcctagaataaacattgaaaattaaaaaacaatatctggtccagaattcatttttatctgtctagtctgtttgactaattccttaaaaaacactacaggaaatacaatccaggtgtgagtccaaaaaatgtacatatacagatttagccctgtacactttcttcatcctcatgctcttcctcacccagctcattattgggagaggtgcgcttgggagccaagaaggtggagaaaatgatggggaagaaaacgtggggtttccatattttattgatttatttacttattcatttattgagacagagtttccctcttgttgcccaggctggagtgcaatggcgcgatctcggctcgctgcaacctccgcctccccgattcaagcgattctcctgtctcagcctcccgagtagctgggattacagacgcatgccaccacgcctagctaatttttgtatttttagtagagacggggtttcatcatattggtcaggctggtctcaaactcctgacctcaggtgatccgcccgccttggtctcccaaagtgctgggattaccgtcgtgagccaccgcgcccggccgggtttccctatttttatttgcccttgttcttggggactgatcttggtctggtaagagaaatcaggtgaaagtacacaatcataggttggagtaggagcttcagattttgacgcccctccccctacttcttataacaccctccctgagatcataaattcacagtttacaaatttacaggggaggaattgtggtggctttccaagactagtcccttttacatactgtgacctagttagatctcatttcttctgatcattcgcttgtcttatatttcggggggcagtgtggagggcggcgacgtcgctgacccgcgcgcggtgtgtggagccttctatttcagtctcttcactttaatacgtggtgccccgggacgttatcagagccagccacagatgccacatgtaaagcagcaaacatccggagtggcttcctgcaagccttgcttttctcaacacaagagatttacgcagggggttgggggaaacaactttcacaagtaagagccgagtacaccgctcgcatagccgttcgggtgcgttagcactgcacggtccagggtcgcagggctcctggctactaattgcgctcacgtccccgggtccttgggccggacccgaggctctaaaggctgggcaaggaagcgactagcgcaccaagaagctgtgcccgttgccagttggggcctttggtcagcgggcgcagaaattaactcgggtaggtggcgaaccgtggggctgacctggaggaatcagagccacgcttatccgtgggcccctgagtgaccaggcaaaggctgggtgatttccggcaggcttttgtgttttcgatgctgggaaagcaggggctggaggaaggacactcaagtcgatcgggaaggacccgtgggcacctaggcagatccgggttggcgctggagagcaagtctgtgggggcgggggaggggagtgcgcgccgcaaaccctgggaaaactccaggctgcccgtggatgactagacaatggtatccctgaacaaagaacaacaataaggcctttgcatttataaatcgtgcgcgggcggctgcctcccggaggccagcacgaggtggcgcgcggcggtggagcgcggccgagggtcccgcacctcccaggtagggcagcgcagccggacgccgccgattcgcacctcgcgtcccggcgccgtctaggcggcggtgccgcgccccttgatacctttaacgtctcctccttgtccccgggccagtaccccgtgggtccaggatggaggtcgaaggtcgcgggcgggaggggagtgtaaggggggaaggagtggcccggaaaatcgcggccaccggctgtgccgccgcgcgccccctgccttggaggcccgcaccaggtcggagccctgcagatgctgcagtgcgggtccgatccagcccctgcggtgctccactgctgcgccggcctctccccgtgaggactgaaaaaaagggcgacagcgagaggggatttggggacgcgcgttacccccgatgaccggagcatgcattttacttggacgccttctcccactccctccatgcgcatccctccctggttccgcggtgtcccctcgaggctgccccccaacccctccctggcagcgggcgactcttagaccgtgtccccgttcccgcttggccccgcctgggatttgcacaggcgaagcaggaaatgcgctgttcccggtccacttccctcttcagaaactcatccgtggagtgtttcttagatctccccacctccaactgtggccccgggttgaggtgtgtgggctacttccctttattgcctgggctgtggaacctcatactccagggagaggtggcgttgggaatgagggagagggtcccgttcctcacccaggactcgtcacatacacagtactgtcttgctcacccctttcagatctgcccctcagccttaaaagggatttcaatagcggcagagcttctatgcactcggtgctgcaggtgaactcctactcccactttccccatccacaccctaggagaaggcagggctttccttggagacctgtgtcctcacctgaccagacagccttatcagcagcgtgcccactgtgcgcagagcacttccactcccacccgaaggagaatagacgcggtccctgcctcggaggaatgtaccgtgccgtgtcattagtcttcctccctgattcattaacttccagctgggtgttctaggtatggtcttctgtaataatttgttcctggcatgtaaaggtgatgctgacatcagtaggtcaagcgctttgagattttttttttctagtagagataataggtttcctttccaccctgaaaactctggcttgccaagtttccctggtaagcagggctggattgtgccagatggttagggcaaggtgtgcattttgttatcatggaagtgatcaaagttaaatagggcataggacaggccacttctgacaacactcattacccactgttttgtacaactttagccacacacatgtcagattttgaaagggtatctgaattggcttccaaagtttctgaacagaagagaaaatgttagggatccttgctagattcctttgcagtcagtatttggttaacctgttaactaaattttcttctctgtccactttttggaccttgcaaaactgtcaatactctttaataacaacacagggtctttggtacatttcatctttatgtcctgagagcccacgcaattcactggtcttcaatatattcttcagtatactgttacagctgtcatggatggagtcctaaggtcatctccctacaaggcaaggcactgagaatgacctctgtagaccttagcaaaggcactgagaatgacctctgtagaccttagcaaagactgttctcatctcagacacatctgtgtaggcctgtggtcatctgacttcaggtctgtcatattctttttctcattcaccaggagtttagtctccagacattcattgagcatctgaaataccaccttttttgaggattaagtcaaattctgtttcttttctgaactgattccacttggagctccaggccaagaatgtaaatggataattttgcatgtggatataatgcaaaagcaaatgtctatatttggaaaatttttcgaaactgacctttagtattaacgtcttcataatggtagaggacagtttacaaagcagtttcactaatttctctgaccctcctgacagctctggaggtagacagtgcagcctttgttattagcctcatttttcagaagaggagattaagattgagaaaggacagatgatttgctcaaaagcacacaagagtgcttggaccagctatctgcccttgctgctatcagtagtgggtcttcaggagttggaggctgcaatgagccatgtctgtatcactgcactccagcctgggcaagagagcaagatcctgtttctaaaaaaaacaaaacaaaacattagtgggtcttgttttgaatttcttttcatgccatgtctacagccaataaagaacctaatggaaagcgcagggacaaaataaagacagtggatagacagagatggagtaaggacccttggcacagaaacttccagtgttatccctaactaggtcctgataatttttaaatattagagatgcagtgctgtaagaggaaagcattttcatttagaagatctataacttgatatttttattagatcatataatctaagccctagataacatttcatttaactattattttacacaaacaaattctgattcagctgaaaaaaagacagaacagttcagagttaaatgggaataaagctcatgtgtaaggaagttgaagttctcaaacttttgcccctctacttcacactcattcagatggaaagcaacttaattatactgaattgtggttttgttgcctgtttaaggtataagctgttagcctactctagacccactgcagatccagtcttaaagacataaaaacatacagcaggtaggtaaagtaaatgctctccattcttcctgttgtttggaagagaaatggatggcaaatattatcaattctgttttacaaagtgaaaaaataaggtacagaacaattgggtaatttgcttaatgctttcaaatcagcctaagagacaagagagtaatttgttcatttaatccacaaataattatccaacaactgtgaatctgaggcttggcacagcatgacacattggttatgaacacatatttggagttgaactgcttgggctggaattctagttctacagtttaccagtggtgtattccttggacacgttgcttaatcttctttagacctcatctgtgaactggaggatggtaatagtaatgacctcagggagttttatgaggatgaaatgaattaattattcataaactacttataatagggccaggcacatagtaagttctacacaggtatttaataaataaaattaaattaaataaatgcatgttagcttatgaaaacattgtgagaaaaaataaaataaaactaccacagtgttgagggtacatgcattatagcaactagatggaatgtataatatcatgtgttaacatctatgatagctagtaacaacattgttatactttaatcaaaattgtcttacactagcaaaactttcagagatttctctataaattattgttcattttctagttatatttgaatgtgagcatttttactctggtggtaaaagaagtctttgttttgtgaatgtcaaccttctaaaaccctgttacaaccggcaagcaaaaatacaattgcaaagaattcaatattctattagtatatctttgcaatgcaaagagatgctttgcaaatgggtatttacatgggtaggcctaaattcttctcctaaagacttacagaggcagagtacaatctcaataagtgtggctggtatcaagtattttaaaggaagaataacccacaaatgtactaacctaggctagatctttgtgttgtagagtgaaaagactaaattctagtctcggttgttcaataacttgctaccaggtaaattgcaagtcctcaccctcaattttcccaaaaaaagaaggggagaatgtcagatctttgtcagataaagaagtgaaaaaaatgatcacagacacctttgtaaagtaaaagtgctgagtaaaactgtgtgtgcgtgtgtgtgtgtgtgtgtgtgtgtgtgtgtctagggatataatgatttagagaaaattttctgtacagaaaaaaatagcaaattgagataaaacgcaagtcagggactgtaaagaagactatactgctttgggtaaaaatggaatgctatttttttatagagcaaaccctttttaaaattatttgaaattaattattgcacagagggtccctacctttgatccaggggaatgcagattctacttttatgaggaatgactatggatttactgggtttccattacgttagtaaagctaatcgattatttcagtggctaatctaaaagtagaatttgggaatttggacagagaatagataactctttctttttgacattttctggttatataacatttttacaggggctaaaaagggctatataactcacccccttccttccaagttccagaattcctagagagtattgaaaaatggaaatatcttccatatgaaatactacatattccactaaaaatgaaagtgtttgttacttataccactatataaatacacagatattcttttaaaatcacttattttgaaataatgtcaaacttgcagagaagttccaagaataacacaaagaactgtatcaccttttctgagactgctgtgttagctttctttttttttcagatggagtctcactgtcgcacaggctggagtgcagtggcgtgatctgggctcattgcaacctccacctctcaggttcacttgattctcctgcctcagcctcctcagtagccgggattacaggtttgcgccaccacaccaggctaatttttatatttttagtagagataggttttcaccatgttggccaggctagtctcgaactcctgacctcaagtgatccacctgccttgaccttccaaagtgctaggattacaggcgtgagccactgcgcctcaccagcattttatcttttgctccatctctatctaaataaacattttcccacatttgttccatctcattcttcttttctaaatatacatacacagaacaatagaaacatagaatacattagtatataatatattaatatagatactatataaatatgtaatatggatatattgttacatattctatattaaatcatatgcatatatgcatgccattagtctttttctgacccatttgagagcaagctgtggcacaatgtctcatcacttactccaaatactccagtgtatattcccctaaaatgtggacactctccccaaaaccatcaaataccatacaaattaggaaattgacattactaccatacgtcactaccatctaagccacatactcaattcaaattttgcaagctgcttcaacaatgcctcttttctctttctggcccaacatccaattcaggatcaagttacatttatttatcaaaggtcttccatatttttctgtctatcttataacctttatagttttaaagagtgcaggcctttcatgccaagaatgtcccacaccctggtctgtctatgttgactcacacattctttgtaggaaaatcgttgatatggtggtgtgctcccatcagggtatgacaaggaaggccgtcggacgtctcatcatcactggtgatgctaatctggtcacttcatcaagttggtgtctacccagtttctctaccttcaggtcactatttttcccctttgtaagtgagaattttgtgtgtgtctttgtgttgagaactctgacaatgaaatggcatgtattccttctactgtaaggaagttctcccttcttttatttgtttgtttatttgtatctctgtggattcctttctttttttttttttttttttgagatggagtttcattcttgtcacctaggctggagtgcaatggcatgttcttggctcactgcaacctctgcctcccaggttcaagtgattctcctgcctcagcctcccaagtagctgggattacaggtgcccaccaccacacccagctaacatttttgtatttttggtacagacagggtttcaccatgttggccaggctggtctcgaactcctgacctcaggtgattcgcccgcctcagcctcccaaagtgctgggattacaggtgtgattacaccatgcctggccaattgattctctttttattccctagattgtatcaatagtttgggtgctgcagttgccacagatttggccagtgaggtgcctttcgagctagctcctgtattcttttgatatgtccttataaccctttgaccattttcatagtttttagcacaacacgatattccaggctcgttttgaattttcccttcatttagccctagatccaggcatttctccaaggatcaagggcatctttttgtggaggatggcatttagaagtggaaatctgggttctcatcagtactgtactgtccctgcttccaggcaccctcaaaagacagagctaggaaataatgtatgctcatgtatgtatacgtgtgtgtccacatacatacatatctataactatttctaaatctacctctgtgtgtgtttatatatatatatcttgtgttagtctccaattccaatccaacatcttagggttctttctagactgctcctttgctgtatttgtaaatctcttttcccacagtgagaaacctggctcctgtttctctccatatgtgcacatatgtgctcactgtaatcaggctcccggccacaccactgcccgctcccagcccccatttttttggcttccaggcatgccagcgcctctgtgcaggctttgcccagcaccctgcttcctccatgccccaaagcgaaagaaagaaagaattacttgtttaaatctatttaaaaattattttaagtatcgagtgtgaccataaactctaagctaattgatgttttcgtcttcactccctttacctgctggcacgttcctcaggcatcagttaaaaacaaggcacaattttggtttgtcttgaatgcagtcactcatcgttttaaaactgtaagattgtaccattaagaactaaaatattggtggtgtgtgcctgcagtcccagctgcttgggaggctgaggcacgagaatctcttgaaccggggagttggaggttgcagtgagccaagatcacgccactgcactccagcctgggcaacaaagcaagactctgtctcaaaaaacaaaaaacaaaacaaacaaacaaacaaatattctttgcgtctggggcttttagtcatggctaaagcaaaactaggatttcttttcttaaaaaccataagggggccgggcgcggtggcttactcctgtaatcccagcactttgggaggcggaggtgggcagatcacgaggtcaggagttcgagaccagcctcgccaacatggtgaaaccccatctctactaaaaatacaaaaattagccgggtgttgtggcagatacctgtagtcccagctactcaggaggctgaggcagcagaatcacttgaacctgggagttggaggttgcagtgagccaagactgtgcaactgcactccagcctgggtgacagagcaagatttcatctcaaaaacaaaacaaaacaaaacaaaccctaaggaagaaagaggagtaagcattaaatagtattttccagatgtgttaataaaatatgtggcagctttgaggaaatatttcataaatatattgcctttccctgctgtcagccacacccacacacacattactctccatgattgtagatgaagaaaataatgcataacaagccagattgcatgacttgccccaagtgcagaggctggccaatctaatttatactgctgctttgcatgattgaattcccatgagtcatttccatcttcagtgtaagagggaaagttcagtggaactacattaaaatgaagatcaacccctctgtctccaaagcaggctcagtggctctctgaactctacatccctggtgtggtgctttctcttagagagctcaggagcggcactgctggcagccccaggaaacctgacagtgcgcaggtacaagtttagctacgggtcaagcacggtggctcatgcctatagtcccagcactttgggaggcagaagagggaggattgcttgagactaggagctcgagaccagcctgggcaacatagtgagtgcctgtctctacaattttttttttttttattatccaggcgtggtggtgcacacctgtagtcctagctactcgagaggctgaggtggaaggatcacttgagcccaggaggttaaggctgcagtgagtcatgattgcaccactgcactccagcctgggcaacagagcgagaccctgcctcaaaaaacaaaacaaacagataccccaaaagttagctgcagtggatgacctagggcacgtaaacaggctcttctcttcttggcaaatcttttctccctttccaggactaaaggaggaaaatctgacagggtcgtgtctacagaaaaggtgatgataggacatcccagagccagaaggggcagcctctggttaagcaaagactctgagcatgaatgatttaacaaatagcaatcatatgtatatgactaactggtttggtcattgtatgtagtgtgatccacaaatacctaacatgtcaactcagttttagggtggttgttcgaattgaagctttaattcttgagcagtctaagtcttcaacagttggagggcctatgctaatttgattttgccagtacatattttatgctgtttaacacatgaattataatggcatatttataaagatggttaacttatagctactttttaaccttttgcctagcatttgatttaggtacattttattagtgaatgctccttgcactttcttgtgtacatgcataacatcacaatcatcaattttgatttaatcctatgtaaatatcctatccatgctggtgacctacaaggtcccatatgaactggttctttcttttttttttgagacagagtcttgctctgtctcctaggctggagtgcagcacgatcttggctcactgcaacctccgccttccaggttcaagcagttctccttcctcaggctcccaagtagctgggattacaggcacccaccaccatgaccatctaatttttttttttttttgagatggagtctcactctattgcccaggctgtagtgcagtggcatgatctcagctcaccgcaacctccacctcctgggttcaagtgattcttctgcctcagcctcccaagtagctggtattacaggcattcgccaccaagcccggctaattttgttatttttagtagagacagagtttcactatgttggtcaggctggtctcgaactcctgacctcaagtgatctgcctgcctcggcctcccaaagtgctgggattacaggcatgagccactgcgcccagccaaagtggctcattcctatccttctactcccatccttcatgactctgccttcatcacagtgttctagtcaactggcttctggccattcccagaacatgccaagctcctttttgctcgaaactcatattctcttgcctatgcctggaactacagtcccctcattcagcgacacctactcagagagacatcctacctagaatcgttactgtcccccacctcctccacaaacttgtgacacactgttctctgctttataattttttaaagcactcattactagcagtcattatgttctatatttatttgtattgtctaccccctgcccattagaatgctagctctcaggggtgttacctgtgttgttcattgctgtacccagccccccatgcccagaactgctggcgactggcccatcgtgggaactccgcaagatttgttgaatgaatgaaagatcacctgagactgagccttactgaaggatttctttaaagcccacagagggaccaaagctgggcaagcatttgactcttggttagtccttgaccacacattttcacgtctcctcttgttctttaaaacactcttcccccttagagattttattgaagcctcattatgtcactttaagaggaggaatgtccccttcaggggacccctatggacatgtatttcattaacagagcattatctcacagagcaagcaggaacttccaaaagaagggtgatggttataagagcctctaaataattttgactgattaggtatcttaatccagttgccggttaattatgtttgtttgtgattaacaatatgattttcacctgctccccctccacaatctcccctgtgtttggagaaagccaatctccctgcccactgcatatctgctgtgagctctttgaaggtgtttgctgaggagatgagaccacagctatcacctggagccaggagctgggaagaaggaatccctgccaagccacctgcaggttgactcagaaagttccttacgcccaagtcaaacaacgggagatctgaagacagggctccctccccaccccctcacccctcacttgtgtcactctttctatggagaaaataactcagtcattgaaatgcccatcaaaattcaatgttctcactgattacctgtggagaggaatcaggtttttcctttatttccaatctgtcacacagtagtacttttaacatacattaaaaataaatcactagaagaataaaataaaggcatacaaaatacacatttttttattctagatttcagcaggtgtcagattccattcaaattgctcccaaattcccaacctgcttacttgcagtttctgtacttcccctgcaggtgggatacaaacagttcacagggggccttaaaacagcagcccttttttttttttttttttttttttttgccattttatgttactggtccttattttttaaaaaaaggaaaaataatgagacctcaaactgattataaaagtgaaattagataaaaacttctatcactcgtaagcaccagatgaacactatgccatatattgactgcattcgctatcgcacagctaggttatttgcctggccattcagatccagggaccttggtgagtggagacgtgaatgccttcaacttcgctgctgggatttagtgtaggtgcagactgagtgaaacgactgaaaagcaaactacgcagtgatgaggaaagggggaattggagttttcaggttaacttaaccttccagtgacctgcttctcaatcacagatttgaattctttcttctgttgccaaatatttaaacctattttattaaccatagctactcctacccatcgaatatttctttttctgttttactgatggagaaatagaagtgaagtttctaatagtcaatccaggggatctggtggcagaagcccaaactaaggggtttagttcttcaccctctttagagtgggcgtcccctcggctgtgcccgctgttccgcctgtgagatgcgacaggcctgctccacacctgggaggtgccatttggctttctaatgggatcagcgtttttgtccaaactctcctcacctagatatttcaagtcatgccttccaccctatcctccaactcagtgtaacttctgactttataaatacacttggagtcccttaaattcccatcttccttttgtttccaccacatgcagccaacagagagctgtagttgcaagtttccatatgtgaaaaattataatatatgaaacattgattgctttgtactacttattaccatactaaagcctttgttcagacagaggacttaaaattattatttgatgtgccattgtattttccaggcagacacttgaactgtttatcctcaattcctttcattctaaattgcaaatagctgtactctcgaagatgcttaaattgggtagccatattccttgcatgttacatttctttataaatagcttttttgaattcaaattattttattttattattttatatatctgtacattttctctaacccaggcatccacaaacatcttcaagtcttttagagtgggaactttctgtatggaggagatccaaaattgtgaaagggtcaaaattgctatagtacagaatagtacacaaaaggggaaaattatttcttttgtagatttattttcagatataatagacttgcacaatatatttaaaatggtatgtagcttcgtaaagaaaaaagttgttacaatagttggcactgctttctaaaggacaagaatgtggaaaaattattgttttacaaaataaaataataatgacagtgtgtacagtacttttatatacatacttcaatttcatcatcaaaattaccctaccagttagatattcttactcttttcattttttttctacaagagaaaatgaggttcaaaaggatgaaatggctcccccagggtcacacaagaggaagaattgaatcttctcattccatagtttgtgccctctgtgtcccaaactgctaacatggttttacacatgtaaagagggaaattattagccactgtagtatttatccaatgctcgaaggactccagttcactttttgttttttttgagacagagtctcgttctgtcacccaggctggagtgcagtggcgcaatctcggctctctgcaacctccacctcctaggttcaagcgattctcctgcttcagcctcctgagtagctgagattaccggcacctgccaccatacccagctaatttttgtattgtcagtagagacggtgtctcgccatgttggccaggctggtctcaaactcctgacttcaagtgatccacctacctcggccttccaaagtgctgggattataggcatgagccactgcacccagctcagttgaccttgattactaagagcactctgtcttggttcaaagacagtagaacatgcttcttattaaatattttagtgaggatactttctatgtccataaactaggtgtcaataatgaatatagtaacccagagcatcctacatttagctgataaactcctaaaggagtgtccttcaaagagttttccaaactttttttgacagaggttctcctaaggggatctgcagagaaccctgggtatctgtattcaagcaccccaagcttgaatacagattaaattatgttccctagccaagactgggatgcaatgctttaatatattaaaagtggtaaaagattaatgatattccatagaactgttgcaacatagattaaaactataattatgctaagcttaaattcaaggtgcccgagtactattattcctaaaaagtcaacaacaacaactaggttcttagtcccctcattatttgtaaataataaaacttctaaggaaaagatccccttaacttcatcttattacttttttccataagagagctagagccttggtaatctttaatgtcagaaggaaaaaaaaattatgacttgaagctttgttgagtacatcttcttttgtgattccagtagtgtcttactcccagaaagaattaattttttatatctttcatagctattttgtcctaattttgctgacagagttcaggtcacaatgtagatcatcttgttaaaactgaccaccttgttttattcttctttatacttactccttacctctttgtacaactttttgacacaaattattaggtgcttaataaatactaattggttgtaattccagttgattaagaatgatggaaaaggacttggtatccctatgagttttgtttttttttttttttttttttgagacggagttttactcttgtcacccaggctggagtacaatggtgcaatcttggctcaccgcaacctctgcttcccgggttcaatcaattctcctgcctcagccttctgagtagcttggattacagatgcccaccaccaagcctggctaatttttgtatttttagtagagacggggtttcaccatcttggccaggctggtctcgaactcctgacctcaagtgatccacctgcctcagcctccaaaagtgctggaattacaggcatgagccactgcacccagccctatgaccttcttaagccctgtttcctacatgttcattttgattgtgagaatcttgagttttcttgtatggtcttctgtcacttaacaatggggatgtgttccgagaaatgcttccttaggcgatttggtctttgtgaaaacatcctaaagtgcacttacacaaacctagatggtgtcacctactacacacctagtctatgtggtataacctattgctcctggctgcctagcatgttactgtactgaatactgtaggcaattataatgtagtattacatgcacaaatgtatttgtgtaactatgcatatctaaacacaggaaaaatactgtaaaaatatggcattatcatcttatggggctgcagtcatatatgaagtctgtcgttgactaaaggttcctgtggtacacgactgtatgactgtatggttaataatgccaggcacatatggaaattcaatctgcctacatcaactacacatctaccagtggattttcatagccctgagttccatgtcattttcagaatgttccaaatgacaatccaaattatttataagcatttgcagaccactcttttataaatataaccattttgaatgttttattgctataacaacagacattaaaaacctttagaaacatgattaacaataccatgaatctagataagggataaatggaggttttccgtacaatgttttttagccactcttttgtaaatttgaaaagattcccaaattttaaaaaattatttaaacacgaaaccttaaaaacattatgctaactgaaagaagcccatcacaaaggaccacaaattgcctgattccatttatatgaaatgttcaaaataggcaaatctgtagacttatgagttgcttagggctaaaggataaaaaaaagcgttgaggggtgatggctaaaaggtgtgtggttctttttggggtgatgaaaatgttataaacttgattatggtgatgattacacaagtctgaatataccaagaaatcagtgaactgtacacgttagatgaggaaattggtatctaaattatatcttaataaagcagttatttcaaaaattaaaagtcagaaacaatcaaaagacatagatattaaaagtcttgtttgaaattgaaaactggttgaaaggtgcagccactttacatagcaccagtcaagattctttctttcccctcccctcccggacgaagcacattccacattcccagtaaatggattctctcctcctccagggtgggtagtagaaaaatgttctagcacataaatgaatcaatttatgagtagtcaggataatgttaacatctgacaagtttgattttaacctttatctgtaattttgtgtcttatgttcaacgtgaattcatagatatttctggaagagcttttgcctaagacattgtacaaatcaattcagaattctgaatggcatgcttcctttcttcccatcttcctgcctggaatgggtaacatgagttttcactctctctttctcagttttattaaaattaaatggcaatgaaggtttgtgcaggaatattgatgaacttagagagataagtttaccttaagttacccaagttaaaaatgacattcaggtaatcacacggatggaagaaaatccacttaacatacaacccttgtttccctgattatgtatgggctagtattttttatcaactttccactcccttgttcattttgggagttagtgaagtattccagatgaatttagcttcatgttccactatattgagtaagggtgggattggatgaacctgaaaaatatttgtgtaggaggaaatttttatcagtagtcaatattccacctttttacataagaaatgaaacaattttgcaaatggatttaaaaggcacatagccatgttctgtgtgaaaatgttttcttctggtgcctgtggactctgacacagagaatagttatttctctgcaaattgagctttatactaaccagattgtttttatttaaccatgagtgtctgtgacaatatgacaaaacatgcaaatcgctagagagttctgcttgggtccaagaacatatcacttcagcatggatcaagacagcaaagtgcaggtgatgtggcatcattaccacgcagagggttagcaaatgattttaccaactgcagtttaaacatcttatttgtccttccttcctcaaaggggaaacatgttttctaaaattgattgtggtcgtttttctgtttggaaacatttgctagaagagaaaataggagttctaatgttaaatgattaaccaagggcttattattcagtttttaaatttatgaagattttttttctaccaaaacaaagtgtattatagtcagaatgaataacttttactcatttcagggtattttattaccctatattttgaagaagttagtcatttttatttgggaccagaaaaaagagtcagcctttttttttttttttttttttttttttttgagacggagtctcactctgtcgcccgggctggagtgcagtggcgcaatctcctctcactgcaacctccgcctcccggattcaagtgattctcctgcctcagcctcccaagtagctgggattacaggtgcccgcctccacgcccagctaatttttgtatttttagtagagacggggcttcaccatcttggccaggctggtctcgactcctgacatcaggtcatctgcccgcctcggcctgtcaaagtggtgggattataggcgtgagccactgcgcctggtcagaatcagactttttgatagccaaatggatgatttacctgtgcccactttaacctccttctgatattcccgtaggaatggaattctctacttctgtagaaccagataattcctaatataaaacatgaaaacattgtgaataaattttaagatccaaagaaagacaggcttattttgtggttcccaaacaagaaacaaaaccaacaaaaaacaacaacaaatttgaatttaaaattgtgtgtctgctattgtaattattcacatgtgcttataaacacactctgcatttctgatttccctggattaccctatttatatagaactaaaattgcagcttgggcagcatgccactctcatggcatagcaaattagacttggatatcccagaaagtggaagaaggtttaataattataattcatagcaaattagacttggatatcccagaaagtgggagaaggtttaataattattgttttgtatagtattctaatttttcatatattttttaaagtttacacaatttcagaagacatagcttcttaatattgtcacatagcatatttaactcaaatggggtgactatcagtagaacagatacctgttctataatatcacctacactaaatacttctatgttatagtttacaatctcaatttgaattttgagttatcagaggcaagataattttctagaagggccaagccattcagttttgcttaagatcagctctgaacttggtgacactcatgaatcccagaagcctatcccaaagtattagttagtagaaggtacccctaagatatctaagaaaataacatattgtaccaaatacagtatcattagttctgtttgaaataaatataatttctctcatgaaaaaaggaactttgaattttagaaggtagtcattttgacctacctttttacactggaattactttattaagttagatcaaacacaggctctttgcctcaactaaatggacatgctaaactggctccaaagttgatttgtggaactcaattatggacttcacaaagtgttcaaggttacttttcaatttgtttcagccagaatcaataaatctctcacctggtttctttgctgtacgtattgtactggttaatcatgtatatacatggcatagcaaattagacttggagaaagagttttctgatggaagccaatttttaactactgtactgttgaaattttaaaacaaaggaaaactccttctgtttattattaaggtgtgatgggaactaagagccataaataattctgctggccaatttccagaactggaagtaaaaagagagagaaatgtgggcaagggaagggaagggaggaaaagaaactatcttctgaaattgtttccttgaagaattgcaacatctaagaaattcttaatattaatagagagccacgggtgcccaaaaagaaaaggaaatagttctacacatatggatgcaagctttcttaatacatacataatattttaaaagacatcacaaaatgctttctagagactaaaaattaaacttcaaatttatgtgggtaaacgtggaagagctgtagcagagaaaattttaaaaatcatatccacagtaaccccttccccatggtagctcccctctcttttccctgggctaccctatttatatagaactaaaattgcagcttgggcagcatggtgagaccctatctctacaaaaacgtttacaaattaaaaaatttgtcaggcatggtggttgcgtgcctgtggtcccagctactggggggttgaggtgggaggacttcgtgaacccaagagttcgaggctgcagtgagttgtgattgcgccactgcactccagcttgagtgacagcacaagatcctgtcttaaaaaataatagtaaaattaaataaaataaaccaaaataaaataaatataatataaaatataaaaaatatataaaataaaaaataataagcagaactaaaattagaggtttcatctaatggtggatggatgtagcatgtacttcaatggtgcccaatcaacctaattctgccctaactgagctgaagaaactgcgctggacgtcacaacacccgagccccatctcgtgctcaatcttgtgctggttgtgcagctaatatctgtgtggctttggcctaatcatcttgtttcttccttcacagaataaaaggactgccctacatgactcttaggtgcctttcatttatcacattctgggccgtagttctttgcatggcaatgagatttcaaaactcccacctctctgataaagtggagaagtagaatatttttaaccttatcgcattctagcatatattagtataaaaattacctggggaaggatgtgataggtttgaaatagcttccatggatctgcattttcacctagcttctgcagattcttacctagattgctcctaaaacctggagtgaagactagccctaggatatctcttaagcttctaatgcagaagaaggctgtgaaaatcaagacttttaaaatgacttttcctaggggtatctttaacattctgaatgaaaataacagcttttgcactgaggaaattaacatataggaaaggcagttccaggaaggagagcaattgtcatagctgggggacaatttctaggtttaagatgcttgttcatattgtttgctgaaaagagtatagagataaggaatgataagaccaatgtctctttaattttagtggaaattatttgctgtaaataaagcactgtaatactcacattcattaaatctaaatataaatagttttatattccttaataccatgaaggatgtttcacatccttctatatgattcacatctcatatctctttttctagtcttgctcattctgaaggtatttttaaatcaatgtcacaagttgacaatggtggatctagtgctgacccattaacatctttttaagatgttacatataaaattcattctttaaaagtgtacaaattcagtgatttctagtatattgagatatctggaaccatcatcaccattaatttttaaatgttttcgtgaccccataagaaacttttagcagtttatccccccagatatggcccaaagaaagaactaccctatttcatatctctatagttttgtctatttgagacatttcacagaaatttcatatctctatagttttgcctatttgagacatttcacatataacacatatggagttataccatatgtggtcttttatgactggcttctcttagtgcaatgttttcaaagctcatttgtgttgtagcatatatcagcatttcatttctttctatggctgaattatattccattgtgtgctatgccaaattttatttatccattcatcaggtgatagacatgtggattgtttgtttccactttttgactactatgaataatgctgctatgaacatctgtatacaagttttttatctttataattatttttggtggaattgctggaccatatggtaactaaccttaaccattttaggagctgacagattgttttccaaagtgtcggcaccatttacaaatcctaccaaccatgtacgagggttccaatttctccatattctcgccagtacttggtattatctatcttttttagtacagccatctgaatgggtatgagtcagaatcctaccgtggttttgatttgcatttccctaatgactaatgatatcgagcatcttttcatgtacttactggctatttgtgtacgttctttggaaaaatgttcagactcttttcccattttaaattgagttgtttgtctttttattattgagccttaaaagttatttttatgttttagatacaagttccttatgagatatacgatttgcaaatgatttctccctagttgccttttcactctcctaatgatttccttggaaacacaaaacttattaattttgatgaaatgtgtttgttctgtttttctttgattgtctctgcttttggcgtcagatctaagaacttactgcctaatccaagatcatgaagatttatatttatgttttctattatgaattttaattttagttcttacatttaggagtctgagacatttaaaaagttttacttttttattatagtaaaacacacatacaataaatttactaccttaaccattttaagtatacaattcagtagtgttgattgtattcacattgttgtgcaaacattgccaccatccatctccagaatggttttaccttcccaaatgggaactgtatccactgaacaacaatccgaatttctccccgcccccagccctggcagccagcattctactttttgtctctatgaatttgactacctcttataaatggaattctacagtctttgtctttttctgattggccagtttcatttagcatgcccccaaggttcatggatgttgtagcatgtgtcataatttccttcctttttaaggccaaataatagcccattatatgcatatattacttttttaaaaagtaatggagacaaggtctcattattttgcccaggttggtcctgaactcctggactcaagcaatcctcctgtctcggcctcccaaagtgttgggattacaggcatgagccaccatgcctggcctatatattacattttgtttaggcatttgatccattttgatttaagtgtcatttatggtatgaggtaggagtccaactttattgttttccatgtgcaaatccagttgtctcagcaccatctgtggccagttcattcttagcacagataagtaactgaatttaaataacatcattatttcaaactcaaatttctgtggaaaaccattttaaaggcggtttcaaaagatatagagcacattcaagatactttgtgtataggtgacaatatgtatttcaagacaaacataacaaacaacatgtgacaatgtcatgttgttgtttcttccccgttctctagaattttcttttcctttttcttttttctttttctttttttttttttttttttttgtagagacaaggtctcactatgttgcccaggctggtcttgaactcctcgactcaagccatcctcctgcctcaacctcccaaagtgctgggattacaggcatgagtcactgaacccagcctagaattttctttttactgttgaaaagtagactatcactgcatattctacttcaagggtattgtgaagctaaataatacaaatcataacctagaagaattccatatttatattattaccaaaatttaagtatatgtttatatttaaatataatagtcataataaagcatgcatacaggcatatacactggaagaaaaagaatcattaaaattacttctgctctctttggtgggaatgtctgtcaccaagaatcaatatgtacttcactaccaataggtggcgctaaacatttagtcaggattttattcatttttaccttgctcaccgtatacataaccatagcttcccgtggaaaagagaagcaacttataaaaaagattcaaaacgatcaggaagaaatgcgctctcttctcatcccaattcagtcatgttcaaaatggcaataaatgaaggcagctttcaattaaactgagcaacagggacaagtttacagatttgagttgctccaacatcccataagaaaaggccttcttactactcttcaggtggcccttgaggtcaaggacacaatcagatcctcttggagccaccaaaaagtatccgggtaaactggagggtttttgttgttgttgttatttctttaagtcttgagaggaaaaaaatgcatttacagcagagaaacatatacaactgactccggacagatgttcaagaaccaatcaaaagacacatgcttgataacaggacaattatttgcatgtattttctttcttttttcttttgtctttctttttttttttttgacaaggtcttactctgtcaccgaggctggagggcagtggcgccatcacggctcactgcagccttgacctccctggttcaagccatcctctcacctcagcctcccagagtgctggaattacaggagtgagccactgcgcccagcctgtttgtattttctgtgttattacaacagttatcaatcttcatcactggtaaatttataattatatacatacatatgtctttgtatagatatatactcacatatatcctattgattgttgtcacattaatactgaaaaatgagtaattttaaaactgatcttttacattaaacatctatatattacaacattattacatattaagtagcattgtgttttgggtcaacttgatttttatttatggtgccttacaccattgagagattgcatttaaacaagtaagcctcatgctatcatttactgttccctaggaaacagaagtctaatacgcaggataaagctgcaaaacaaatgacccttcacctccaacccatctcgagagtatggtgatctcttttttatagatttcttggctttggataaatttgggatgatatgggaattgtcccagagtcctgccaaatgctcaatccaaagagcctctgaaacctctccttagtcctagatctctccagttttgttaaatttttccaggcttctctgaaacagagcaaactgtatcagtttttcagcatccttggtgagggttaaaatgcttgcattcttttttttttttttgtcctctgtaaaatgcaatttactaccaagctagaaatcctcccccattgaaataatatcaagccttacatgctacaacagaaagtatctactatgtttacacttactaaattgaaaatacatggataggatgagcaaaatttttatttttattttctatttattttatttatttattttttgagacgaagtctggctctgtcacccaggctggagcactatggcacgatctcgcctcactgcaacctctgcctcctgggttcaagtgattcttctgcctcagccttctgagtagctgggattacaggcgtgcaccaccatgcctggctaattttttttgtatttttagtaaagatggggtttcaccatgttggctaggctagtcttgaacacctgacctcaggtgatcgcctgcctctgccttccaaagtaccgggattacaggcaggagccactgctcctggccaagcaaaatatttttaataaattcagataatgcaataaatgaagtttcttcacaaatcctttccccccagcaataaactctaggtgtttaaaatttcaatgaactcagttccgttaaaatatacttactggttcatttaaaaattttattggttcatttgaatttatttccaataatttttagaaatttaggtttatttagcatttataagaaacagttgcccttcttggcaggattccattgcatgccaagtacacatatatttttatcacagtccaggggagtgcttgaaggcaggaaaactataggtagattgaataagttcatatgcttagctagcttaagatggtacggtgttctgggatcagcctgagtcttcagttctccctttggatttcacatataatggcagaggaattgtttagtgtttttcagagtagagttcatgggcctgaggaattc

SEQ ID NO: 36 - DNA, 28445 bp, Artificial sequence
  Sox17 GFP reporter BAC (RP11-53M11) upstream region
gaattcctcaggcccatgaactctactctgaaaaacactaaacaattcctctgccattatatgtgaaatccaaagggagaactgaagactcaggctgatcccagaacaccgtaccatcttaagctagctaagcatatgaacttattcaatctacctatagttttcctgccttcaagcactcccctggactgtgataaaaatatatgtgtacttggcatgcaatggaatcctgccaagaagggcaactgtttcttataaatgctaaataaacctaaatttctaaaaattattggaaataaattcaaatgaaccaataaaatttttaaatgaaccagtaagtatattttaacggaactgagttcattgaaattttaaacacctagagtttattgctggggggaaaggatttgtgaagaaacttcatttattgcattatctgaatttattaaaaatattttgcttggccaggagcagtggctcctgcctgtaatcccggtactttggaaggcagaggcaggcgatcacctgaggtcaggtgttcaagactagcctagccaacatggtgaaaccccatctttactaaaaatacaaaaaaaattagccaggcatggtggtgcacgcctgtaatcccagctactcagaaggctgaggcagaagaatcacttgaacccaggaggcagaggttgcagtgaggcgagatcgtgccatagtgctccagcctgggtgacagagccagacttcgtctcaaaaaataaataaataaaataaatagaaaataaaaataaaaattttgctcatcctatccatgtattttcaatttagtaagtgtaaacatagtagatactttctgttgtagcatgtaaggcttgatattatttcaatgggggaggatttctagcttggtagtaaattgcattttacagaggacaaaaaaaaaaaaaagaatgcaagcattttaaccctcaccaaggatgctgaaaaactgatacagtttgctctgtttcagagaagcctggaaaaatttaacaaaactggagagatctaggactaaggagaggtttcagaggctctttggattgagcatttggcaggactctgggacaattcccatatcatcccaaatttatccaaagccaagaaatctataaaaaagagatcaccatactctcgagatgggttggaggtgaagggtcatttgttttgcagctttatcctgcgtattagacttctgtttcctagggaacagtaaatgatagcatgaggcttacttgtttaaatgcaatctctcaatggtgtaaggcaccataaataaaaatcaagttgacccaaaacacaatgctacttaatatgtaataatgttgtaatatatagatgtttaatgtaaaagatcagttttaaaattactcatttttcagtattaatgtgacaacaatcaataggatatatgtgagtatatatctatacaaagacatatgtatgtatataattataaatttaccagtgatgaagattgataactgttgtaataacacagaaaatacaaacaggctgggcgcagtggctcactcctgtaattccagcactctgggaggctgaggtgagaggatggcttgaaccagggaggtcaaggctgcagtgagccgtgatggcgccactgccctccagcctcggtgacagagtaagaccttgtcaaaaaaaaaaaaagaaagacaaaagaaaaaagaaagaaaatacatgcaaataattgtcctgttatcaagcatgtgtcttttgattggttcttgaacatctgtccggagtcagttgtatatgtttctctgctgtaaatgcatttttttcctctcaagacttaaagaaataacaacaacaacaaaaaccctccagtttacccggatactttttggtggctccaagaggatctgattgtgtccttgacctcaagggccacctgaagagtagtaagaaggccttttcttatgggatgttggagcaactcaaatctgtaaacttgtccctgttgctcagtttaattgaaagctgccttcatttattgccattttgaacatgactgaattgggatgagaagagagcgcatttcttcctgatcgttttgaatcttttttataagttgcttctcttttccacgggaagctatggttatgtatacggtgagcaaggtaaaaatgaataaaatcctgactaaatgtttagcgccacctattggtagtgaagtacatattgattcttggtgacagacattcccaccaaagagagcagaagtaattttaatgattctttttcttccagtgtatatgcctgtatgcatgctttattatgactattatatttaaatataaacatatacttaaattttggtaataatataaatatggaattcttctaggttatgatttgtattatttagcttcacaatacccttgaagtagaatatgcagtgatagtctacttttcaacagtaaaaagaaaattctaggctgggttcagtgactcatgcctgtaatcccagcactttgggaggttgaggcaggaggatggcttgagtcgaggagttcaagaccagcctgggcaacatagtgagaccttgtctctacaaaaaaaaaaaaaaaaaaaaagaaaaagaaaaaagaaaaaggaaaagaaaattctagagaacggggaagaaacaacaacatgacattgtcacatgttgtttgttatgtttgtcttgaaatacatattgtcacctatacacaaagtatcttgaatgtgctctatatcttttgaaaccgcctttaaaatggttttccacagaaatttgagtttgaaataatgatgttatttaaattcagttacttatctgtgctaagaatgaactggccacagatggtgctgagacaactggatttgcacatggaaaacaataaagttggactcctacctcataccataaatgacacttaaatcaaaatggatcaaatgcctaaacaaaatgtaatatataggccaggcatggtggctcatgcctgtaatcccaacactttgggaggccgagacaggaggattgcttgagtccaggagttcaggaccaacctgggcaaaataatgagaccttgtctccattactttttaaaaaagtaatatatgcatataatgggctattatttggccttaaaaaggaaggaaattatgacacatgctacaacatccatgaaccttgggggcatgctaaatgaaactggccaatcagaaaaagacaaagactgtagaattccatttataagaggtagtcaaattcatagagacaaaaagtagaatgctggctgccagggctgggggcggggagaaattcggattgttgttcagtggatacagttcccatttgggaaggtaaaaccattctggagatggatggtggcaatgtttgcacaacaatgtgaatacaatcaacactactgaattgtatacttaaaatggttaaggtagtaaatttattgtatgtgtgttttactataataaaaaagtaaaactttttaaatgtctcagactcctaaatgtaagaactaaaattaaaattcataatagaaaacataaatataaatcttcatgatcttggattaggcagtaagttcttagatctgacgccaaaagcagagacaatcaaagaaaaacagaacaaacacatttcatcaaaattaataagttttgtgtttccaaggaaatcattaggagagtgaaaaggcaactagggagaaatcatttgcaaatcgtatatctcataaggaacttgtatctaaaacataaaaataacttttaaggctcaataataaaaagacaaacaactcaatttaaaatgggaaaagagtctgaacatttttccaaagaacgtacacaaatagccagtaagtacatgaaaagatgctcgatatcattagtcattagggaaatgcaaatcaaaaccacggtaggattctgactcatacccattcagatggctgtactaaaaaagatagataataccaagtactggcgagaatatggagaaattggaaccctcgtacatggttggtaggatttgtaaatggtgccgacactttggaaaacaatctgtcagctcctaaaatggttaaggttagttaccatatggtccagcaattccaccaaaaataattataaagataaaaaacttgtatacagatgttcatagcagcattattcatagtagtcaaaaagtggaaacaaacaatccacatgtctatcacctgatgaatggataaataaaatttggcatagcacacaatggaatataattcagccatagaaagaaatgaaatgctgatatatgctacaacacaaatgagctttgaaaacattgcactaagagaagccagtcataaaagaccacatatggtataactccatatgtgttatatgtgaaatgtctcaaataggcaaaactatagagatatgaaatttctgtgaaatgtctcaaatagacaaaactatagagatatgaaatagggtagttctttctttgggccatatctggggggataaactgctaaaagtttcttatggggtcacgaaaacatttaaaaattaatggtgatgatggttccagatatctcaatatactagaaatcactgaatttgtacacttttaaagaatgaattttatatgtaacatcttaaaaagatgttaatgggtcagcactagatccaccattgtcaacttgtgacattgatttaaaaataccttcagaatgagcaagactagaaaaagagatatgagatgtgaatcatatagaaggatgtgaaacatccttcatggtattaaggaatataaaactatttatatttagatttaatgaatgtgagtattacagtgctttatttacagcaaataatttccactaaaattaaagagacattggtcttatcattccttatctctatactcttttcagcaaacaatatgaacaagcatcttaaacctagaaattgtcccccagctatgacaattgctctccttcctggaactgcctttcctatatgttaatttcctcagtgcaaaagctgttattttcattcagaatgttaaagatacccctaggaaaagtcattttaaaagtcttgattttcacagccttcttctgcattagaagcttaagagatatcctagggctagtcttcactccaggttttaggagcaatctaggtaagaatctgcagaagctaggtgaaaatgcagatccatggaagctatttcaaacctatcacatccttccccaggtaatttttatactaatatatgctagaatgcgataaggttaaaaatattctacttctccactttatcagagaggtgggagttttgaaatctcattgccatgcaaagaactacggcccagaatgtgataaatgaaaggcacctaagagtcatgtagggcagtccttttattctgtgaaggaagaaacaagatgattaggccaaagccacacagatattagctgcacaaccagcacaagattgagcacgagatggggctcgggtgttgtgacgtccagcgcagtttcttcagctcagttagggcagaattaggttgattgggcaccattgaagtacatgctacatccatccaccattagatgaaacctctaattttagttctgcttattattttttattttatatattttttatattttatattatatttattttattttggtttattttatttaattttactattattttttaagacaggatcttgtgctgtcactcaagctggagtgcagtggcgcaatcacaactcactgcagcctcgaactcttgggttcacgaagtcctcccacctcaaccccccagtagctgggaccacaggcacgcaaccaccatgcctgacaaattttttaatttgtaaacgtttttgtagagatagggtctcaccatgctgcccaagctgcaattttagttctatataaatagggtagcccagggaaaagagaggggagctaccatggggaaggggttactgtggatatgatttttaaaattttctctgctacagctcttccacgtttacccacataaatttgaagtttaatttttagtctctagaaagcattttgtgatgtcttttaaaatattatgtatgtattaagaaagcttgcatccatatgtgtagaactatttccttttctttttgggcacccgtggctctctattaatattaagaatttcttagatgttgcaattcttcaaggaaacaatttcagaagatagtttcttttcctcccttcccttcccttgcccacatttctctctctttttacttccagttctggaaattggccagcagaattatttatggctcttagttcccatcacaccttaataataaacagaaggagttttcctttgttttaaaatttcaacagtacagtagttaaaaattggcttccatcagaaaactctttctccaagtctaatttgctatgccatgtatatacatgattaaccagtacaatacgtacagcaaagaaaccaggtgagagatttattgattctggctgaaacaaattgaaaagtaaccttgaacactttgtgaagtccataattgagttccacaaatcaactttggagccagtttagcatgtccatttagttgaggcaaagagcctgtgtttgatctaacttaataaagtaattccagtgtaaaaaggtaggtcaaaatgactaccttctaaaattcaaagttccttttttcatgagagaaattatatttatttcaaacagaactaatgatactgtatttggtacaatatgttattttcttagatatcttaggggtaccttctactaactaatactttgggataggcttctgggattcatgagtgtcaccaagttcagagctgatcttaagcaaaactgaatggcttggcccttctagaaaattatcttgcctctgataactcaaaattcaaattgagattgtaaactataacatagaagtatttagtgtaggtgatattatagaacaggtatctgttctactgatagtcaccccatttgagttaaatatgctatgtgacaatattaagaagctatgtcttctgaaattgtgtaaactttaaaaaatatatgaaaaattagaatactatacaaaacaataattattaaaccttctcccactttctgggatatccaagtctaatttgctatgaattataattattaaaccttcttccactttctgggatatccaagtctaatttgctatgccatgagagtggcatgctgcccaagctgcaattttagttctatataaatagggtaatccagggaaatcagaaatgcagagtgtgtttataagcacatgtgaataattacaatagcagacacacaattttaaattcaaatttgttgttgttttttgttggttttgtttcttgtttgggaaccacaaaataagcctgtctttctttggatcttaaaatttattcacaatgttttcatgttttatattaggaattatctggttctacagaagtagagaattccattcctacgggaatatcagaaggaggttaaagtgggcacaggtaaatcatccatttggctatcaaaaagtctgattctgaccaggcgcagtggctcacgcctataatcccaccactttgacaggccgaggcgggcagatgacctgatgtcaggagtcgagaccagcctggccaagatggtgaagccccgtctctactaaaaatacaaaaattagctgggcgtggaggcgggcacctgtaatcccagctacttgggaggctgaggcaggagaatcacttgaatccgggaggcggaggttgcagtgagaggagattgcgccactgcactccagcccgggcgacagagtgagactccgtctcaaaaaaaaaaaaaaaaaaaaaaaaaaaaaggctgactcttttttctggtcccaaataaaaatgactaacttcttcaaaatatagggtaataaaataccctgaaatgagtaaaagttattcattctgactataatacactttgttttggtagaaaaaaaatcttcataaatttaaaaactgaataataagcccttggttaatcatttaacattagaactcctattttctcttctagcaaatgtttccaaacagaaaaacgaccacaatcaattttagaaaacatgtttcccctttgaggaaggaaggacaaataagatgtttaaactgcagttggtaaaatcatttgctaaccctctgcgtggtaatgatgccacatcacctgcactttgctgtcttgatccatgctgaagtgatatgttcttggacccaagcagaactctctagcgatttgcatgttttgtcatattgtcacagacactcatggttaaataaaaacaatctggttagtataaagctcaatttgcagagaaataactattctctgtgtcagagtccacaggcaccagaagaaaacattttcacacagaacatggctatgtgccttttaaatccatttgcaaaattgtttcatttcttatgtaaaaaggtggaatattgactactgataaaaatttcctcctacacaaatatttttcaggttcatccaatcccacccttactcaatatagtggaacatgaagctaaattcatctggaatacttcactaactcccaaaatgaacaagggagtggaaagttgataaaaaatactagcccatacataatcagggaaacaagggttgtatgttaagtggattttcttccatccgtgtgattacctgaatgtcatttttaacttgggtaacttaaggtaaacttatctctctaagttcatcaatattcctgcacaaaccttcattgccatttaattttaataaaactgagaaagagagagtgaaaactcatgttacccattccaggcaggaagatgggaagaaaggaagcatgccattcagaattctgaattgatttgtacaatgtcttaggcaaaagctcttccagaaatatctatgaattcacgttgaacataagacacaaaattacagataaaggttaaaatcaaacttgtcagatgttaacattatcctgactactcataaattgattcatttatgtgctagaacatttttctactacccaccctggaggaggagagaatccatttactgggaatgtggaatgtgcttcgtccgggaggggaggggaaagaaagaatcttgactggtgctatgtaaagtggctgcacctttcaaccagttttcaatttcaaacaagacttttaatatctatgtcttttgattgtttctgacttttaatttttgaaataactgctttattaagatataatttagataccaatttcctcatctaacgtgtacagttcactgatttcttggtatattcagacttgtgtaatcatcaccataatcaagtttataacattttcatcaccccaaaaagaaccacacaccttttagccatcacccctcaacgcttttttttatcctttagccctaagcaactcataagtctacagatttgcctattttgaacatttcatataaatggaatcaggcaatttgtggtcctttgtgatgggcttctttcagttagcataatgtttttaaggtttcgtgtttaaataattttttaaaatttgggaatcttttcaaatttacaaaagagtggctaaaaaacattgtacggaaaacctccatttatcccttatctagattcatggtattgttaatcatgtttctaaaggtttttaatgtctgttgttatagcaataaaacattcaaaatggttatatttataaaagagtggtctgcaaatgcttataaataatttggattgtcatttggaacattctgaaaatgacatggaactcagggctatgaaaatccactggtagatgtgtagttgatgtaggcagattgaatttccatatgtgcctggcattattaaccatacagtcatacagtcgtgtaccacaggaacctttagtcaacgacagacttcatatatgactgcagccccataagatgataatgccatatttttacagtatttttcctgtgtttagatatgcatagttacacaaatacatttgtgcatgtaatactacattataattgcctacagtattcagtacagtaacatgctaggcagccaggagcaataggttataccacatagactaggtgtgtagtaggtgacaccatctaggtttgtgtaagtgcactttaggatgttttcacaaagaccaaatcgcctaaggaagcatttctcggaacacatccccattgttaagtgacagaagaccatacaagaaaactcaagattctcacaatcaaaatgaacatgtaggaaacagggcttaagaaggtcatagggctgggtgcagtggctcatgcctgtaattccagcacttttggaggctgaggcaggtggatcacttgaggtcaggagttcgagaccagcctggccaagatggtgaaaccccgtctctactaaaaatacaaaaattagccaggcttggtggtgggcatctgtaatccaagctactcagaaggctgaggcaggagaattgattgaacccgggaagcagaggttgcggtgagccaagattgcaccattgtactccagcctgggtgacaagagtaaaactccgtctcaaaaaaaaaaaaaaaaaaaaacaaaactcatagggataccaagtccttttccatcattcttaatcaactggaattacaaccaattagtatttattaagcacctaataatttgtgtcaaaaagttgtacaaagaggtaaggagtaagtataaagaagaataaaacaaggtggtcagttttaacaagatgatctacattgtgacctgaactctgtcagcaaaattaggacaaaatagctatgaaagatataaaaaattaattctttctgggagtaagacactactggaatcacaaaagaagatgtactcaacaaagcttcaagtcataatttttttttccttctgacattaaagattaccaaggctctagctctcttatggaaaaaagtaataagatgaagttaaggggatcttttccttagaagttttattatttacaaataatgaggggactaagaacctagttgttgttgttgactttttaggaataatagtactcgggcaccttgaatttaagcttagcataattatagttttaatctatgttgcaacagttctatggaatatcattaatcttttaccacttttaatatattaaagcattgcatcccagtcttggctagggaacataatttaatctgtattcaagcttggggtgcttgaatacagatacccagggttctctgcagatccccttaggagaacctctgtcaaaaaaagtttggaaaactctttgaaggacactcctttaggagtttatcagctaaatgtaggatgctctgggttactatattcattattgacacctagtttatggacatagaaagtatcctcactaaaatatttaataagaagcatgttctactgtctttgaaccaagacagagtgctcttagtaatcaaggtcaactgagctgggtgcagtggctcatgcctataatcccagcactttggaaggccgaggtaggtggatcacttgaagtcaggagtttgagaccagcctggccaacatggcgagacaccgtctctactgacaatacaaaaattagctgggtatggtggcaggtgccggtaatctcagctactcaggaggctgaagcaggagaatcgcttgaacctaggaggtggaggttgcagagagccgagattgcgccactgcactccagcctgggtgacagaacgagactctgtctcaaaaaaaacaaaaagtgaactggagtccttcgagcattggataaatactacagtggctaataatttccctctttacatgtgtaaaaccatgttagcagtttgggacacagagggcacaaactatggaatgagaagattcaattcttcctcttgtgtgaccctgggggagccatttcatccttttgaacctcattttctcttgtagaaaaaaaatgaaaagagtaagaatatctaactggtagggtaattttgatgatgaaattgaagtatgtatataaaagtactgtacacactgtcattattattttattttgtaaaacaataatttttccacattcttgtcctttagaaagcagtgccaactattgtaacaacttttttctttacgaagctacataccattttaaatatattgtgcaagtctattatatctgaaaataaatctacaaaagaaataattttccccttttgtgtactattctgtactatagcaattttgaccctttcacaattttggatctcctccatacagaaagttcccactctaaaagacttgaagatgtttgtggatgcctgggttagagaaaatgtacagatatataaaataataaaataaaataatttgaattcaaaaaagctatttataaagaaatgtaacatgcaaggaatatggctacccaatttaagcatcttcgagagtacagctatttgcaatttagaatgaaaggaattgaggataaacagttcaagtgtctgcctggaaaatacaatggcacatcaaataataattttaagtcctctgtctgaacaaaggctttagtatggtaataagtagtacaaagcaatcaatgtttcatatattataatttttcacatatggaaacttgcaactacagctctctgttggctgcatgtggtggaaacaaaaggaagatgggaatttaagggactccaagtgtatttataaagtcagaagttacactgagttggaggatagggtggaaggcatgacttgaaatatctaggtgaggagagtttggacaaaaacgctgatcccattagaaagccaaatggcacctcccaggtgtggagcaggcctgtcgcatctcacaggcggaacagcgggcacagccgaggggacgcccactctaaagagggtgaagaactaaaccccttagtttgggcttctgccaccagatcccctggattgactattagaaacttcacttctatttctccatcagtaaaacagaaaaagaaatattcgatgggtaggagtagctatggttaataaaataggtttaaatatttggcaacagaagaaagaattcaaatctgtgattgagaagcaggtcactggaaggttaagttaacctgaaaactccaattccccctttcctcatcactgcgtagtttgcttttcagtcgtttcactcagtctgcacctacactaaatcccagcagcgaagttgaaggcattcacgtctccactcaccaaggtccctggatctgaatggccaggcaaataacctagctgtgcgatagcgaatgcagtcaatatatggcatagtgttcatctggtgcttacgagtgatagaagtttttatctaatttcacttttataatcagtttgaggtctcattatttttcctttttttaaaaaataaggaccagtaacataaaatggcaaaaaaaaaaaaaaaaaaaaaaaaaagggctgctgttttaaggccccctgtgaactgtttgtatcccacctgcaggggaagtacagaaactgcaagtaagcaggttgggaatttgggagcaatttgaatggaatctgacacctgctgaaatctagaataaaaaaatgtgtattttgtatgcctttattttattcttctagtgatttatttttaatgtatgttaaaagtactactgtgtgacagattggaaataaaggaaaaacctgattcctctccacaggtaatcagtgagaacattgaattttgatgggcatttcaatgactgagttattttctccatagaaagagtgacacaagtgaggggtgagggggtggggagggagccctgtcttcagatctcccgttgtttgacttgggcgtaaggaactttctgagtcaacctgcaggtggcttggcagggattccttcttcccagctcctggctccaggtgatagctgtggtctcatctcctcagcaaacaccttcaaagagctcacagcagatatgcagtgggcagggagattggctttctccaaacacaggggagattgtggagggggagcaggtgaaaatcatattgttaatcacaaacaaacataattaaccggcaactggattaagatacctaatcagtcaaaattatttagaggctcttataaccatcacccttcttttggaagttcctgcttgctctgtgagataatgctctgttaatgaaatacatgtccataggggtcccctgaaggggacattcctcctcttaaagtgacataatgaggcttcaataaaatctctaagggggaagagtgttttaaagaacaagaggagacgtgaaaatgtgtggtcaaggactaaccaagagtcaaatgcttgcccagctttggtccctctgtgggctttaaagaaatccttcagtaaggctcagtctcaggtgatctttcattcattcaacaaatcttgcggagttcccacgatgggccagtcgccagcagttctgggcatggggggctgggtacagcaatgaacaacacaggtaacacccctgagagctagcattctaatgggcagggggtagacaatacaaataaatatagaacataatgactgctagtaatgagtgctttaaaaaattataaagcagagaacagtgtgtcacaagtttgtggaggaggtgggggacagtaacgattctaggtaggatgtctctctgagtaggtgtcgctgaatgaggggactgtagttccaggcataggcaagagaatatgagtttcgagcaaaaaggagcttggcatgttctgggaatggccagaagccagttgactagaacactgtgatgaaggcagagtcatgaaggatgggagtagaaggataggaatgagccactttggctgggcgcagtggctcatgcctgtaatcccagcactttgggaggccgaggcaggcagatcacttgaggtcaggagttcgagaccagcctgaccaacatagtgaaactctgtctctactaaaaataacaaaattagccgggcttggtggcgaatgcctgtaataccagctacttgggaggctgaggcagaagaatcacttgaacccaggaggtggaggttgcggtgagctgagatcatgccactgcactacagcctgggcaatagagtgagactccatctcaaaaaaaaaaaaaaattagatggtcatggtggtgggtgcctgtaatcccagctacttgggagcctgaggaaggagaactgcttgaacctggaaggcggaggttgcagtgagccaagatcgtgctgcactccagcctaggagacagagcaagactctgtctcaaaaaaaaaagaaagaaccagttcatatgggaccttgtaggtcaccagcatggataggatatttacataggattaaatcaaaattgatgattgtgatgttatgcatgtacacaagaaagtgcaaggagcattcactaataaaatgtacctaaatcaaatgctaggcaaaaggttaaaaagtagctataagttaaccatctttataaatatgccattataattcatgtgttaaacagcataaaatatgtactggcaaaatcaaattagcataggccctccaactgttgaagacttagactgctcaagaattaaagcttcaattcgaacaaccaccctaaaactgagttgacatgttaggtatttgtggatcacactacatacaatgaccaaaccagttagtcatatacatatgattgctatttgttaaatcattcatgctcagagtctttgcttaaccagaggctgccccttctggctctgggatgtcctatcatcaccttttctgtagacacgaccctgtcagattttcctcctttagtcctggaaagggagaaaagatttgccaagaagagaagagcctgtttacgtgccctaggtcatccactgcagctaacttttggggtatctgtttgttttgttttttgaggcagggtctcgctctgttgcccaggctggagtgcagtggtgcaatcatgactcactgcagccttaacctcctgggctcaagtgatccttccacctcagcctctcgagtagctaggactacaggtgtgcaccaccacgcctggataataaaaaaaaaaaaaattgtagagacaggcactcactatgttgcccaggctggtctcgagctcctagtctcaagcaatcctccctcttctgcctcccaaagtgctgggactataggcatgagccaccgtgcttgacccgtagctaaacttgtacctgcgcactgtcaggtttcctggggctgccagcagtgccgctcctgagctctctaagagaaagcaccacaccagggatgtagagttcagagagccactgagcctgctttggagacagaggggttgatcttcattttaatgtagttccactgaactttccctcttacactgaagatggaaatgactcatgggaattcaatcatgcaaagcagcagtataaattagattggccagcctctgcacttggggcaagtcatgcaatctggcttgttatgcattattttcttcatctacaatcatggagagtaatgtgtgtgtgggtgtggctgacagcagggaaaggcaatatatttatgaaatatttcctcaaagctgccacatattttattaacacatctggaaaatactatttaatgcttactcctctttcttccttagggtttgttttgttttgttttgtttttgagatgaaatcttgctctgtcacccaggctggagtgcagttgcacagtcttggctcactgcaacctccaactcccaggttcaagtgattctgctgcctcagcctcctgagtagctgggactacaggtatctgccacaacacccggctaatttttgtatttttagtagagatggggtttcaccatgttggcgaggctggtctcgaactcctgacctcgtgatctgcccacctccgcctcccaaagtgctgggattacaggagtaagccaccgcgcccggcccccttatggtttttaagaaaagaaatcctagttttgctttagccatgactaaaagccccagacgcaaagaatatttgtttgtttgtttgttttgttttttgttttttgagacagagtcttgctttgttgcccaggctggagtgcagtggcgtgatcttggctcactgcaacctccaatccccggttcaagagattctcgtgcctcagcctcccaagcagctgggactgcaggcacacaccaccaatattttagttcttaatggtacaatcttacagttttaaaacgatgagtgactgcattcaagacaaaccaaaattgtgccttgtttttaactgatgcctgaggaacgtgccagcaggtaaagggagtgaagacgaaaacatcaattagcttagagtttatggtcacactcgatacttaaaataatttttaaatagatttaaacaagtaattctttctttctttcgctttggggcatggaggaagcagggtgctgggcaaagcctgcacagaggcgctggcatgcctggaagccaaaaaaatgggggctgggagcgggcagtggtgtggccgggagcctgattacagtgagcacatatgtgcacatatggagagaaacaggagccaggtttctcactgtgggaaaagagatttacaaatacagcaaaggagcagtctagaaagaaccctaagatgttggattggaattggagactaacacaagatatatatatataaacacacacagaggtagatttagaaatagttatagatatgtatgtatgtggacacacacgtatacatacatgagcatacattatttcctagctctgtcttttgagggtgcctggaagcagggacagtacagtactgatgagaacccagatttccacttctaaatgccatcctccacaaaaagatgcccttgatccttggagaaatgcctggatctagggctaaatgaagggaaaattcaaaacgagcctggaatatcgtgttgtgctaaaaactatgaaaatggtcaaagggttataaggacatatcaaaagaatacaggagctagctcgaaaggcacctcactggccaaatctgtggcaactgcagcacccaaactattgatacaatctagggaataaaaagagaatcaattggccaggcatggtgtaatcacacctgtaatcccagcactttgggaggctgaggcgggcgaatcacctgaggtcaggagttcgagaccagcctggccaacatggtgaaaccctgtctgtaccaaaaatacaaaaatgttagctgggtgtggtggtgggcacctgtaatcccagctacttgggaggctgaggcaggagaatcacttgaacctgggaggcagaggttgcagtgagccaagaacatgccattgcactccagcctaggtgacaagaatgaaactccatctcaaaaaaaaaaaaaaaaaaagaaaggaatccacagagatacaaataaacaaacaaataaaagaagggagaacttccttacagtagaaggaatacatgccatttcattgtcagagttctcaacacaaagacacacacaaaattctcacttacaaaggggaaaaatagtgacctgaaggtagagaaactgggtagacaccaacttgatgaagtgaccagattagcatcaccagtgatgatgagacgtccgacggccttccttgtcataccctgatgggagcacaccaccatatcaacgattttcctacaaagaatgtgtgagtcaacatagacagaccagggtgtgggacattcttggcatgaaaggcctgcactctttaaaactataaaggttataagatagacagaaaaatatggaagacctttgataaataaatgtaacttgatcctgaattggatgttgggccagaaagagaaaagaggcattgttgaagcagcttgcaaaatttgaattgagtatgtggcttagatggtagtgacgtatggtagtaatgtcaatttcctaatttgtatggtatttgatggttttggggagagtgtccacattttaggggaatatacactggagtatttggagtaagtgatgagacattgtgccacagcttgctctcaaatgggtcagaaaaagactaatggcatgcatatatgcatatgatttaatatagaatatgtaacaatatatccatattacatatttatatagtatctatattaatatattatatactaatgtattctatgtttctattgttctgtgtatgtatatttagaaaagaagaatgagatggaacaaatgtgggaaaatgtttatttagatagagatggagcaaaagataaaatgctggtgaggcgcagtggctcacgcctgtaatcctagcactttggaaggtcaaggcaggtggatcacttgaggtcaggagttcgagactagcctggccaacatggtgaaaacctatctctactaaaaatataaaaattagcctggtgtggtggcgcaaacctgtaatcccggctactgaggaggctgaggcaggagaatcaagtgaacctgagaggtggaggttgcaatgagcccagatcacgccactgcactccagcctgtgcgacagtgagactccatctgaaaaaaaaagaaagctaacacagcagtctcagaaaaggtgatacagttctttgtgttattcttggaacttctctgcaagtttgacattatttcaaaataagtgattttaaaagaatatctgtgtatttatatagtggtataagtaacaaacactttcatttttagtggaatatgtagtatttcatatggaagatatttccatttttcaatactctctaggaattctggaacttggaaggaagggggtgagttatatagccctttttagcccctgtaaaaatgttatataaccagaaaatgtcaaaaagaaagagttatctattctctgtccaaattcccaaattctacttttagattagccactgaaataatcgattagctttactaacgtaatggaaacccagtaaatccatagtcattcctcataaaagtagaatctgcattcccctggatcaaaggtagggaccctctgtgcaataattaatttcaaataattttaaaaagggtttgctctataaaaaaatagcattccatttttacccaaagcagtatagtcttctttacagtccctgacttgcgttttatctcaatttgctatttttttctgtacagaaaattttctctaaatcattatatccctagacacacacacacacacacacacacacacacgcacacacagttttactcagcacttttactttacaaaggtgtctgtgatcatttttttcacttctttatctgacaaagatctgacattctccccttctttttttgggaaaattgagggtgaggacttgcaatttacctggtagcaagttattgaacaaccgagactagaatttagtcttttcactctacaacacaaagatctagcctaggttagtacatttgtgggttattcttcctttaaaatacttgataccagccacacttattgagattgtactctgcctctgtaagtctttaggagaagaatttaggcctacccatgtaaatacccatttgcaaagcatctctttgcattgcaaagatatactaatagaatattgaattctttgcaattgtatttttgcttgccggttgtaacagggttttagaaggttgacattcacaaaacaaagacttcttttaccaccagagtaaaaatgctcacattcaaatataactagaaaatgaacaataatttatagagaaatctctgaaagttttgctagtgtaagacaattttgattaaagtataacaatgttgttactagctatcatagatgttaacacatgatattatacattccatctagttgctataatgcatgtaccctcaacactgtggtagttttattttattttttctcacaatgttttcataagctaacatgcatttatttaatttaattttatttattaaatacctgtgtagaacttactatgtgcctggccctattataagtagtttatgaataattaattcatttcatcctcataaaactccctgaggtcattactattaccatcctccagttcacagatgaggtctaaagaagattaagcaacgtgtccaaggaatacaccactggtaaactgtagaactagaattccagcccaagcagttcaactccaaatatgtgttcataaccaatgtgtcatgctgtgccaagcctcagattcacagttgttggataattatttgtggattaaatgaacaaattactctcttgtctcttaggctgatttgaaagcattaagcaaattacccaattgttctgtaccttattttttcactttgtaaaacagaattgataatatttgccatccatttctcttccaaacaacaggaagaatggagagcatttactttacctacctgctgtatgtttttatgtctttaagactggatctgcagtgggtctagagtaggctaacagcttataccttaaacaggcaacaaaaccacaattcagtataattaagttgctttccatctgaatgagtgtgaagtagaggggcaaaagtttgagaacttcaacttccttacacatgagctttattcccatttaactctgaactgttctgtctttttttcagctgaatcagaatttgtttgtgtaaaataatagttaaatgaaatgttatctagggcttagattatatgatctaataaaaatatcaagttatagatcttctaaatgaaaatgctttcctcttacagcactgcatctctaatatttaaaaattatcaggacctagttagggataacactggaagtttctgtgccaagggtccttactccatctctgtctatccactgtctttattttgtccctgcgctttccattaggttctttattggctgtagacatggcatgaaaagaaattcaaaacaagacccactaatgttttgttttgttttttttagaaacaggatcttgctctcttgcccaggctggagtgcagtgatacagacatggctcattgcagcctccaactcctgaagacccactactgatagcagcaagggcagatagctggtccaagcactcttgtgtgcttttgagcaaatcatctgtcctttctcaatcttaatctcctcttctgaaaaatgaggctaataacaaaggctgcactgtctacctccagagctgtcaggagggtcagagaaattagtgaaactgctttgtaaactgtcctctaccattatgaagacgttaatactaaaggtcagtttcgaaaaattttccaaatatagacatttgcttttgcattatatccacatgcaaaattatccatttacattcttggcctggagctccaagtggaatcagttcagaaaagaaacagaatttgacttaatcctcaaaaaaggtggtatttcagatgctcaatgaatgtctggagactaaactcctggtgaatgagaaaaagaatatgacagacctgaagtcagatgaccacaggcctacacagatgtgtctgagatgagaacagtctttgctaaggtctacagaggtcattctcagtgcctttgctaaggtctacagaggtcattctcagtgccttgccttgtagggagatgaccttaggactccatccatgacagctgtaacagtatactgaagaatatattgaagaccagtgaattgcgtgggctctcaggacataaagatgaaatgtaccaaagaccctgtgttgttattaaagagtattgacagttttgcaaggtccaaaaagtggacagagaagaaaatttagttaacaggttaaccaaatactgactgcaaaggaatctagcaaggatccctaacattttctcttctgttcagaaactttggaagccaattcagataccctttcaaaatctgacatgtgtgtggctaaagttgtacaaaacagtgggtaatgagtgttgtcagaagtggcctgtcctatgccctatttaactttgatcacttccatgataacaaaatgcacaccttgccctaaccatctggcacaatccagccctgcttaccagggaaacttggcaagccagagttttcagggtggaaaggaaacctattatctctactagaaaaaaaaaatctcaaagcgcttgacctactgatgtcagcatcacctttacatgccaggaacaaattattacagaagaccatacctagaacacccagctggaagttaatgaatcagggaggaagactaatgacacggcacggtacattcctccgaggcagggaccgcgtctattctccttcgggtgggagtggaagtgctctgcgcacagtgggcacgctgctgataaggctgtctggtcaggtgaggacacaggtctccaaggaaagccctgccttctcctagggtgtggatggggaaagtgggagtaggagttcacctgcagcaccgagtgcatagaagctctgccgctattgaaatcccttttaaggctgaggggcagatctgaaaggggtgagcaagacagtactgtgtatgtgacgagtcctgggtgaggaacgggaccctctccctcattcccaacgccacctctccctggagtatgaggttccacagcccaggcaataaagggaagtagcccacacacctcaacccggggccacagttggaggtggggagatctaagaaacactccacggatgagtttctgaagagggaagtggaccgggaacagcgcatttcctgcttcgcctgtgcaaatcccaggcggggccaagcgggaacggggacacggtctaagagtcgcccgctgccagggaggggttggggggcagcctcgaggggacaccgcggaaccagggagggatgcgcatggagggagtgggagaaggcgtccaagtaaaatgcatgctccggtcatcgggggtaacgcgcgtccccaaatcccctctcgctgtcgccctttttttcagtcctcacggggagaggccggcgcagcagtggagcaccgcaggggctggatcggacccgcactgcagcatctgcagggctccgacctggtgcgggcctccaaggcagggggcgcgcggcggcacagccggtggccgcgattttccgggccactccttccccccttacactcccctcccgcccgcgaccttcgacctccatcctggacccacggggtactggcccggggacaaggaggagacgttaaaggtatcaaggggcgcggcaccgccgcctagacggcgccgggacgcgaggtgcgaatcggcggcgtccggctgcgctgccctacctgggaggtgcgggaccctcggccgcgctccaccgccgcgcgccacctcgtgctggcctccgggaggcagccgcccgcgcacgatttataaatgcaaaggccttattgttgttctttgttcagggataccattgtctagtcatccacgggcagcctggagttttcccagggtttgcggcgcgcactcccctcccccgcccccacagacttgctctccagcgccaacccggatctgcctaggtgcccacgggtccttcccgatcgacttgagtgtccttcctccagcccctgctttcccagcatcgaaaacacaaaagcctgccggaaatcacccagcctttgcctggtcactcaggggcccacggataagcgtggctctgattcctccaggtcagccccacggttcgccacctacccgagttaatttctgcgcccgctgaccaaaggccccaactggcaacgggcacagcttcttggtgcgctagtcgcttccttgcccagcctttagagcctcgggtccggcccaaggacccggggacgtgagcgcaattagtagccaggagccctgcgaccctggaccgtgcagtgctaacgcacccgaacggctatgcgagcggtgtactcggctcttacttgtgaaagttgtttcccccaaccccctgcgtaaatctcttgtgttgagaaaagcaaggcttgcaggaagccactccggatgtttgctgctttacatgtggcatctgtggctggctctgataacgtcccggggcaccacgtattaaagtgaagagactgaaatagaaggctccacacaccgcgcgcgggtcagcgacgtcgccgccctccacactgccccccgaaatataagacaagcgaatgatcagaagaaatgagatctaactaggtcacagtatgtaaaagggactagtcttggaaagccaccacaattcctcccctgtaaatttgtaaactgtgaatttatgatctcagggagggtgttataagaagtagggggaggggcgtcaaaatctgaagctcctactccaacctatgattgtgtactttcacctgatttctcttaccagaccaagatcagtccccaagaacaagggcaaataaaaatagggaaacccggccgggcgcggtggctcacgacggtaatcccagcactttgggagaccaaggcgggcggatcacctgaggtcaggagtttgagaccagcctgaccaatatgatgaaaccccgtctctactaaaaatacaaaaattagctaggcgtggtggcatgcgtctgtaatcccagctactcgggaggctgagacaggagaatcgcttgaatcggggaggcggaggttgcagcgagccgagatcgcgccattgcactccagcctgggcaacaagagggaaactctgtctcaataaatgaataagtaaataaatcaataaaatatggaaaccccacgttttcttccccatcattttctccaccttcttggctcccaagcgcacctctcccaataatgagctgggtgaggaagagcatgaggatgaagaaagtgtacagggctaaatctgtatatgtacattttttggactcacacctggattgtatttcctgtagtgttttttaaggaattagtcaaacagactagacagataaaaatgaattctggaccagatattgttttttaattttcaatgtttattctaggaaaactccttagctcataaaagatttagtgttaagagaaaattctgctttgagagctttgaaaaatatttattattatccagaaaagttagaaaagatctcaaaaaaaaaaaaaaaaaaaacagcaaaaaacaaggtactacggggttaatttgtagattgctctctctcctcctatagttttgttgcttatttaatcatttgcaatgtgcttttgctttatactgaagcccatttttttttcagaaaaaataaagctttaaaagtacatcatcatttaaatttgtctaaaatcaaccgctttcaaaactaccaactagaagtaacacctctctatgatttctttatgcagatttaattttttttcttgtttgaatcttagagacccaggaactagaaacactttcttaacttgtcccctagccaaggcttcacagatacttgcagaattaaagataagttggcttaaaacaattgtgtaagagttcttttgagaaaaagcaatgccagagaaactgaaggccaggagtttgcaaaagttttgtatttttatggatgccactaataagcaagactggacagacggtcttgttgttgtagtatcacactcaaagcagcagcattttacttctcagattccaggtgtaagctctacttttttatcacgccttcataataaagaaaatctgttctggagattcgtatattgatttctttgcaaagttatctctaattatgcaggaatggctgttagttgccctcaaaaaccaacacaaatacacaaacacaacagcctggcttagtgattattaagagctgcaagtctgaaggcggactgctgggtgtgaattccaccttctcaacgctgtagtctccagcaagttccttaacttctctgcctccgtttcctttcctgtaagatagagtctacctcagggttaatatgaggatatgcttctttgctaatgctggagggcgctaggaatagcagtggcaggctgtgtcatttctcagtgttgtataacggcttgttttaaaagtcccactgaaaactttttttttttccagatcgaaacacaagtttaatagtcattcagatttcattccagtctaaagaaacttatagaaatctaattatctgccagaataaccgctttaaactgactgtaagaaccacagttactttgcagctaaaacagattgttctcttcccccaaacaaactcggacatttagacaaatattgctgctgtctttacattttagaaatcagtattaaggctcacctgttactgaacacatacgagaaacagttttgttatgcgtatcttatatacatcatgtatacattttcgtactttcacatgatgtgtataataagatacacataaaaactggttggcttgtcatgagtaaatgctttattctttagagtgaaggaatattggatacagaacgtcgttccatatttaatcttgctttagaaaattaggatttatcttggacacagcattttgaatataacacaggcaagttgagtcctgggggaaaaattgtatttttaaatttattatcaacggtgtctttcgcatttgagaaaacacatttgaagatgcccatgcagttccttggaagtaaactaggtcacccaccactgaaacaccctcggcttctgcaaaaagatgtgctttaaagagaatagaatggacgctcggtatgttcatctaaacgaccttgggcaagtacgtcgattccaaggtacaatcagccctcccagacggcttttcgagtctccctaaccccggtgggagaggacgcggcgccagagcccagctccggctagttttcccgggggcaggtgtagccttgggcgcggggccgggggaggggcaaggggcgggcgtggggttggactgggacgtgggactcggaccacggcctgggcgtgggcctaacgacgcgggaccggcccgccctcgccgctccattggccacatctgtgcagaaaaggccccgcggcccaggggcgcccgcagtgtcactaggccggctgggggccctgggtacgctgtagaccagaccgcgacaggccagaacacgggcggcggcttcgggccgggagacccgcgcagccctcggggcatctcagtgcctcactccccaccccctcccccgggtcgggggaggcggcgcgtccggcggagggttgaggggagcggggcaggcctggagcgcc

SEQ ID NO: 37 - DNA, 132062 bp, Artificial sequence
  Sox17 GFP reporter BAC (RP11-53M11) downstream region
gatccgccccagcctgcaggccagaagcagtgttacacacttcctggaggagctaaggaaatcctcagactcctgggtttttgttgttgctgttgttgttttttaaaaggtgtgttggcatataatttatggtaatttattttgtctgccacttgaacagtttgggggggtgaggtttcatttaaaatttgttcagagatttgtttcccatagttggattgtcaaaaccctatttccaagttcaagttaactagctttgaatgtgtcccaaaacagcttcctccatttcctgaaagtttattgatcaaagaaatgttgtcctgggtgtgttttttcaatcttctaaaaaataaaatctggaatcctgcttttttgctctactagtacctctgtcacactagtcttatcaaaaaccagttcttaagatcaatgttaagtttattagttaatgtaaatttctcatcctcgaaaagggtgaacataaatgcctttaaggagtatatctaaaaataaacattaggatatctaagtttgatgtaattgtttcaggaaggaaaaaagaaaagcattctggaatgagcctacttcaagtaatcttagtttctaaaactaacagttaatattttcaattccagtatatcactttaagtagaaggggatgtccaagtaattttggttttctaactgttgaatcataagcttgacctgcccccagaggctttttggatgtttttatctgtgttttgccatctctttacactcctcgacattcagtttaccttaatcttcacatttttacaccttgggaagtggcaagcatcgctgggtttaagataaaggagtcacaaaaactaatcaaaataaaatttgcattatgacaacttttaatacactttagcattttatttgattggttttttttttttttgcttttagatttaatacatatacggacgattgcacagacttaggggagaatccatgaatggtttgtgtgtagtgtccctatctatcaccattactttatcaagaagaaacagttacagggttgtgagtaaaagatggggatcagcccctgtaatctgccatactaatcgctgtggcacgtctcaccacatttgagattgagacataaatggaaacaggtgacttataatgggcatttcctgtgccagatgtttgttcaatgccattctaaacagtgtgagcctcaacaaacctgcaggtttaggtgctatttttcctattttgtaagaaaaggaggcaccaggccttcccctgccatgtatatgaaggcttgtattacaagttcttttgacatatttctcacctgttttcctctgggccagtatgtattcatgggcactgggagaatttacattctgttgatgagaaaccatataattatccttagcagcaagtgctatagaaaaaggaaaggcttggaggatagcttccagcatttacatgggagagatgtctgagctgaaatgattggctggattctcttgaaaaagggcatggaatatgttttttagaagggattcctggaatgtgaaggatagacagttttagtgaggaaaggtaagtttattctgtcaggcataacaggctgcctttaaaaaggttaaattctttctcttagctcagatgggttgtttctgcttccagcctgagctccttctgcagggtgtcccaagagttcccagtagataaagtggacagaagggctaccagcccaagttcagggctgtgctcagattacacttggcattttcatcatagtcagcccaagaagactcagttttacccttggctgccatctcttaacgatattaagataagtacagaaaagaaaaagaaaaagagttcttaggggaaagatctaaagtcctgtaaattacatctttaactactcactaggcgcaggtggaaaagcagtaagagctaaaattgttaagttaatgttcatgcatttacatggatggagggattggtgttcacaaataattttttttgggtaagaagcatcaagccaattccttctctttcctcaagcacacagatcaagtgactgcaggtagcagctagtgattttttttaattcctaattttagtttttatgggtacatagtaggggtatatatttatggggtacatgagatgttttgatacagatatgcaatgtgtaataatcacattatgtaaaatggggtatttattccctgcagcatttatcctttgtgttacaatccaatgatactcttagttattttaaaatgtacaattaaattaatattggctatagtcactctgttgtgctatcaaatactaggtcttattccttctatgtttttttttttttggtagttttaaattaccaaaacatttggtatccttaaaccctttctcattttaaagtacagggatgtgggccctggtggcaaaattagaaatagagctttggggtccattacagaccattatagttttaaagtgaacgacagaatgtaaaacttctgcctaggtcgaacgactctatgtcatcaccaagtgaacagacctccccccaccaccaggtatgacatcgccaaatgcataaatcccctctgtgacattaccaagtgcctggatacccccatgacatcaccaaatacgcagacctctgtttcctcaagtagattcagatgaagtgaccacaggtaccagctagtgaatttttgagacaaaatattaaatctgtctcaagtttttactgttttattttggagacaaatacacataaaggatacattgcttttctacccatgtctaatttggtactttagaattacattaggaggtaagaatccagctcttttatgagctaagatagccagacttgatgccagtacagaatgtgcatgcctttgagacatccggagcaataaggaagaggttattttttcccccatgagaatactgactacatctctattaaagctaccaggtgggtctgataaattacagataaacttgtaaatgacttacacaagcagctaagagataatattgcaatgaaacaatttacttattattcttatcagtagattattgcctctttagtttgaatcacgctgcagaagatatcagcttgaatttgtactgatattaggaaaagcacatacaagccaaaggaattcagataaaatggaaagggtgcaatgaaccaaaagacatcatctcagcctaacattttaaaatgtcccatttcattttgtttttaatactgtgcctgtcacataataaatgttcaacattcccttcctcctcctgttcctctttgatttgttttgacaatagtggacagggagaagtattttacatccattatttcagcacaaatttatttttcctgcttacaaggtgcttccttctgggtctacaatattcatctgaagaaaaatggcactgatgttcctacccagtccccatctggagtaggctcaagttcctccacagggtgggctcctaatggagagagtatttctttaggtcctctggcctgggatccagcagcatctcagtttttcaccataacacctatccctaccctccttctaatgagaaggtggctgtgtgctttctctggaattaccaagcagctttatgggaataattcagtttgcaccatcctccatatacaaacactgaaccctcaccactgatatttttcccaggttggttcaagacactggaaactacaatgtcttagtgcagcacttagtacacgcaagtgctaagtaagttgttgtgataatcatgatgttctttaatgtaaaaatttctctgtagctaagattcaagaaaccatttggctaaatattttaaaaatctcttcttgctgaagaaattttagctttgacaatctttttttccacttgaatcgaagtcttaaaccttttgccaaagttgacttcctaacaagtattccccaaattgatgttgctccaaaagatgatcttgtgaggatactctctgtgtgcaggttcagataacaaaaaaaataaacatcagtagctgtgctgtggatcccagttctgtaagtcagtgccttcccataagcctgataacttgttaggcaagaaaaagaactgtggtgcgtgtgaagttaaacccagcagttttctgctcttggttaaggactgtctcattttcagtattacctgacgttaccggttgctcagaaaactgactgaataacttgctggaagcaacttgctgggaagccccaaggaaactcaagagttcctgctttgcctctcttttctattagaggcagtcacctggtgactattattcctttctcttgaataatgtgtttgaacacaaaaatttaaccccagactgtaaactactggagcaaggattagagaatagctctatgaataaagctagcagtgtctgtcctccgtaagaagaaaaatctctgcagtttgaatcagaggttcacctggcttggaaacttagctctgtgagtttggagacatcaccgaccatttctgcactccagccagcttatctgtaaaaagcaggggtgacggtaaaacattttgccaaagttgactctggataacggcgaaagcttcactgaactgttgtagggattagatgagattacgctgaagggagtgcttcagtgccacagaaagtgatctctctccctctctccggcttcctatcttttgattttatgtatctctctctatctcagctgacttggggaatttaatttcattcttccattgggaaagaaaaaacaacaggaactcgccttccccgggtgctttccttagtggaatgagaattttacagccctataagatggtctgtgtttgctggagacacagcatctgtgttttactttgtgctttggacagcttagtctctttgattataaaatgagaaaaaaataattgtcagttggagaactttgtatagaatgtcttaatacacaagaactcccatcctgcatgaaaatcttaagatctttataaaagggacagttaattgggacatactgaatgcgatatcaagtttgccaacatttatctttctgttagcccctcctcccaccagtatggtttctgaagtcctgaatcgatttccataccgtttactttttgagaactgaacagggtctgaattcttgaggaggaataagcagagtgtaatggggaaaaaggcaaattaagaaaagattctggcttccagtagttccaggtaatactgaaacgcgatccgcaggcttttaaatccctcagtcctcagaagttatttctgtgaactgatggatatggacggactgatagaagaaaattagtagacaccagcaaaatggaaggagcaattttatagctgccccctatatagtggatttttctgctttttaaaataaatatttgtttggacgtttgaatacaatagtaaggatcagaggtgcacacatgcgcaccaagaatattgacctgaaaaagcttactgagataacaggaaggaaaaatagaaaataaaaatttaggtttgtagtttcaataacgagactgtggatatagaaaacattattgttttattcatttaaaaataattttaaaaatgtaaatgatgcacacgcttacaacaactcaaacaacattgcagacgggcttgtaatataaacagagttgtcagaagtttccatctctccccagccccagtgccacaggtcagaatcaattccttttttcttccccctactgggcattacctacattaataattctgcttgtctagtggttaattaattaatgtacctgcatggctaattttaggcttatgagttttagacatttactttctgctacgacagctaagaatttcctgcccgctcttcctcggaatatagttacatccttatttccacttctgttaattgtcttttaaagtccaggactacatacccttttctagttccatcgcgaaggcgggaagtctcgattcctcactgggaaaggtgaggacatggatgcctccacccttccctgaagcactcctctcctcttctgcggaggtggatttttaaaaacagattggggttggggtgggggagggacagcacgcagaatattgatgcaaacgtcatatgaaaaaaaatacatataatatatatgtatgtatacctgcaaagtgctgttacatatacgtgtgtatattaacagcattatgaatcccagacaattggggccgcttaccgccgtggctgtgactttaaattcactcacttcttacatccactaggaaaagaggatttgtttccctaaagcctataaaaggggaaaggcttaggcgcagtggcagccccgttccccgcaccctcctgccctcgggtcccgggcgggctgcgggagttcctcctgcgcgggcgtctgaggcgctagaggtcaccggagcgcgctcccctcgccagggacctacactcttcccgctgctacattaggccgcattaacaaggatctggattcactttaatttaaaaggtaaaagatcttaggtctgatgggggagtgcggcgaggagagctcggaccgcgacgtcgcgcgcccgcttcgaggagttttgagctcttagcttggtgccggggcccgcccggcgctagatgaagtgctcgtttactcggcctaagccacggtgactcgaaggtgagaatgcaacttcgcggtgcaccggctcaggggcctgcctgccgcgccaaggcttcggaagttctcagcgggaccgctgggacaggctttcctctgagggaagaggaggggatttgtgcctctgcacgttctttcctgtggaggggaaaatcaaaccctgtagccgtccgctgccgggtagggatcgggcgatgctcggcgcccgagttctccgccgttgaggtggagcccggcggcgggagcttagattctctgtgggccacatggtctcagaagaggccccgcggcccgggggcgcccgcagtgtcgctggaccggcggcagcgctggccacgccgtgggctgggactggcccggaacgcgggtggcggttcggcctcggagacccgcgcagccgtcggagcatctccgtgcctcgctcaccaccttcttttcctccgcgtccggcggagggtttcggcgcgcggggcaggcctggagcgccgtgagcaggccggatgcgggatacgccagtgactaccagagccagacccggagcgcgctgccggcggtgacggctaggctgggcccctgtccttgggccgagttgccgagctccctcggggacttgaaggtgaagggcgaggcgccggccggggccgcgggccgagccaagggcgagtctcgcatccggcgccttccaggtggggcgaaggtcgagcgccagaggctggcgagggacccccgcccagcttgacgcccagctgcgcccgacgccgggggaggcggagcgcggggaacccgggcgccgggaaccccggacgtgggagggctgggcttctgcgcggggagacgccgggcttggcgaacatcctcaagaaccggtcggtggctctacctccgaaaactctttcgtgtttagcgattctcatatttagtgtttccctttagggagacttgaccggcaattgcagactcgtcttgggagctggagatgacattaaataaaaagttcaaaaccaaattgttaattatctccaggtataaacgataacacaaaattttgcagtcttgggagaaaggttttaatgtgccgcctaattaggccaggttctgcaaaaacgaaacagctctattccaagttaaaaagtatgcccctattccaagttaaaagaaaaaaaagttgtattccttgttcatttattgagtaaggaattgagagatgggtgctgagttattacagattctaactgctcgccacacatggagctagaaatacatttaacagcctttcaggaaaacgcctaaagctttagaatttcaagctagccaggttgcaatctagagctctagtttgttgctgaagtttgggagaggatggcctctacctgtgcacacatcgagttaattttccagagtcttttgaagttaatagggagcggcttttctgtttgtttattttttgacagggtatccttctgtcgcccaagctggagtgcagtggtgcatcgcagctcactgcaacctggacctcctgggcccaagcgatcctcctgcctctgtctcccaaagtgctgggattataggcatgtgccaccgcgcctggcctgttttttgcttttaagagaaggaataacatggccagagtttgtttgtttattttttgagatgacgtctagctctgtcgcccaggctggagtgcagtggcgcgatctcggctcattgcaacctctgcctcccgggttcaagcgattctcctgtcccagcctcccaagcagctgggattactggcgcgtgccaccactcctggctaattgtcttattttttagtagagacgtggtttcgctatgttggccagtctggtcttgaactcctgacttcaagtgatccacccgccttggcctcccaaagtgttggaattacaggcgttacccaccgcgccccgcctgttttttgcttttaagagaaggaataaaatggcccgagtttattttaatcaaaccagtgtaaaaccctttctattctgcattatagctttatttaaaacttatttcatagaaatgtaagcagcatatgaaaacagtttccctgctccagtcccaacttcagatattcagatatgtgtcctgtgttcccttgaacacattttctcttttcttttctttctttcctttatttcttttctttttctttctttctttctttctttttctttctttcttttttctctttctttctctctctttctttctttctttctctttctttctttctttcctctctttctcgctttctttttttctttttttgagatggagtctggctctgtcaccacgctggagtgcagtggtgcgatctccgctcactgcaacctccgtctcctgggttcaagcagttctacctcagcctcccgagtagctcggattacaggcgtccgccaccaggcccagctattttttgcatttttagtagagacgggatttcactacgttggccacgatggtctggaactcctgacctcaggcgatctgcccaactcggcctcccaaaattctgggattacaggcgtgagccaccgcgcccagccgcacacattttctatttacagtcatacagaggagtttctccccccaagcccccattgggatcgcattttcctactattctgaaacttgctttttcagtttagagtacacatttggcggtcttgtattcctagaagatggacttcgatttaccggttgatggtcttctccactcttccgtggggtcagccccacttgtcccgtctccagtccaatgtcagtttgtgacttaatcttttacatcgtgtacagtctgagccctcagaccccctcacacatgcacaaattgagtttatgcacagaacagatagtacctgtacttaaatgtagactcactggggagcacgtttcactccataagaaaaggggtaaaaattgtgcacaccataattgcaatattttacaagaccggtgctttctttatctcaggggtgctggcagagagaggtgcatagaaaactctgggtgggttatttcctcctggagcattgcccctccgttgcctgcttacctgggcaagtgctggtctgcgtggatggcttattggcacttccgggaccctcatgtcgtaaggctgagacctaagaagctgattctgtccaggaggtgagatctgccccgataatcgtaggctgatggggtcgctgctctggcgtcatagttaatgttaacttccactcacactgtgttcgtctgggtgataaaagtgtgtggggcgcctctttgcaggcttcctgtcctcttgggagatgtctgcgctttgtgagtttgggaaacaactgggtacccagcgaggtgggcgcaggaggaggagctgccttcctccgggaggcggcgcagcgcggggatcttgcgggaccaggccagagaccaggaccgtcccccaaccgttcgcggccgcgtagccctgggcggcctgggcctgcccttccccgcgcagggctttccctcctgccggtcgctgccccgcacatggctctggtcgtactcccgctccactgccaccactgcccacgccctgcgtccccgtttgaccgcgtggagccggaccccgccttcctcgccccgcgctgccccaggcctgccccgcaccagcagctaagcgcaggtctctactgcaagcccgcagccccctcatcgctgggcctactggcgacccccggcgccatgcgcgtgaactgtgggcgacgggctcgcccttggcgggcggcgcgcgcggtttccagatgcagccgccgcgccggggcagctgacgccgcctccaaagacgcgccctgctggacggcgctgaccccacgcagccagcggagtctcctgggaacagcccaggcgccggtgccgacttcaacctctctgctcaggcctcttgagttgcgttaccagcttaccatgtattactaagactgacagaatataggaaatattcctgtctttctcagaaggaactttccagtaaagacagcgtttaatactgttaacgtctcaaaggaggcagtgaaaaatgtgctcagcttaagcatatgcaaagtcagtctatttccattttctacttatgcacattatattttgcattaaagtttgatcattttaaaagtggaaaattaatgggcagtggcagaaacagcttttttcccccaaaagtaatcttcttccaactagttttaaacattttactaacaattattgagtatcttctacattttaagtcattattttaaagttcttggttattgacatgttgtaaatttgaaaaataaagtttttcttaaaaaattgtgtgtgtatgtagattttatattctgcaaaattaaatgaagtgtgtgtgtgtgttattcagggccccgcaggaaacagctaacatacttaaagagtgcccgaagaaagatcatgagtggtctatacatgtgaatccatctcgggactggaagcatccagggccccaggcgctcaaagctgcactcatcaggcctgactgggatgatggcaaagcagtccctggagcccacgatgactgtggctttaggagttctgccagccaggagctctgaccttgaagctaatgctgattgtggcccagaaagatgggactaggaaataaatcccggagaaaatcctgttgcccacctggtttgctggccaaacctgacccccaaaccagaggacaggaggccagtggacgcaggaacccggagagctgggggagagggcatatgctgggggacatccaggtggaaagggccaggctttcctttaagcagctccatgggaggccgtttagcagagcaccgtcatattatgggtgcggagcgtcagggatgggaggagggaatcttagctgctgttcttctcattctcaagaactttatggcccaggtggggacccaaccaaaaatgagtaacaatacaacattgccgggtggaacgttccttccctactttctctggttgacattacttcttagaaaggttgggtgacaccctcttaggagcttgtgttttgtcccttaaatgttagaggtttgaaatactagtttctgaggaggcttttcaaaggttggggatacattagtacctgcagaatgagctaataaaatggattaatacatgccattctccatgataaatgtagagtacgtatcttgctatttttcatactacttacttaagactttgaatgagcttggctattttccgaccaaaaattagctatggttttcaaaagagctttgtaatgtttgagtgcttttccctggaatcagggatgtggatgtagggtgaatgatttctgtagaggatttctaaaatcggtttttcaggaagcatctttgtgatcaaaggtgcaattcaactccctggattcatgttaaataaattttgaaatgaaataccataggccggatgcaatggctcatgcctgtaatcccagcactttgggaggccagtctgaccaacatggaaaaactccgtctctactaaaaacacaaagtcagctgggcgtggtggcgcatgcctgtaatcccagctacttgggaggctgaggcaagagaatcgcttgaatctgggaggcggaggttgcggtgagccgagatagcgccattgtactccagcctgggcaacaagattgaaattccatctcaaaaaaagagaaatactgtaatacccacatgaccagcactgtattgctgtttaagaactggtgaccagcactgtattgcactttaagaattggggacagagctccctgtttggcctctcagatgggatgcgaccatggcagttgttgctgtctccccagaagaactttggtttttctttggagaacttgccctttcagcatcgtcagtcatgaggtctgggtggaggtcactcgggtgagcccggcatgtctcaagcttgttggcattacccatccccctacccccccagttatccagttaaaggacagacgtgactcagaaggcgggtggatcgcctgaggtcaggagttcgagaccagcctgaccaacatggagaaacctcgtctctactaaaaatacaaaaattagctgggtatggtggtgggtgcctgtaatcccagctacttgggaggctgaggcaggagaatcgcttgaacccaagaggtggaggttgcggtgagctgagattgtgccattgcactccagcctgaggaacagagcgagactccatcacaaaataaataaataaataaatgaacaaacaagagagtgactggaagcagccctccttggacacagtgggggtgacggtccataaccaatgcagccattttcatgagagttgggccaggaggttaccggtggagaacggacacaaagccaagcaaggacacagagaacctggatcccaggtgacaatatcaaggctcccagggagtgagctgtacctctgactacttcagttatgtgagcaaattcagtttatttactatgagttcattttcttttcacttgaaacaaagggattcataacagataaccagggtacagggcaggctggagcagtgattgctaattccactggctggcacaaggaaataccaaatatggagtctctttggaccgccggcatttgcattgcctgagatcatccagaaatgccgaatctcagaccatcgctgcacttcttctttagattggtccagaacagtacttctcaaatgaatgtgcatgcagatctccttgggatcttgctaaaaatgaagttccaagattctgcacttctagcaagttcccaagctaggctgatggatcatactcagagagcaaagccctggtctacacttacttcatagggaccattcttttttttttttttttttttcccccgagacggagtttcgctcttgctacccaggctggagtgcaatggtgcggtctcggctcaccacaacctccacctcccaggttcacgctattctcctgcctcagcctcctgagtagctgggattacaggtgcacgctgccaccacgcctagctaattttgtatttttagtagagatgaggtttctccatgttggtcaggctagtgttgaactcccaacctcaggtgatccgcccgcctcggcctcccaaagtgctgggactacaggcgtgagccaccgcgcccggccttagggaccattcttaacctaaaacacttgaagttcaggaacggacactgaagattcatttcagaaaagtcactagatgagaatcttgggtcatttctcctctgctccttacctcggcacagcctgtcctcctgactcaccaggatcctctttcttttctccaaagtcttatcaatgatctagttagatcgagactgacatgagctgacaacacatacaccctgttggcaggcggcaagcagcccccgcttcctcatgcatttccactggcctcactgccaaattcattattgctcatcatttcaagaatctgtctctggtttgcttgtctctcttactagattagagtcaggctcttgctgtaacacaacatactgaattagatactgagtttctaccttctataaacaaatgattctcaaagcaggttgcacactgcaatcagtggaagctttaaaaaaagactgaggcttggtctggccccttgagattctgacttaattggttttgcctgcagtcagggtgtttcagttttaaaatctctcgaagtgctgctaattgctgccataagtagatgaacatattgatatcacagagctacctgagaagtcagttacttatttaggtatttatttcatcaaatatttattgaacatctattatatgccagacactatacgttgtcttcaaagataagacacatacattccctgtcctaaaggagcctgtcatcctgtagaagggaaaggtgtatagacaaataattgtaatggtgtgttcaatgcaatgaaaagtataaaaactatcctttggcaaaaggcagagtggtggattccatgtaaaggggcatgggataaaggtaactatggctgacagtaactgagcattactatggaagaggaaggcctccagagagtgctgatgtgtgtgtgaggccttgaaggaggagagaacccaatgaagaaggtgagtgggagatgggatggggaaggtttttctgggttgaggttgggggatttggggatgagatggtggaggagctgagggggctcccttctgttttctttgtaaaatcagagtggggtgaaaacctgagagggcacagtgctgggtgttgggaggggcaggggcattggcaggggtgggcctgagaaaagcagtgagctctgttctgcaacattgaaggccctgataaaggtgagttcatagatcagcatccctcttcaggctcttgtgagcagaagctcccatgtaaacagagatgagactataggattcatccgaagctgtgctttcagcagcaggggtgaaggcagacaagagggccagagagtgttggtgagactggggttcgagagttccaatttccatatggaggaagtgagatctgaagagagcttgggaaaaagggagggagaagctgggatgacaggagaaagtatcagaggggaatttcagagacaagtaggtcagggtgaccaaaatgtgcaggatggactgctgagggggtgactgtcactggagttgtggagctctgggacgtggatgctgaaaccccccatggtggggaggggaagactgtgatcctctctgtacatggttcatgagatgcccaccagtgggtccacccagaggggaaggcaagtctagtgggagtggatttgaagaaatcattcaggagggggaggtaaaagagaacatagggacatggcactgaaatgcaaaacagagcaatggagaaacaggaaaatactgaggaaaaaggacagaggttcctagtgataaaaggaagccttgcacatccctctgaaagctggattttttttttttttttttttttagtttaggggtaaaagacctagagttctgaaactttgctagaggcaacagtggaactgttgctaccagctcaaggccaacctagacagcatctcttatcaactctgtaattgatagcaggctttacagataagtgatttcaacaatgcactcctgctgagaacttccagttagaattaattgatcttgatcactgggtgctaaacttcaaaaatcattattaaaaaatattctgcccaacagctccatattgacaccttgaggcaaagccccattcatctggcatcaattacagttctgctcagcctggagggatgcctgacttcccacacttgacattcctctcccctcccccagaccctagaaccttcccttatcctattactgagcattagggccaggttctctatctgacagcacaaggacaacacccaatgtcaagaggagcactatctgacccaagatataatggaacttcagaaggtggctggctttcccagaatttcccactagaggagggggatgcacctggggtgctggaaacatgcgtgcaggggtcctcctggagcctcctcctccagagaagtccagtgatctccaaaaacagggcacacagaccctgcaagatgcgccccctacttagagagagacagagccgcccgaagaccttcgaggacagaacccgagttcaccagtcaatgaacgccgggagcatcctcagaccctctgcagccaatgctggtgtgaaggtggagtcagttctttcttggaagtttattaccagcggcggctgcgacgtccatgtttgcaaaggaagggaggccttcctcttcccaagtggatcctacatcccgctccactcactccactcaggagaatcaaaaaagaggaagatagggctttctgccttccttttcccagcttttctttctgggctgtctcactcgggcttttgctgaaccatacaccccagaaccatccaagagcacaatggctctgtgctgtgggggagtctccaggtgcggttatatatagtgtgggccagcacacccactcccgttactcatgcagtttggccctggttgaatgcatgaacaatctcttccaggcactccctgttttcacttcccgctgcccacagggcccctcctctgtctgacccttgggggtcaacatcctttctagctaatccaccccacttcctccctcaggccgggctggaggctgttttttaacttcaggggttcctggagaagagcttcctctgccccttcacgatcacatcaaacacactggattcagggtcttgagatttgaagatttgaaagcagaaagatcagtgtgagtccaaactgtgggaaggaacatgatgaaagaggctggacttgaaatatccaccagcgaaggtgggcaaagggccgcctcaaacagggagaaatgggagcacctcgcattctgggttctctggacagcagcctgagcagctggagcaggggcgcaggggtgtctgaggggctctggcgagagttcgtgcaagcagcatactcaggcagggtgggcgctgcacaggtgatggagctggacacctcattttgagagccccctagctgggtctgtgacctggggccagccccaaccactcggaaggtctgtttcctccctgtaaaatgcaggtaattatattaaataactaactgcagagtcactgtaaggattggaaatatttgcacagtgcctgcctgaatgatggtattgggaggagacctgtgtacctgagttcctctgacctgatatttccacgggagctggggggcagctgatgaggaagaagcttctgccccaccagcgcaattctgtaccgagcaatgcagcctgagcctccgagtgaccaccctcctgagcagtcataattcactgggatagaaacatgaaacagttttttctcgaagtatggctttaaccatgctctcttaaatctccctgtcttgctctttaatgatcccttgggaagattttattactttttacttttatttgttaaaatctaactgtatttatttgaaaactaagaatgcaaaaagtcaattcgctgtaaaacctcaaacatagtttaaatcttatcccttttattcccttccctaaaggtttaaactgggaccctatctaccagccatggaagaggagggacaccctgccttacagatatcccttctcccctccctctctaaggcaggcttctgctgtgtgcgtgttagactggggtgtggaggaaggagagggaaagggacaagggtcattttacttacctggtagccgctgctgtgcttatctctggtgcttctctgcaggtcatttactggactaagatcccttatgtggcagggtccaactcatgggccacatgggatgctttagaaggtgctgggggccaccatactgccttcttcctgggagatgggctgcggctggccacttccacttccacctgcccatcctgggcggcaagcccacagctctgtgctcaggcgccctcacctggaaggcagttttctctgtggtgcactggcaagatgactagggcctgatcactttgcatggtgcccactctacaccaggaaaatccatgcactctggaaggtagtgagatggcccctactgcccctctcccagccctgccgcttcccctcaaattcttttttctttcaaatttgattcttagacatcaaatcagaaaccaaagttcaactctcctttattgcatttcctgaaacatctgtcttcctttttttttttttttttgagatggagtcttgctctgttgcccaggctggagtgcagtggcacaatctcggctcactgttaactttgcctcccaggttcaagtgattctcctgccttagcctcctgagtagctgggactacaggagcgcactaccacacccagctaatttttgtatttgtagtagagacaggcttcactgtcttggccaggctggtctctaactcctgagctcaagtgatccaaccacctttgcctcccaaggtgctgggattatagatgtaagccaccatgcccagcctgtcttccttttcagaaattatttaacctacaattatttattatgtaatttataagacattcaaggactaggtgtggtggctcacacctgtaatcccaacactttgggaagccaagatgggagaatcacctgaggtcaggagttcgagaccagcttggccaacatagtgaaacccctgtctccactaaagatatgaaaattagtctgtaatcccagctatttgagatgctgaggctggagaatcgcttgaacctaggaggcagaggttgcagtgagcagagatcgtgccactgcactccagcctgggcaacacagcaagactccgtctcaaaaaaaagacattcaaaattacacagtgtaatagcataccacccatcgtaagaaacaaacatcttctacagttggtcctttgtattcctttgtataatactacatccgaactgtgtttgtagtgattctttatttgcatgtgaaagaaacccaactctgactggactgataaaaagaaaggaagtattgattatgtaattaagccacagaaagggcaggtagacttttttcttcttttcaatttttttttgttttgttttgaacctttaatgataatatatatgcatactgttgggctatagaacaccatgtttggtttgtctttgggtcaagggttggggatgcgcatggcagcactagtgaacagggtctacatcaacaaagatacacgtggtcataaagcaagaaactggtgcgtggcgtggtcaactttcatttcctcatcactcagtagcatgttggggtccccacggctgatgtgggacagatgtccagactctgcgcattgcaaggtgtcctctaacacatccagctcgagcagcatgtggtgcatctcccttggaaatttctcataatgctcatacccctgaatcagccctttggaaacctcgagcaggtccagagtcttggctgcttccaggagtgctgcccactccaccatgggtagcatacacaagtgttgaactttgtagggttgatgtggacctcagtgtagtggggaggtggaaggggaagccacagggccccatcccctgcacatgtgagctcagctgattgtggggtgagcagtttcaagtcatcccattagctcttgccaggccagaagtggaacggtcctcttttctcttctgagcttctgttggcctgttggtttcattcctttcggctgtggatctccaatatactggatctattgggacagctctttccagcctcattgctagatagggcgtgtgccctccaccagctccagacagaaaaatgcaggggaagtcatatgcctatcgttgaatcaattattgtgtgtagggggactgggtattgggttaggctgagcctggttttttagagttaggtattttatttttagaaaaattgagagagaatgcttggtactacttagtatccactgtatagatccactcaattctttaaaatgctgcattgtattctgcttcagggctgtgctgttatttggccaatctctattaatggatattaaaggtgtctccatatggaatcaatctaggttcccatcaatgatgggttggatgaagaaaatgtggaacatgcacaccatagaatactatgcagccataaaaaagaacaaaatcatgtcctttatagcaacatggatgcagctggaggccattgtcctaagcagattaacacagaaacagaaagccaaatgtcacatgtccttacttataagtggaagctaaactttgggtatacatgggcataaagatgggaacaatagaccctggggactccaaaatggagaagggaggggagcaagggctgaaaagcttcctaatgggtactgtgttcactattcaggcgatgggttcaacagaagcccaaaccccagcgtcacacaatataccctcgtaacaaacctgcatgtgtaccctctgaatctaaaataaaaaaaaaatttaaataagaacttaaatggactggatgtggtggctcaccctgtaatcccggcactttgggaggctgaggcaggaggatcacttgaagccaggagtttgagaccagcctggccaacatggtgaaaccccatttctactaaaaatgcaaaaattaaccaggcttggtggcacatgcctgtcattccagctactcaggaagctgaagcaggagcatcacttgaacccgggaggcggaggttgcagtcagcagagatcaccccactgggtgacggagcaagactctgtatccaaaaaaggaaaaaagaaaagaaaataaattgtctctatttttttcctgatatgaacaatgctttccataacattcttttatttttgtaagcatgcgtccatattttttataagacaaatttccagaggtggaattgctgcctaatggtatgcgggtggatcacgaggtcaggagatcgagaccatcatggttaacatggtgaaacctcgtccctactaaaaatccaaaaaaaaaaaaaaaaaaaaaaaaagggaaagaaaattagccaagcgtggtggcgggcgcctatagtcccagctacttgggagcctgaggcagaagaatggcgtggacccgggaggcggagcttgcagtgagccgagattgcgccactgcactccagcctgggcgacagagcgagactgtcttaaaaaagaaataaaattgatattgccagattactttctagttgcactctaccagtagttcacaacagtgttggcttttccatactcccaccaacatcaacgtactggttaatttgtgctgtgtaacaagcttctgaaaacttagtggtttgaaaccaacaaccacttatttgcccaccattccattgatcagcaatttaggcagggcccagatgggatggctcacctatgttgaccatagtgccccagttttacagtcagctggaggtcagtgacctcgctcacatgtctggcagttggctggctgttaggtggagtgatggagacaactaggtcatttgtatttgtcagtcagcatgttgttggtggccaatggattcccaagaactggaagttgcaagttccattgcatcagtacttttcaagcctgcatttgggtaacatttgctaataaccctttggccaaagcaagccacttggtcaagctgggatccataagatggaaaataagctatacctcttcatgggacaaactgctaaatattgtgatcatttttgtaatctatcatagccaggttatatcattttgttaatcttggtcaatatgactggtaaaaaatgaaataatcttttcttaaattttactattatgattgatcattttttcccaatttgtgtccatcatttaaatttgttatataacttgagtgtctgtatttttgtttggggttttgttttgttttccactaaattgaaacaccatttttgacatatattaactttctcatatgtacttggatttgatttcttctgcatcctctatattttttctgtaccttatttgttaattcctgaaaatattttcaatatttctttttttttttttttttttttcagagaacagggtcttgttaagttggccaggctggccttgagctcctgggctcaagcaatcctcttgcctcagccttatgggtagctgggatcacaggtgctgccaccatgcctggctcctatttactattcttattttaaaatttctttttctggccaggcatggtggctcatgcctgtaatcccagcactttgggaggccaaggtgggtggatcacctgaggtcaggggtttcagaccagcctggccaacgtggtgaaatcctgtctctaccaaaaatacaaaaattaactgggcgtagtggcagacacctggtcacagctacttgggaggctgaggcaggagagttgcttgaacctgggaggtggaggttgcagtgagctgagattgcaccactgcactccagcctgggagacagagcaagactctgtacccctctccctaaatttatttttctattaattaacttttattattctatttaaagttaaaatcatacttatccagtttgaaaagaattggaatttaaattggaatgatagtacatttgtagcttactttaggtaaaatatatatttttacgattcattcccatctcatatttcctagcctggtctagagattcaatgcaatccctattagaatgccaattgctttttcttgcagaaaagacagtttgatcctaaaattcatatagaaatacaagggtcctcaaatagccaacacaatcttgaaaaaaaaagttggaggatttctatttcctgagttcaaaacttaatacaaagccaccgtctgatacttacaactcaacaataaaaggacaaataactcagtttaaaaatgggcaaagattttgaatagactattttttatactgtctttgtctggtttttggatcagggtaatattagtttcataaaatgaattgggaagtcttttctattttttggaggagattgtgtagaattggtgttacttccttttggattgtttgagagaattttcctgtgaagccatctgtgcctggagatttcctttttgggaggtttttaaattatagattcaatttcttcaacagtcataagattattcaaataatctcttttatattgaatggtattttgtgattttcaagtaagtggtctatttgttctaagttagtaaatttatgattatagaattgttcatagtattcacttactatcctgttgatatctgcagtgtctgcagtgatattctgtttcattcctgatatagtaattggtatcttctctctttctttgtcagtcttgctagaagtttgtaacttttatagagtttttcaaggacccagtttttgcttcattggttttctctattatttttctggtttcaattttattgatttcttgtttttccctgcccccaccacctttccttccttccttccttccttccttccttccttccttccttccttccttccttccttccttccttccttttttccttcctttttcttgctctgtcacccaggctggagtgcagtggcacaatcatggctcattgcaaccttgatctcctgggctcaagggattctcccacctcagcctcccaagtagctaggactacaggcaaatacctaaaaaaaaaaatcattctaccataaagactcacgcacacaaatgttcattatgcactattcacaatagcaaatacctggaatcaacttaaatgcccatcagtgacagattggataaagaaaacttggtacatatacaacagggaatgctatgcagccataaaaaagaatgagatcatgtgtttttgtaggaacatgaatggagctggaggctattatcctcagcaaactaatgtggggacagaaaacaaaatactgcatattctcacttaaaagctaaataatgagaattcacgaacacaaagaaagaaacaacagacactgaggtttccttcagggtggagggtgaaaggtgggagaggagcagaaaagataactatagggcttaatacctgtgtgatgaaataatctgtacaacaaacccctgtgacatgagtttacctgtgtaacaaacctgcacatgtacccctgaacctaaaatgaaaaaaattagcttgtgactttgctagctcacttattagttctaatagccttattggtagattatttgagattttctttgtagacccatatgtcatttgtgaataaagacagttttaattcatctttccacatttatatgccccctttttttcctcacgttactgagctggtgagggctttctgtacagtctcaaaaaggagaaacacccaagagtcttccttctttttctggtgacatgactcgttggtaagtcatctcccaagaggatgaaagtacatttttaattactagactctgcctccatgacactcacctttggaggcaatcaaaccaccttagtttgagaagggagtagagtgaactttggtagtgtgagaactgaaaaagtgagtgactcaacacttgtagtggctcatctcccagaatgaatgcccagtgattatgggtccctgatggacttaaacatgtctttggggaagctgggctcagagaagaatggacattcattgaactgagaggatagggctcttaggctacaacatggcaaatatggtgagaaagtctttgcatcatgtgtggctctgaggaaatggaggcatacaggggcaacatctaacttcagaagtcctggccaaccagtgctgggagatgggcctttgctttggacagagggaagactgtttgatggcagtcctgggtggcagagatatggcaatgccagtggcaatggtttgagagacaccagggctgttggagtcttggatccacttggcagtgaatgtttgagggatctttgtttggactgcatgtgactgaaattcttgaatgatccagaagaggataagagagagcctctaggagggtgaaaatgtacttcctgctagtcacacatttgggagttcaaatcagttttaattcaattgtgggaaatgaaataaataaaaagcagaatcattaaatgttttgagaaggaaacgatggacatgtcaagtgcatggtgtgccactgtatactggtgtgtactattctcacaggtcaagggaagaaaaggtgtgcacaagcatggaggctggagcaggtaaagcccatactggaaggacaagttcattggcctgttcagagtggaggagaacccaaggctcttgggccagggtggggggaacttgaacaatgcttctgcaaagaacttttcctacaatgagttaaaaacaattccaagatctggaaatatttccacttctttttcttatcagactaaaatccattttagtaggtatttcttgaagttattaagggaatagacttattgtttaaagagagggtggctgctccatttaccagggagaacctatttaagaacccacagtcttgggctctttccaaggcattgtaaatttactttacagtgtctgatttactttaaagcttcttgttattgcagtttaaaacaaaatttatcctgcacacatcctgtttaaaacagaattttctcctctgttaggcagagataaagaatgcaagaacgtgtgcttttatagcattgattgcaccttgatattaggtgaaaatgggccctgatgctttaaattatcaggttgatggctgaagggaaaccaaatcaatatgcattttaaaatgtaatttcattatttcttaatttagttagggtgatagttctaacaaatctaaatggaagaaaaattcattttgtctccttttcctcttgctccttcactttcttcacctttgtgttcctctttagaagtgtgacatgtacacatttttatatatagcattatggtactcctccaacatttagatcctattttcttttggaagacaacagtatgctccccaggctgcgtgacatgctggtggatcgcacctgtccctgtctggcacagaatcactagtagctagagcagctctcccttgctgagcagcccggggtaactgggaccttcttgtgcagcacttttatttccttttgccaactcacagcggatttgcctcttgcataagtgagcaaagcccccagaagtgttgtatgtgctaccccatgtcatgcaaagatggaggtagcaggctccatgcactgtgcatgcctttctgtctttgatagggctcaggtatttggcccacatctttatagtttcaaagactgccagtggaacaggagtcatgcttttcagcttatgacctctgaaagaaacacatctcatatatgcttgctttggagattcagctagttgacaatggttgatattgacaaaaaagtcaaaaatctacaagaataatattttactgctagtctcaaggaattttgacacagataggccttgactatggcccactgaagtgtcatgagaactaggtttgcttgctttttaggtaatcccctgtcatttctggataatctcgaagaaaatgccaatttcttgctgaggatgagcagccttcttggtctgaaaatagtgcttctgcctcagggcaacttccttcacgtgccctcacagatgcccccagtgctttatgctgccttctcctaagctcatcagcatcctgcccttatctgggaatcctctgtgactttgacctgggaaggtccttccactgccctgggcatcacatccactggtcatcatatccactggacatcacacacactggtcagttgctagggaaggttctggttgtagacctcggaactggccttgttttatggtaactctgtgacttcaggatagagactacgtgtcccatattggttccctttaaaacagtcaaccagaattgtgtcacttgctgtttcaaaacttgtgtttcttgtagaacctaggcctcagttgtggtttgaatgcttctatattcagatgacttttcgggcaaaaagattggcacttcattgatgactggtcaattcttcctagctagaccaccagtcctgctcatcgtctaggctctctttgactcaattcccccatcaattgtcaatcaagctctcttcttcccctcttctctatctatctctctaccccagctttggtgttctacaatatttaaatgttctaatttacagtttttgtgacactttggttccatgtaacagaaaatccaactgtaatttgcttaggtaaccatgatctttttaactcacacgactaaaatgtttacaagtaagacatatttcaagcatggctggatctagggactcaacaatattctcagaaccaaatttttctcctttcctttttataaattttgcctctggttccttggaggtgaatccatttttagataccacatggaggcaagatgactggagaagctctaatatccacatggcaagaggtacctacatggcgtggtccccattccattaatggcatcttaagttggctgcttcttgtgcaaaacccagtctctgttgggtaaatactgtcagttcaagatttcctccttggttttctccccaggggctctggaagtcatggtgcatgggggcggggaagtggcttctttcttggtgtcttcatgggcttccatccctgctcagtcttctgatgaaacatttgcttccccttctgctctccaagtaggtatctgttgtttttgtcccaacttcaaggtgtcctcattcagctacttccatctttctgtggcacaagaatttttggtcaccctgctgtttcctgtggggactgcctgagcctttaaaaaaaaaaaaacactggctaggggcagtggctcatgcctgtaattccagaattttgggaggccgaggcaggcagatcacctgaggtcaggagttccagaccagcctggccaacatggcaaaaccctgtctctactaaaaatacaaaaattagctgggcatggagggcacacctgtaatcccagctactcaggaggctgaggcaggagaatcacttgaacccagaaggcggaggttgcagtgagccaggattgtgcactgcactccagcctgggtgagaagaaacaaactgcgtctcaaaaaaagaaaaaaacaacaacaaaaaaaacctaaacatacttgctatcatttctagcctaacacttcaaatataaattgagtctcagattagcttactcacatatttccagccctgtgttggtgtttctaactccttctcacaagggttttgacaaggttgagcaggggccaaggagtaagctttgatcataagtattgaaaaccttctcctttctctagctggttagatttttaaaaaaatcacctattgcttaaaaaaagagctgcattcctttctgcgccctctctaactctgtaaagcatattcgttctgtgcttgagtctcctaggctttgctcttgctggtcacaggcaaatatctggaattttaatacacacagcaaacagcaacagttacaaaacattttctttcttaagtttctctgaatccatggctttcaagactgttctctgtgttttaaacttgaaagagtactgtgagagatggagaaaccaagaattggaccctccattgactcagaggctcctgctgagatgttaggaagaacaaacactgggaaatggggcagggtgggaaagggtgcggtggaggacgtgtatttgtttaagtggtccaaattttaacttatttctattatgcctaacagctcttgtatcctgaaatcatatataataaaatgctgtaatgaccatcacaggatgatcttacaaaggacataactagtagagtttaggagcattggtggaaaggagggaggaaatatacatattctcccaacatctcaggttggatcagggtgtagtgagtgttctgtctgggatgtgatatgctgagatgacaatgacagtatttgtgaagctcaagcttcatggtgttagttctgaacaggaagaaggaaggaggtgctacagcagtggttccagactctgggtaaatcaccctgggggtacttaacaaaaatacactgggcctcctgagccagaatctctggggttggtgataagcttccagggttttttcttttttttttgagacagagcctcactggcgcaagcttggctcactgcaacctccagctcccaggttcaggtgattatcctgcctcagcctcccgaacagctggaattacaggcatgcgctaccacacccgggtaatttttgtatttttattagacacggggtttcaccatgttggccaggctggcctcaaactcctgacctcaagtgatccaccagccttggcctcccaaagtgctgagattattggtgtgagccactgcgcctggccatagggaattttattgtagccagcctagtacaagtcaagtatgtttggggaacactgtgttagatcagggaagaatcaacaaaatataaaatggcagcatgatcccctggtagcctggttttaagagacttcattgtcaagtgctctgacatgaatagtgctagacaagaaagaatactgagctgaaagaattttaatgatttatatgtggaggagaagatgttttctttgtaaagttgtcaaagctaccatatttggaactctttagaaatggttggccgataagagaccctgatgtgcaaaacaaaccattggggaaagatgctaaactgtttttcttctattgattgaacctaattaaaatgatgtcttaacattaagctatattccacttgtcaagctatgaataattttatctgcctttctctcttctaaccaggctaacattaagagaggccagtattgaaggctgcatcattaaaaatcctgtccaggtaggagaagtctctggagaaagccctatacatcataagactgctctgtttctgtgtagcaggatagaacaaggaaagccttgtcttcattatttcccacggattttaggacatcttttgcagctgcattcagatactcacgaagtaagcctttgattaggaaggcggagaaacagagatgcttaaatggaaccgggcaaactaaagtgagcacatagcttagtttgtattccctttccttttgttctctctgatagtgtttattctttcttatctgaaagcattttattgtctacttaaaaaatcttaggtataaatttatagagcttggattttaggatttatataatctctgctttgctgaacattcaggtgcttttaacaactgaaatctttcaagttgtatgccaggtttttgtgtatgtaaggttttctatggaagaagattcaaatatttccttagattttcaaaggagtctttggcttcaagatgataaagaactaagcagaagtcttgatgctaagtcaacagttctctttgggaatttgacagtgctaatcggtagtttctatagattacaagatgccccacacctgaacaatagaaaaaaatctaaggtcatcaaatgagacccttgaggggcggtcctccttgcatctggtctgagggctgtagcaactggttcctttctcttgataatgcttttcttgtttgttttgaaatgtgggttgctagagagattaactgaactaggaggggttctcagagatgtggcagtgcagagagggctcatgacttagataactctttagcaaagtgctgtactgggccaaacttgacatcacctggtgcagtcttgtgcaggaggcatgcacctgagctctgatgaacaatcctctgtaaaactctattcttcttgctttgggtcttcttgcaaccccagggagcctgctcagagagtctgtcatggtcatggcataataattgattttaaactgggcacagtagtgtgcgcctatagtcccagctatttaggaggccaaggtgagaggattgcttgagcccaggagtttgagtccagcctgggcagcatatcgagatcttatgtctaaaacaacaaaaaaaattaactttataaaaaaactatatattttatcctctgtggctaaaaatttattcagaataccccctctatcttactccttaatatatttgaatgtcaatagctatttcaagaggaagagagggcaaaagtaaacattcttgaacattaatatatctgaagctttcctgtagtaacattccatccacagacaagtctgtaaagtaaggccatgccagtttatagatgagaaaaatgagcgctcctctagcaattctgcctcagcaatggtttctctaatcctttccactctgctgtcttctctgacctaaagcaaacccatttcttaggatgaccttcttccttttaagtgaatgaacaatttctgtcctcttcatggccagctataaagaaaaaacttgccttgactttctgtcttcagactctcatttcctttctctcctcatcattgcttctgaaacaccccagaaactcctacttgtcaacttatcctaaattccagagaactgatgtgagttggaaaggaacggtgggttcgagaagattgcagaaggctgggaacaattaaaaggatggaagtggcagccagggtacaaactgggtcaaaccaagaggggcccgtccctgtgagagggtcaaggtttcacagaagcacaggtgagtgcagaggtgcaagctgtgagttgttgcaagaaaagcaaatgagcatgtgtagaaggcaaatgcactggaaacgttgtctctgttgaatgtgcttatgatcagtgagagcctgcatggctcttggaatgctggaaacagttcccctgacagctgcctggtagtttttgttattcaaattgcacatcaaattgttctttgactggtctcatggattttattcctacacaggtgcaggctaatatgcagccacagactcgaagggaccctgcatgcaatttctggagctctttctctcacatcatcctttctgccactctgctcacaaattctagttgcctcagtctcccaaactccaacctctgtttcctgagctcagcagaactgctgcactatgcttgcagtctcctttcacaagtctttatagtcttatacactagctgatatattgtgtattatttgtttattttctgatattgtacagctatagtaggtcctcaatgtgttaaattaatacacgaatgcatcaacagaagggttcggttagttgctgtttttactattttatttcagtttagttttatttcattttactattttatttattttattgagacaagatctcactctgtcacccaggctggagcgcagtggcaccatcaaggctcactgcaccttcaacctcccaagctcagcctcctgagtagctaggaccacagatgtgccaccatgcccagctaactttttatattatttgaagagatgggatttcaccatgttgcccaggctggtctcaaactcctgggctccagtgagcctccctccttggcctgacaaagtgctggtattataggtgtgagcccccactcctggctttcagctggtttttattcaggttgtttggaggaggttgagtatggtgcaacctcagatgaagactccaaattctctttccctcaccctcttttctgggacccacagtccacccacatactattgatcttctgaatgccaaaccagactaattatcgtcttccttctattcccaagtctgccttccttagatattccttgtctggaaaaataatactatatacatgttttactttattcatggtaaattacctgctgtcctgaacttactctttcaaccacaacattaattgaaaattttttgcatctcctatgtgccagccactgtcctaggagctgggctaataaaagcactgccctctaagagcttacatttcagacagggagacacgcaggcatgcaggtactactacactgtaataaatcacaacagaggcagaaaacaagatgctcggagacttaacaggaaggtaaggtctccttgtttcgcccatgtctctgactctccccaaccactatctctagacttcgagaagtcccattcattctctgttattcagcacatatatatatctcttgggcatagttcaaggtccctggctttatgttgctccagtgtgtttatacagctaccataacacttactgcttgtaaggctaggatcatggttttttgtgcctctgtagtcaaatcaaaagcatagctcctagcacatcataggtgccgaaagaatcaagaggccaatgtgacatgccattttccttatgcagggcccaaatctcatgcccctgtatagatattttgtagggtttggtgacaggagtactggtggtggttatatactgtacggtatcactagagcatgggattttttttccataggttattggggtacaggtggtattcggttacaagagtaagttctttagtggtgctttgtgagattttggtgcacccatcaccagagcagtatacactgcaccctatttgtagtattttatcttttgcccccctctcatccttccccccaagtccccaaagtccatcgtgtcattcttatgtctttgagtcctcatagcttagctcccacatatcagtgagaatatacgatgtttggttttccattcctgagttgcttcacctagaataatagtctccagtctgggcacgatggctcacgcctgtaatcccagcactttggaaggtcaaggtgggtggatcacctgaggtcaggagttcaagaccagtctggccaacatggtgaaatcccatctctactaaaaatacaaaaaaaaccaaacaaacccaaacaacaacaacaacaaaaaaattagctgggtgcggtggtacatgcctgtaatcccagctactcaggaagctgaggtaggagaatcacttgaacctaggaggcagaggttgcagtgagtcaaaattgtgccactgtactccagcctgggcaacctagtgagactgtgtctcaaaaaaaagaaaagaaaagaaaaaagaataataatcttcagtctcatccaggtcactggaaatgccattagttcatttctttttatggctgagtagtattccatcatatatatatacacatatgcgtatatatatacacacatatgtgtgtatatatatacatgtatatatatacacacatatgtgtgtatatatatacgtatatatacacacgtatgtatatatacgtatatacatatatacatacatatatatacatacatatgtgtgtatatatatacgtatatatacttacatatgtgtgtatacatatacgtatatatacacacacatatgtgtgtatatatatacatgtatatatatacacacatatgtgtgtgtatatatatacatgtatatatacagatatatatatacatgcatatgtgtatgtgtgtatatatatacacatatgtgtacatatgtgtatatatgtatatatctcacagtttctttatccactcgttgattgatgggtatttaggttgtttccatgattttgcaattgcaaattgtgctgctataaacatgagtgtgcaatgacttcttttcttctaggtagatacccaatagtgggattgctggatccagtggtagttctacttttagtcctttaaggaatctccacactgttttccataatggctgtactagtttacattcccatcagcagtgtaaaagtgttccctgatagctgcatctatgccaacatctactgttttttgattttttgattatggccattcttgcaggggtaaggtggtattgcattgtggttttgatttgcgtttccctggtcattcatgatattgagcatttttcatatgcttgttggccatttgtatatcttcttttgaaaattgtctattcatgtccttagcccactttttgatgggattgtttgtttgtttttcttactgatttgtttgagttcattgcagattctggatattagtcctttgtcagatgtataaattatgaagatttttctcccagtctgtgggttgtctgtttattctgctgactgttccttttgccgtgcaaaggttcgttagtttaattaagtcccaactatttatctttgtttttattgcatttgcttttgggttcttggtcatgaaatccttgcctaagccaatgtctacagggtttttccaatgttatcttctagaatttttatagtttcaggccttagatttaagtctttgatccatcttgaattgatttttgtttaagatgagagatgagaatccagtttcattctccttcatgtgattagccaattatcccagcaccatttgttgaatggggtgtcctttcccccactttatgtttctgtttgctttgtcgaagatcggttggttgcattgcaagtatttgggtttatttctgtgttctcttttctgttccattggtctaggtgcctattttttataccagtaccatgctgttttggtgactatggccttatagtatagtttgaagtcgagtaatgtgatgtctccagaattgttctttttgcttagtcttgctttggctatgtggggtcttttttggttccatatgaattttagaattgttttttctaattctgtgaagaatgttggtggtattttgatagagattgcattgaatttgtagattgcttttcgcagtatggtcattttcacaatattgattctacccatccatgagcatgggatgtgtttccatttgtttgtgtcatctatgatttctttcagcagtgttttgtagttttccttgtagaggtctttcacctccttggttaggtatattactaagtatttaaattatttttgcagctattctaaaagggattgagttcttgatttgattctcagcttggttgctgttggtgtatagcaaggctactgatttgtgtacattaattttatatcctgaaactttgctgaattcatttaccagttctgggagctttttggatgagtctttagggttttctaggtatacgatcatatcatcagtaaacaacaaaagtttgacttcctctttaccaatttggatgcccttgatttttttcttttgtctcattgctctggctgggacttccggtactatgttagatagaagtggtgagagtgggcgtccttgtcttatgccagttctcagggagaatgctttcaacttttcccgtttcagtataacgttggctgtgggtttgtcatagattgcttttattacattgaggtatgtctcttgtatgccgattttgctgagagttttaataataaagggaagctgtattttgtcgaatgctttttcttcatctattgagatgactgtgtgtttttgtttttaattctgtttatgttgtgtatcacattttttgacttgcagatgttaaaccattcctgcacccctcggatgaaacccacttgatcatggcggactacctttttgatgtgctgttggatttggttagcaagtattttgttgaggatttttgcatctatattctacaaggatattggtctgtcgttttcttttttgattatgtctttccttggttttggtattagggtgatattggcttcatagaatgatttagggaggagtccctcttcattccatggaatagtgtcaataggatttgtaacaattcttctttgaatgtctgatagaattcagctatgaattcgtctggtcctggactctttttttgttggcaatttttaaattaccatttcaatcttattgcttcttatcggtctgtttagagtttctatatcttcctggtttaatctaggagggttgtatatttccaggaatttatccatctcctctacgttttctagtttgtgtggggaaaggtgttcgtagtagccttgaataaacttttgtacttctgtgttatcaatagtaatagttctcatttcatttctaattgagcttatttggatcttctctcttcttttctcgaaaattgtctattttcttggttaatctcgctaatgttctatcaattttatttatctttcaaagaaccaaccttttgtttcatttatcttttgtaatttttttggtttcagtttcacttaattctgctctgatcttttttatttatttttcttcttctgggtttgggtttggtttgttcttgtttgttcagttctgtgaggtgtgaccttagattgtttatttgtgctctttcagattttttgacataggtatttaatgctatgaactttcctcttagcaccgcttttgctgaatcccagaggttttgataggttgtgtcgctattatcagtcagtccaaataatttttaaattttcaccttgatttcattgttgacccaacaataattcaggagcaggttatttaatttgcatgtatttgcatggttttgacggctccttttggagttaatttccagttttattccactgtggtctgagagaatactcaatataatttcggttttcttaaatttactgacatttgttttgtgccttatcatatggtctttcttggagaattttccatgtggtgatgggtagtagcagatctttttgtaaatgtcctttataaaaggttaaaaatgttcccttgtaaccccagtttgcagataatttatatcaggaatggatgataatttttgccaaagttttaaattttcagtatctgttgagatggccagtttttaaaagtttgatattattatgaattaatttatttgcaaatcaacattagttgattttcaaatgttaagccagccttgtctaactaggctaaaccatacttggtcatgatgtcatttaatatgttgttgaattcaatttgctaaaattttgtttggaatatttgcattcatgttcataggggatattggtctgtagttttacttttgtgtaaaatctttttctgattttggtattagggcaatactagcttcatataatatgcagtgaaaaattcactcttctttcatttttggaggaatttgtgtagaatttgtataattcctccttaaattttttggtagaattcaccagtgaagctatttggttctgtagtttttttgtgggaaggttttaaaagtataatttcaatttctattaaacatttagggctttgcaggcaatttatttcttcttgagtgagctttgctaatttgtgtctttcaagaaatttatcaattttatctaaattgtcaaatgtatcagcataaagtagtttctaatgttttattatctttttagtagaacctgtagtatcacccctctcatttctggtattggtaatttgtgtcttctttttctttctaatcagtttggctagatgtttatcaattatattgatcttaaagaaccagcttttgatttcattgtttttttctactgtttttctatttttctattttacagctttttacttattttttgttatttattttcgtgagcttactttaggtttcattttctcttctctttctagtttcttaaggtaaaggctaaaattgagttgggaactatcttcttttctaatataagcattaagtgctataaattttcttctaagtactgatttaatggtcttttgacaaattctgatgggatatatttttattcagttaaaatactcataaatttttgttttgagcatttagtaccataaattttcttctaagtactgatttaatggtcttttgacaaattatgatataatatattgttatttttattcagttaaaatactcataaagttttgttttgatttttttggttcatgggatatttagaaatgtattatataatttccaaatatttggagaatattccaaaggtctttctgtcattgacagaggggcattcaaatctctgactacaactgggaatttatctatttctccttgatgttactgtagtgcctgctaatccatggttttactttctgtggtttcatttatccactatatagtacaataagatattgagaaagacagagagagagagagagagagagggtatactcacaaaactcttattacagaatgttgttataattgttctattttattattagttattgttaatctcttactgtgcttcatttacaaattaaactttatcgtaggtatatatacacaggaaaaatcatactacatatagtttggtactatctgtggttttaggcatccgctagggttcttagaatgtgttctccatggataaagagggactactgtctatcagtttggttgcatttgtttgtttgtttgttttgagatggggtctcactctgtcacccaggctagagtgcagtggcgtgatcttggctcactgcaacctctgcctcctgggctcaagcagttctcctgcctcagcctcctatgtacctgggacttcaggtgtgcaccaccatgcttggctaactttttgtagagacaagctttcgccatgttgcctaggctggtctcaaattcctggactcaaggaatctgcccaccttggcctcccaaagtactgggattacaggtgtaagccaccttgcccagcctgtatatatcatctatttttgattcatctattttgaagcaatctgttaatacatgcatattcatttagaatttttatgtacccttgatgaataaattctttattattatgaaatgacattcttcagtcctcataatattttttcctctgaaatctactttttctgatattcatataagccttttcagatttatttttattattgttagcatgatatctacatttccatcttttcattttttaacctgtttgtatttaaagtgtatatataaactcactttatatttatatatttataaatatatatacactttatatatatttataaacataaagtgtatatatatttttatatacactttatatatatttataaacttataaagtgtatatatatttttatatacactttatatataaatatatatacacatatatttatatatatgtgtatatataaatatatatattatatatatataaaatatatatatttgtatatataaaaatatatattgtatatataaaatatatatatttgtatatataaatatatataatttgtatatataaaatatatatatttatgtatatataaatatatatttgtatatatatttatatatatataaagtgtatatatatacactttatatttaaagtgtgttttctataggcagcatatagttgggcctggctttcatattcaatctgacaacctctgtgttttaattagtgtatttattcaatttacatttaatgggattatggtaaggttaggtatggctgtaacatcttcttatttgttttcagtttgctttatttattattctttttctttctccttttttcctgttttttttgttttagttaatttgtttctatgattcagttttttctccttgtgggttcttagttataactcattgttctagtatgtaatggttgctttattgtttatggtatacatctttaattatcacaaactaccttcaagtgatatatcacttcatgtatagtatactttcatttctctgcgcttggtctttatggtgttgttgtcatgtactttacttttatgtgttataaacccaataatacattgttatttctgtttaaacaagcacatatcttttaaggagacttaagtaataagaaaaaatttcttatatatttactcatgtagatatatttttggtggtcttcattcctttgtgtagatccagatttccatctggtatcatttttcttctgcccaaggatgttatttggcatttcttgtagtgcagacatttcttctggtggtggtaaattattctagcttttatatgtctaaaaatgtctccacttcaccttcatttataaaaaatattttttgctgggtactgaatactgagtgacagtcacctgccccccagtacttcaatgatgctgctccaatgtctcttgcttgcctgcaatctttggtgaaaaatctgatgtcagccttatctttgtttctctggatgtaatacgggtatattttctggctgtcagatttttctctttgtcattgttttttagtaacttatgctgtaatttggggtagttattttcatgtttatttttcttggtgttcattgagcttagatctgtaggtttatagcttcactaagtttggaaatttttcagccattatttctaaaaatatatttttcagtctttcttcttcagggactccagttactcatgtattaggccactgaaactatcccacatatcacttatgctttttcattttttggaattttattttctgcgtgttttattttgggtagttttcattgccacacttttaatttcactgatctcgcctttcttctacaatgtccaatctgcctttttcttcctccagtctatttttcacctcagacattatagttttcatatctagaagtttaggttaagccacggtggctcacgcctataatcccagcactttgggaggccgaggcaggtggatcacctgaggccaggagtttgataccagccgggccaacatggcaaaaccatgtctctactaaaaatacaaaaattggtcgggcgtggtggcgggcacctgtaatcccagctacacaggaggctgaggcaggagaatcacttgaacccgagaggcagaggttgcagtgagccgagatctcaccattgcactccagccttggacgacaagagtgaaactccgtctcaaaaaaaaaaagaagtttaattttaattttcatctttgtaatattcttgggccaggcacagtggctcatgcctgtaatttcagcattttgtgaggctgaagtgggaggattgtttgaggtcaggagttcaagatcagcctgaaaaacatagcaagaccctgtctctacaaaaatttttaaaaactaggtgggcatagtggtatgtgcctgtagtattagctactctggaggctaacagagaagagtcacttgagcccaggagtttgaggtaacagtgagctatgatcaggccagtgcactccagcctgggtgacagagtgagacactatttctaatatataattagatatctgtaatatctaatatatatatatatttataaacaaataatgtatatatatttcctcaatatttctacttaacttcagaggttaaacaatatggaaaacaattctaataatggctttaacatctactttgttaattctaattttatcagttctggattggttttgattgattaataaatgtcttcatttgggtcatattttcttgcctctttgaatgcctggtaatcttttattggatgccagacttgtaaattttgccttgttggtgctgggtgttttcgtatttctatacagcttgaactttgttctgtgatgtggttatgttccttaaaaacagtttgatccttttgggtcttacttttatgatgtgttaggtcagtccagtgcaatattcagtttacccttgtataaccgaggtaagacctctactcaatactctgtgaattatgattttgtttttactctggctagtgggaacacacactgttcctcatcctatgtgagcatgctgttccttcagatacttttgggtgagtttttccataacctcaactatttttcttagatgaatccgttgatctgcattctactgaaaaatccagatggaccatgtcactggcaactctcttttctcttgtcctctgtcctgtgaatttttgctgccttggtctctgtggaatcaaggacatggaacaggatggagaacttagagaagctgttggattccctgagtcctctttcttgtcacttatagccatactagtacattctttttttctccccagagacagggtctcactgtgtgcccaggctggagtgcaatgtcatgatcgtaactcactgcaacctcaaaatctcgggctcaagtgatcctcctgcctcagcctcctaacgtactggcatgaaccaccatgctcagccactagtacattcttataagagttttgttgccttgtttgcaatagcaaaaagacctttaaataatttatatagaaatcattagaatacactataatagattattgtacaactattacaagtaatgtgctgatatggaaaattctatattaaatgaaaaaagtaaagtattttatacttattatatacaattgtttgtattgttaattaaaaatcatctgtgtatgtgtatgtatatgtatatgcatatatgtgtgtataaatttgcatagacacaagaaatttaacagttatcttagcagacatccagtgttttgtgtgtgcagtttgtcttttcattgtttgaattttcttttggatatttttgttccacagtcatgtcatctgtgagtaatgatagttttatattttcttctctaatcctcatgccttttatttctttcacattgttgataacagtgtcttgttcccaatctcaaagggaaaatcttcagcatttgacctagaagtctggtgctttctgtagaattgttgtttatataaatacctttctcatattaagttagtttcattctatagtttttattttaattttaaaattgtttaagattttaaataattataaatgtaaatttgtaaatattagatattttaaattttaaattatgtaatttgttgattagattgacattagatttaattgggatctttttctgaatattttgaagtgatttgcatttttttcaccttttgtcctgtaaatgtagttattatactgattgatttaaattaactttgcattcctgggataaatctaattggtttgtccacgatgagataccatctcacgtcagtcagaacggtgattattaaaaagccaagaaacaacagatgcaggtgaggtcgtggagaaacaggaacacgtttacacagttggtgtgaatgtaaattagttcaaccattgtggaagacagcatggcgattcctcaaggatctagaaccagaaatatcacttgacccagcaatcccattactggatatatacccaaaggaatataaatcattctactatgaagacacatgcacatgtatgtttattgcagcactatttacaatagtaaagtcatggacccaacccaaatgcccatcaatgatagactggataaagaaaatgtagtacatatacaccacggagtactatgcagccataaaagggaatgagtcatgtcctttgcagggacttggatgctgctggaaaccatcatcctcagcaaactaacatgggaacagaaaaccaaacaccacatgttctcactcgtaagtgggagctgaacaatgagaccacatggacacagggaggggaacaacgcacactgggaccgtggggggtttgggggcgaggggagggaacttagaggacaggtcaataggtgcagcaaaccaccatgacacacgtagacctatgtaacaaacctacacgtcctgcacatgtgtcccggaacttaaagtaaaataaaatcaaagaaaaagaaaagaaaaaaagaaaaaaagaaaagaaaagcatatacatagcttgaaaaaaaaaaaaaaggaaagaaaatgtaatcccagcatttttggaggctaaggcgggcggatcacctaaggtcaggagttcgagaccagccttgccaacatggtgaaaccctgtctctactaaaaatacaaaaattagccaggcatggtggcaggtgcctgtaatcccagctacttgggaggctgaggcaggagaattgcttgaacccgggaggtggaggttgcagtgagctgagattgcaccattgcactccagcctggacaacaagagtgagactctgtctcaaaaagaaagaaagaaagaaagaaaagtaacatacttaaaaaaaaaagtcttaaaagttctccatcaggaactaggaatactaaaatatatttttattagttacaaacttagtaagatattaaaataagagggatagcattgaaagttgagagaaaagttgggtgtattttaatgccgtgctgtcctgaaatgtcagaactatgtactagcccttcctgtaagggtaagagtcctagcaaagaattcagagtaaggtttttgtttgtttgtttgtttgttttaccaaactgttccaatatagtcctagaatgctgtaaaagccatgttaaattaaaccaaaattgataaagttaaaaaaaaacaccaattggtttatgatatatatatatatatatatattgatagattctgtttgctaatatcttgcttaggatttttcatctgtgttcaggagtagattggtctgcactttccttttttatagtgtccttgtcagatttagaatcaaggttgttagcttctttttctattatctcaaaaggattgtgtgaaattgttatttttattttcagcctgtttcaatctactgttaatccatatgatgagttcttagtttcagttactgcatttttaagtcctagaatttttgcttgatacttttaaaacagtttctaattatctgataacattttctatcttgtttcttattttcaaataattagcatagtgattttaaagtctccaatctagagaatgttttcagtagtttttgttacttttttttttttttcttgagacaggatcctctgtatgttgcccaggctggtccaacttcaggcattgagataatttgaacctaagttccttcagtgtctataggccttccagtttaccctcattccagaggtgattcctttaaattcaaactcagtgcacagtaggagtgaggggcattcactaaggcctgatgggacctggattctaaaacttttccctctagacccatgagtccttcaaaactgcagctcagctcttcagcttctcagtctttctttctggaattggcaacattccctagggcagaaatgtcccagcgcaggactcaattccctggtcctccaactttcttggtttctgtcttggaaattcttcactattttagcactctgttgccttcaagtagaattgctatttccctcttaactagtttgcgcttactagaaatggacacagtaactaccttctttccaaaaccgggacttcaaatagaaagttctgctgttggtgaccagaagcttggccgccctgcctctgctgtccagggggaagcaggtggagagaggggccctccatgcctgttctttccgggaggcaggcctcttctaggtgaacatccttatatttgcttagctgacagtgggtatttctttaaatgggctgtttggttataggagacaattagattaaaaaaaattctgaaagctgctgcttgccaaattttattgatgatgagtgagctttgcagaaaatttccaaaataggttcattgttcaagtcacctgcctttctgcttttgaatcctcaactcacacctgagcagtggtccaccaagtctgagccccccaagcctgaggcctgacagaggcagagtggatgggataagagggtgagcgcggaggtcagcacttctgaggttcattcctgctctcagatgtgatgcttctgggtaacaggagccaggccgggagtcatgtctgctgggatttaaccatgctctgccattcactggctgtgccagaaagagaaaaagcatctaatctcattttaaaaacaagggattaagagattattagctgattccagatgtggctgctcattcaaagtacccaaagaggttgtgaaaaatacagatgcttgagtcataccccacactgtctctaccccaggacctgagctgctgaataaaacctggaatatatatgtgtgtgtgtgtgtgtgtgtgtgtgtgtgtgtgtgtgtgtgtgtgtgcctgcatatgagtggcataaaataatcattcattattattaccattatcgcctgtcacagttccaggggttgacggggcctagtgaggcagggcctgctctgggtctatcatgcagggcagtagcagaagactgaggctggagtcattctgaaagcatccacttactttctttcttgctttctttctgttttttgttttgttttgttttgtttctgtttttattttttttatttttttgagatggagttttgttcttgttgtccaggctagagtgcaatggcacgatctttgctcactgcaacctccacctcccaggttcaagcatttctcctgcctcagcctcccaagtagctaagattacaggcgtgcaccaccatgcctggctaatttttttgtatttttagtagaaatgggttttcaccatgtaggtcaggctggccttgaactcctgacctcaagtgatccacccacctcaacctcccaaagtgctgggattacaggtgtgatgaaggcattcactttcgagtgtctgagctgtgggtcagaatacctgcacttagcttctcccggtggcagggacagaatctacatttttaacaagcccccaagatgattatcagttggctaggcagtggtctctgacaacattttaggaattactggacaacatgaaacttttagtcccttaaagttgtacagttccagaattcaagtttttcttttgaagtaaaaaataacttctgttttaagagaatacaggtgtttctcaaagcaaaatgtcaagaccacttttcagacataggattatcagaaattctaacaaaaagctggtagaatactgcccaatagaactctgtttattcagttggatgtgctttaatcgagttctcactctgtgcaagttactgtttgggaaggtgtagacttgtattatttttatggctactaacaaagattacacataatccagagtagcagtacatttaaggtgagtctacatttccttgagactcaaactcctgctgttgtttgtggaaaatgagtatctggggcaaaagaggaagtgagagcccttaaagagagcagaccttcctgcgaagctgcccgctgtgcttggcttggggacagccttgtatattgggccaaaaatgtttgcctccaatattgtagggtagggtgcatgtgactgccacactggcttcttggtgttcatcaccagacaaacgtctgttttcctgccatgatgctaaccatgtttagcatttgtgtccacttggtatgataactggctagacattttgctcctttctcaaaaacaattttaactagttcataattaatatgccacaagacaaactatggttcagcattgggtcttctgggtgtttcaggcattaaaaagaaaatttatttcggggaatcatactagtcaattgttacttttcatcattacagtttccagaggtttattggtggcagatgttgcactcttttttaaaaaagaaaaactaaaaaacaaatggacatctccccgatggattcttagtgaaatgagtctttaaaaagagaaaccaggggctttctcatagtaagcagaaatagaccaacttaggttttaggccaagtgatgaataacgatatggggggacatcatgtaaacaaactactctgtcttttaatgattcttatttcctaatttaaaactgcaacaatatccaggaattctcactttctggtgaagagtgagaaatctttatgggctctcatgattcagttgaaagcaagaggaaatgtgcctcagacattttccttgaacattctccttctgggcaggaagtggaagtgggcagtgttcactgaagacgtggccgtcagatgggaggaaaagctgatggtgtgacaaaatatctacctccccttcttggtgtgtttccttcttccctagtatttctttgctttttttttttttttatatacaacagaaatttatttctcacagttcccacagaccttgaagtccacagtgaaggcagattgagtgtctggtgagggcttgcttatggctcctgagtgggaccttcttgttatgtcctcgcgtggaaaaggaacactctggttgcttcggacacttgtaagggctctaatgccattctttttttctttttcttttccctcttctgtgttggattttctgtttattattattattattattatactttaagttctagggtacatgtgcacaacgtgcaggtttgttacatatgtatacatgtgccatgttggtgctttcctggtatttctaacttagaaactaaaccaaagctcagtgacatgtaagtattgggagaaagccaatcagatgattactgaaagtgattagggagtaaacctgtgtgcacagagctaaactgagcccttcttactgagaggggagcatcaggaactgccttcctttgcgacgatgaaaggctgtcccatctataggagaaaaggttagagaagagtcaagctttgttgtttagttattgggtgcctttagataaatctcaatttctccacagaaatttctgtaatactaaagtgtcaaaatttgctggaaaattttttaaatgttcaaaaaaatattgtacaaatctaagacagtggtgctaaaacaatactagttaaaaatggactttattttatttggtaagaatgcccatatttacaaataactccgtataaatccaggtctctgaaagcaatacagtctctgagaggagctcgatttgagtgttatatgtgtatatctttgcattcttgagtctgtgttttttcataaatttcattttcttttactgttaaaatataactactaattaaataaataattattatttactaatgtgcaagcactatacagttctttgtatggtgcataaaaaatgataaaacactgtctcagtcctcacagaatttacactgctcacattatcttgaaaatatgcattttgagatcagactgatttgtggattttatacgtgtgcttcctgagatcattgggtgatgaacaaaattgatcatggcctgagtatcaacaagattttcaatgtaacagccttcatcagataacataatgtgtttcttagaaaggaagttcaaaaggaccaattctgttagattgctgaccttgacctcctgtggccaaaaatcctgtttccctatgttttgaaaggaaacacgtttgagaaaagctccccatcccagatttggtgattttccttaaaggctgtttggagagacaacaatggaattctgggagagatctgacatcagcaggttcatctgatctctctcaggagagagaagtgtttgtttactctgctcagagtgctatattcctatgcatgtgctattattagagtcctttgaagtagaagagtcatatgtcatagacctctttgtaattaaaaactgtaaggctgtttttctgatatgtatgtagagtagatggagaaggagaaacacttgtttgttgaaaatgaattctgaggaatttgggagcagagctttgcaagtttgggttttctgtacaatgtcacatttatttatcttaccttttcaaatgtttttggagagatggtactaaagagaaaaacatgattggacctttgcatctggacctcaagaaatttataggaaattgagtggtatccagaaactgtgctgggccgaagttaattgggagtaatacttgccctgagtacatacattgtgaatatcaaatgaaataagtcatatgaaatagcttccagaccatagctattgaaaactgaaacatttgttatttatttggctcagcataacttaaaattcaaaatttaagaaaatcacaatttaaaaaaatgatatgcaatttaattattgttactctatagcaatataccctagagttttttacatgtgtatctaattttttaagtggctgcatagtatcctcttgtatgaaagtaaaatacatattctgtgttgatagacatttaaataattttctgtttaactattttgaaaaagccacagtgggtacccaagttacacatacttttatacattctcaagcatttcttattgatggtaaaatgtgtgaaaagagaagaaacgcacaaaagatgatatgctgttgaagatgtggactaattatgtttatatttattaaggaatgaaattttgcatgaggcaattaagacaatagagtgtaagagtaaagccatttaaaaattgtaaaaaacgggccgggcacggtggctcacgcctgtaatcccagcactttgggaggctgaggtgggtggatcacttgaggtcaggagtttgagaccaacctggcaacatggtgaaaccgcatctctccaaaaaacaaaaattagctgggcgtggtggcacgtgcctgtaatcccagctactcaggaggctgaggcaggagaatcacttgaactcgggagtcggaggttacagtgaaccgagatcgcaccattacacttcagcctgggcaacagagtgagacttcgtctcaaaaacaacaacaacaacagcaacaacaaattgtaaaaaacaagccgtcttggctcctgcctccaggaagatgcaatagatatacttttctctattcctcttgctaactacagctaaaaactgtgggcattacacaaaaagtaaatatcagaagactttaaaagatgagaaacaaaaaggactggctagggatcatgggacctgggtttttgtgttgcctcaggtattctagattgggtattcgagaaacgtaatgtggaaatgccaaaggatttagactaaaaaagcccaaaggtgaatctgtttcccaaatgaccaagaaaagtgtacttgctatggtttaaatgatggcatctcctgcaaaatttatactgcaacttaattttcagttcaacaatattaagaggtatggtctttgggaggtgactaagtcatgaaggcttttccctcgtgaatgagattagcacccttatcaaagggctgtaggttgaaagaagtgctctcttgccctttctgtcccttccagcatgtgaagacacagtgtttctctcctccagagaatgcagctacaagatgctatcttggaagcagagagcagccgttaccaaacactaaataccaatgccttaatcttggacttcccagcttccataaccaaaataaataaatatctattgtttataaattacctggcctgtgatattttgttatagcaggacagactaagacaccaatctaatgagacaacttttagataatatctgctctattccatcaaaatatcacagaagctgacaatatcccaaatttggcaagagacataaacctgtagattcaaggagctgcggaaaccacaataggataaactcaaatatttctgtgtcaagacacttcataaccaaacttctaaaaaccaaagaccaagaaaaaagccttgaaagcagcaagcgagagattacttgtaacaattcaagtgatagtggagttttcatcagagacagtggaggctgaagacaaagtggcacatttttcaagtgcctaaagaaaagaacaattaacccagaattctatattcagagaaaatatcttccaggaatgaagggaaaatcaagaccttcttagtgagtcaggctgaatagttactctcctccaaatgctcatgccctaatccatagaatttgagaacatatcaccttccatggcaaaaggacttttcagatgtgatttggttcaagatcttgaggtggagaagttattctggactatctgggtgggtccaatgtaatcacagggtcattataagaggaaggcaggaaggtcagtgtcagagaaaagaaaatgatgatagaaacagaggggaggtagagagtggagagagagagtttgtgacagatttgaagatgctacctgttggctttgaagaagaaagggccacaagacaaagaatgtagaaaaggaaagaaacagatcctccctagaacctccagaaggaactagaactgctgacaccttaactttagtccagtgagactcattttggacttctgacctatataacggtgagataatacatttgtcttgttttaagctacttagtttgtggtaatttcttacagtaacaacaggaaactaatatactcagataaagaaaaactaagagaggtatgttaccagcagacatgccttaaagaaatggttaaagagattctcgaaatagaaaagaaattacatttaaaaaaagaatcttggaacattgggtataaagaaagaacatggcaagcaaaaatagaggtacatgcaataggttttccttctcttgacttttctaaattatgtttgacagttgaagcaaaaatacaacaccatctaagtggttctcaatgtatgcatagggaatatttaagaaaattatattataaatggaagagagtaaaaaatgtaacagtagataaagtttctgccttcatctgaactgctaaattgtcaacacccattgtattgtatacatataatggaatacctagagtaaccacttaaaaagctatacaaagcaatacgccccaaacacatagagaaatcaagtcagaattctttaaaatcttcaaataatacacaggatagcaagaagaagatataaactgaaaaataagcaggaaacagaaaatgaaataacatatttcagccttaacatatcaatatttgcaaggaactgtccacaagaaactaatttcaaatataataataaaaggaggttgaacgtaaaaggatggtatgacatttcattttataggtcagcttgactgggtcagatggtgtctggatatttggccaatcaatattctgggtgtgtctgtgagggtgtttctggatgagattcacctttgaatcagtagactgagtaaaatagatttactctaccttccctaatgtgggtgggccttatccaatcatttaaagaccccaatagaacaaaaaggctgtgtaagagggaacgccttctccctgactgagctgggacattggtccttctggcctttatctttaggttgaaacattgggtctcaagcctaatggctttcagactggagcttacacccttagctctcctggttttcaggcctgtagacttggactggaagtatatatcagctctcctgggtcttcagcttgctagctgaagatctttcaggacaatgtagaacttgttagcctccattattgcatatctttctatatctatatctatatctatatcatctatatctatatctaaatagatctatctcctagatatatagatataccacctgttagttgtgtttctctggagaactctgactaatataaatgggaaaatattaatatatactatgtaaacaattgaaagtgcaaataattgatagaacacttgatagaaaatcagcaaggatacaggagaacttagtaacattatcatccaacagaatttagtggacttttacaaattattccacacaataagagcaaaatacccatccttttttcaactgcccatgggctatttaccagtatagaccatacgctggggataaaataagcttcaataaatttttaaaaatggaaattattcagagtatattctctgacttacaaaggtttcaaactagaaatcaatattggaaatataataggaaaaatctccaaacacttggaaactgaacaagacatttgtaaataattcataggtcaaagagaaagtttcaagggaaatttaacaaatatattaaactgaattaaaatgaaaatacacatataaaactctgtgggacacaactaaagcaatactaggaaataacttcatagcattaacacttacattagaaaaccagaaaaatctcaaatcaataatctaagctcccatctcaaaaacctagaaaaagaagagtacaaacccaaagtaaggagaaggcatgaagctataaatgttaaatagaaaattaataaaattaaaattgaaaacagaaaattaatggagaaaggcaatggaaaaaaaagttggtcctttgcaaagatcaataatactgggaaaagtctatcatgacaaagagaagacacaacttactaatatcaggaatgagacaggagatagcactatcaactttgcagacatcaacagagttaacaaatcaagactatgaatacctgtacatacataaatttgacaacaagactgtgtgtggtgttggcagagggatagacataatgatcaatagatcattctcaatagagatacacccatccaatttatgagaggtgcaaaagccattcagtgaaggaaagaacacttttcaataaatgctgctggtgtaactggttatccataggcaaaaaaaaaatgaacctcaatttcaacttcattccttaaacaaaaataagctaaaatgaattatggatttaatgtaaaatctatgaatcaaatatagataaaatgtaaaggtgtaaaactgacaagttaacataagagaatatctttgggatctaatgcttgtgaagagttcttggacatgatactgaaggcataaatcataaaagaaaaatcaataagttggactttattaaagttaaaaaccttagctctgcaaaagaccctgttaagaggatgaggaacaacctacagggtgggagaaagtatttcacaccacatataaaataaaggattcataactagaatttataaataaacctcaaaactgaacagtaaaaaacaatctgattagaaaacgggtcaaagatcttgagacatttcatcaaagatatacagagattgcaaataagcacatggtgttcagcattactagctatcaaggatattactacacatctattagaatgcctaaaatttaaaaaaatagtgaaattatcaaatcctggcaaaggtgtataaaaacttcctctctcacacatggctggtgggagtgaaaaatggtactaaccactagaaaataacatggtagtattggtattattattatttttaaactagacatacactacctcatgacccagcaattccacggctgtgtatctatcccagagaaatgaaaatgtgtgttcacacaaaaacctgtatgcaattattgatagtggctttgctggtaatagccaaaaactagaatccaccaaaatatccctcattaggtacatgggaccggatgtgatggctcaatcctataatcccagcactgtgggagggtaaggcgagaggatagcttgagcccagtagttcaagaccagcctgggggagacctcatctctaaacaaacaaacaaatgtaaggtaaattgttaaacaaactggtgtatccataccacataataactacccaggaataaaaagaatgacctgttgatgcatgaatcaagttggatggatctcaagggcattacgctgactgaataaagccagtctctacagatcacgtactgtgtgattgtatttatatatcattatggaaatgacaaaaccatagacatagaaaacagattcatggttgccaggagttaggggtggtggagtggggcggaatgtgggcgtaactaaacggggtagtgtggggaaaatctttgcattgatgtacttattatgtctctttattgtggtagtggttacccaaatcaaaatatgtagatgtgtttctttgggaactaggaacagaaatgggctagatactcagaatggcaaggagaattttttaggaatcttatctattttttttctcatcaaagatattaatttgaccaacaagtatttattaaatgccagttaccgaaatagctgatggaatacagagataattaaaatatgttctttgccttcaaatggctgacaatctagtacatgtgtaatctccggtgcaatgtgatagatggatattaacaaaactattgttggagggctcaggtgggtctcctgatgccagtgagaccccacccctagctgatgtgagaaagaattcagggacgagtcagaatgaagtgcagggcaagaagcctccattgctaagtgaaagcacacccttacagaagaagtgtgtgtgtgctcgtgagaatgacttgtgcacaatggagtttgggtttctaatttatgggtgtttaactaatgggtggaataatcattaggtattctggaaaaggaggggattgcagggagctgcctggttatcatcccctttctcccttgtttgggtttgtctggaagagtcatgaacatgtcaccctgactggcgttttggccattttctcccttattttgggttttctgttatcctgtgatttctttgcctagttcctgtttttgctgttgtttgggtttttccatcctcctgcgaccacccagtgctattcctatctcaaaaactggcgagaatgaggcattgaaaaggtgttgctatttctgatctgggaggaacctgcagagcctgctgctgtgaggatgaggaagttgtctcagtttggcacaaatgcctccatcctcttatctgttgtccaccactgatttatcacgtccctttctctgtgcacatggtcttgacctcagaatccttctgaaacacattctaggcagccagtaccaagcaagcagagtggcttcttgacatagaagaaaagtttcagttgagtaatcttagattgtaataatcactccccctacgagctttaaggttaacactcagggtgagcaatctccaaattaacagccttcaacatgtggtctgtgtttttttcatgtttgtgattctatttagatgtaaggtgtttaaaacattttaaattttattggttgtaaatatcatgaactattttatggataacaataaaattgtatgacatacagaccttctcacgatttctaaatgtggaattacacataggcaaccacaagctgtcatgagagttttttaaccatcttggtactctcacttcagtgatgctttaaacacacaggactcctttgcatgcagctcactccttgttctcaagtcctgcaggattcccagccttcatggcctccttacaagtctcagccctgctccagtctccaagaccaatcctgatttctgccgaaggcatttaggcaactttagcatatgctgagcctcagtatctggtcacctgcagcttttatctgagattttacaaccaagcttctacttagatcctatttgaaattgaaactcagaattagatattgctattaaagagttaatatttgtatcctccaaaatccgtatgttgaaacctgatccctaatgtgatgatatttagaggtagagctttgaaaggtggttacatcatgagggtgaggtcctcatgaaagggattagtgcccttatgaaagaggtcccagggaaatctctttcccttttttgtcaggacacagagaaaagcaaacaaaaagacagcagtgtatgaagcagtttcccaccagacactgaacctactgatgccttgatcttggactttccagcctccaggatgatgagaaataaatttctgctgtttataagccatcccatctatggtattctgttagcagcctgaacagattaagtcaagtataccgggcctggcccctaaatctctttttataagctttaagtaaactaggaatacaagaaaatgacattggaagaaaagaaacacatttatcagttgtagatgacatgacaatatacctaaaaatataataaattcaacaggacaggtgaggtacctcacgtctgtaatcccagcactttgggaggccgagtcaggcaggtcacttgagctgagaagtttgagaccagcctggccaacatggcaaaaccctgtctctactaaaaatacaaaaattagccggatgcgatgacaagtgcctgtagtcccagctacttgggaggctgaggcaggagaatcacttgaacttgggaggtgcagattgttgtaagctgagatcaaagccactgcactccagcctgggcgacagagcgggactccgtctcaacaataacaacaaccacaacaacaacaaatttacagactgttagactattaaatttttaaaaatggctttatataagatggaatacagaaaaaagtattactttcttttactagcattgaacaattagaaattaaaatgggaaaaatcacattcaagataatgtcaaattagtttgtaaagcatctaagaataacttaataagagcactatatatatttttattaaaggacataaaataggactaaaataaatgagacatagtaataattcctcacgggaggaagactaaatgacatacagatgctgttccttcccaagtaaatttacaaagataatgcaaatctgattaggatcccagtgaattgttttgggaaatagacaagttggttttaaaatttgtttgtaacaatgaagttagcatttgaaaagaagaatcagaaggggaaatttgctccctaagataacacataattacttagataaaaatggttgggtaatggtatagagatagagaaatagatcagtggtacataagacagaatgtagaaacagacacattgatatatgtgggtttatgtagtgaatcttataattttatgttgcctgaacatgcattttgaacatttaactttctcttatcagtagcagagttagtctgtcttgacagtctccagttttatgctccccccactcccacacccagttgctcagtgttgttgattcagctatctgccttatataactgcctcctggtaaccccctccctatgggacagctggatacaacttacctgactggccctgctgatccccatatcctacatggacagtgcagatgtgctacagtgaccacctctcagtcacggtgtgacctggaatttgtgcctgctgctttgaacctactaactaaaactcctcttgggaaatctgtttgaataatgtcctggactccaataaagggactggcccacggatccctctcccaacacactccctgacctgtgtgtgtgtgtgtgtgtatgcaatgtgtgtgtgtgtggcctccaggcatgctgtgcaccccatgaacctgtaagtagtcaaatatttatttccatcttatatctcatctatctaatcattgaaggagtggtctccatccaaaaaaaaaagagaagattctaagtaaaaacagtttaatattacgataatgacagtattttgaaaaaacaaacttactctcacattgcatgatgtaaatataaattgtaggtgaattaaacttctaaatgtagagaaaaaacattgctaggttaactatgctgcaatatcaaaaatatcttaagatcacagtagcttaacataggaaagtttctttttttttcttttttttgagactgagtctcactcttatcacctaggctggagtgcaggggcatgatctctgctcactgcaacctccgcctcctgtgttcaagcaattcttctgcctcagcctcctgtgtagctgggattacaggcacgtgccaccatgctcagctaattattgtatttttagtagagacagtgttttgctatgttggccaggctggtcttgaacttctgacctctggtgatctgtctgcctcgccctcccaaagtgttgggattacaagcatgagccaccacacccagccaggaaactttcttgattatgtgaagtctgaagtgagcctggagattcttccaaggaagcttccttccatgtggtgactcagggattaaggctgcttccattttgttcccacaaaatttgaaccatttggtttcaaggtgtactgctgaaatggaagagaaatctgaaggttcacacaggggtcttcacgatcggggtgaaaatgacatagaactgtctatgtcacctctgctaacatctcattggctagaatgagtcacatccatgtaacttaattccgaaaaaggttggaatatggtaacatacatggatattaagtcagcattaaatatctcaatcgtaaaaagtataattatcaagaatagatatacatttttataaacttggggttgaggaagcttccttaggattatttagaaaagaaaaagcaataaaggaaaaactaaatttaacaatagaaaagcttaaaataattaaacagtgaaggatgccaaaaacaaagttaaaaggcaagcaacagattgagagaatatatttgccacacatacgaattacaaatgttaaaatttctaaagtgcagagtttctataaagaaaaaataggccaggtgtggtggcttacacctgtattcccagcactttgggaggctgaggcaggaagattgcttgagctcaagagtttgagaccagactggacaacatagtgaaacctttgtctctacaagaaataaaaaaaatcagtcaggcatggtgatgtgtgcctgtagttccagctactcagtggggcagaagtgggaggatcacttaagcctgacgggttgacattgcaaggaactgtgattgtgccactgcactccagtctgggtgacagagtaagaccctgtctcaaaaaaaaaaaaaaaatatatatatatatatttatatagatggtcagtgatataaataatatatatattatatgaggcagtccattgtagtattgtggtaatggcataaaattgaacacaatttaattttcaataagagtctgactaaatcacttacagtatggctatacaacagaatatcacgtagtcattaaaaaagaacaatgtggatctctatacactgacatgaacaaatattcttgatgtataagtgaaaaaaatgagatgtagatcactacggacaatggtgattgtaatttgggaaaaaaattaatgatatataaataaatagataaataatataaaacaataaaagtattaaaatatgacaaaatagggaaggatatggataaaactttacattgttaatcgctaaaaagtaggaaggcattcactttgtaattcatagaattttcttttttttggctcaatcttttaatataaaaaattcactgctgtatacaaaaatgtgaaagtgtgacaatgacaactatgaaatcctgtgaatgaaagtcccctcaaatgcactctgtggtgcacatgcggccgcccacaaaaactctggcgtggaaacaaactcatgcaaaccagtgctgccaagaagcgccaacacgtgtgttctccattccaccaatcacagaccaatatctactccaaacatccagtaacaaaaaatgtggcatcttcccaggaacagcaaggcagacttcttactcacgatggaccagcacaaataaacccagcaaaaagagcacttcatacttatgtttaggatagtcattcatgaggctcgtcccaattccaatataaggaacaaatcccctggctctccccacgacatcttttttctctagccaatgttgatcttgtttatagaggcctctgtcatcaaccgcattattatctcctttggtcaaaaacttgatatgcccattttgcttttcatgaatcttcaagactcggtgaactataggaatctttcttccttctatccttagaacagcgatttctcccactcgtatgggatcttcaactcgatttgttagaaagagaagatatcctctatgaaatgcaggttccatgctgccactgagcaacacaattggactttcacttccagttattaccattaaccccttccagatcatgagtgctgatgagacaatcattccaaaatttaggacttgataatagagccgccacttgttcatccactgcacatcatccaaaaagactagagacagtatggtggggatggcgagcaggacaccggcaagggagagggtgcgaggaccagcgggcagaacgactggcctgtaattcagagttttctaagtgataacttttgtctttttgtgttctgggcatggtttaaatagaaaaccttcaataatattcactcattcatttatttatctacccatctatccaaccatccatccatcgttccatccattcattctatcatacctaagaaacattgattaaaagtctatttgtaggcattgtgtttgccatgcacattcaagtcacatttagtttggcacagcttggaataagaagaaaaatgcccatgtgttttttcctttttcttctagttgactattttaaaaccaatcaacaaaacgtaaagagtctggccctgggcttcttgcacacaacatctgttttggcttccctggcctctggcctttgtctgccctgtagatgacagattagtcggggacatccttcatagtaggaaatggaggtcaataaaatttgcaccaggcttttcaatttagtatcatcccagtcaggacatcccaaaataaaatttgttttaaaaatagatctaggaggagaaaaaagattgaaaacaaacaatcctcttatgtcactaattctgtgagaaaacctgattgaaaaacaaatcagtttcttgttcaggtgcaatgattttgcgggtagaaaaaaagcagaacaaaaatagtgtaaagagtccagtgtgataaaggatactatagagcaaaacaggaagttgtttaatggaagggagtaattgacctcagagcctgagacgtgaatagatccttggatgcagaggtttttgcatttgtaaagtgttgtatcgatgctttattgaccagatttgaattgtacaccatggattctttctttttttgagacagagtcttgctctgtcgcctaggctgaagtgcaacagcgcgatctcggctcattgcaacctccgcctcctgggttcaagcgattctcttacctcagcctcccgagtagctgggattacaggcatgtgccaccacacctggctaattttgtatttttagtagagatgggatttttccatgttggtcaggctagtctagaactcccgacctcaggtgatccacccatcttggcctcccaaagtgctgggattataggcttgagccaccgcgcctggctggacattgtaaattcttactctgataattcaagcaaaatttcttgaattaaagaggagtatgagggaggctgttgtgaggtaggtttaatttttatcttcattctgatcttacaggggaggaaatgaatgctcaaagagattctgtgattagtttgtgatagagccagtaaatagaagaacccatctcaaaccaggtgtaccaaccccagacactggcagaacgctctctttatgtaagacctcaaaatcttactggttggtgtctgctgacttgtttttctctgttatcttgcctgtctgcagtgacaaattcagtgcagctctaactcatgtggacagggaggaaatgattctaggattgaggacttaagggtgtctggaagagaagagaattgttttgttttgttttgttttgttagttgttgttttcctcagacaggaccttgtcaacgctttcaaatatgtaggctgtttgctgtttcctttatgttggtccctgagaaggatctgcccttctaccctgtttccctggggggtgtggacagagcctttgtctttggggaagggggtcatcttgggaaaaggagaacagggcatcctgaggacctgctccgtctaaggagagaaagccgaacagatggcagctgccacgcagagggcactttgtaggaactctggctggagcaggcttcctgcgctccaatgccaaatccttcccttccaaggcaatgcagaggaacctgatgatgtggcttggggccagtgggcttgtggccaaagagcactaaatcaaagcaaagaagaggtgacaccttaaaagcaaaagacatttcatgtttgtttgttttggaaggcagaaagaaataagttgtaattgcaaaagagtagaagatataaaacaacatggctgtaaaatattttaatgttatttgtttgtaaaaggcttttctttaatgaatatgctctattcttattaagcaactttcccatttcactaaatgaggatggtgagtttgtaatttctggttttacctgaaaaccggtgacctggtgttagggaggctcttatccctttaaaataaacataatgcactagtttgtaatctctgcaggtatattaaaatgtttgcagtgataaacatttctagctttaaaacttttatctcttatccgaattcaagatctatgtctttaatgaactctttcaactggacattcaaacatggaaaatgtttctagattctcatctcccataatcagctgagaatggctgtgaattcccagaggaagacctgcggaagacagggctgagcttctggaggcaatattatgggagcatagatcttggggtacgtttcctcagaacccaggggactcctaggcactcactcatttatcatgatcatacgtttaatcttttttacttatgtttcaggaatataagaaaatgtatgttttaaaagcatgaacactcatacttactgaatacaatgcctgactaagaaacaaggctttataccttattaataaggagaaaatgccaagctaccaaagcatacattggaaagcaatatgacagagtagaaataatgctagctttattgttcctttacatttattagtaacctttaatgagcttctgtttgtgtcaggaactgaagttgcagagatgaaactctgaaattacaggtgcccatcaccatgcccagctaatttttgtgtttttagtagagacggggtttcgccatgttggccaggctgttctcgaactcctggtttcacgtgatccacccaccttggcctcccaaagtgctgggattacaggagtaatgcagatgatgaaagataccctttcctgactcagatgtgatgagagacttgtaagacacacacacacacacacacacacatacacacacaccctatactatacttcaggaagtgctgtggcagatgaaagctctgggaactaagagatcagcagtaaagggaatctaacccaaagtgggagcagggttaagccagacaactccggaaagaaggatgcagcaggcaggaggaacagcatctgctaaactctgtggtggggcagagcacttgcacacaggcagctgccatgaatatgattggctggtgtaggctgtgctgttggtggtggagaggaattgtggggggcctgggtatccacaccaaagagctgaggctttcagcaggggacccaaaagttcacatctgtttactcagagactaaggtggagatttttgcctggaggggtctgaggagcacattagaagctatgcaaacctgtcgaaattgtgtgcaatatgttaggagtatgtgagggtgggtaggtgtgtgtgatgtgtgcgttttcccctgggaaggtttggttatgttcttccatcttaaaatgtgtcataactctcagaaagggtgaggagctcaactaggacagaagagggtgatcagattggatggttattgcaatacttcagatgactaataatgaagtcttgggctgataaagttgtcctcgggatggatgggccaggacaatttcagagaaaataaagatatggtgctgacaggatgtgttatctgattagatctgcagggggaaggggagagggaggaagctgcccagtgcaaggcctcttgaattgtgacctgcccatgagctacctggggctcctgctcgagtgtagattctgactagaaggcctggggaggacccagagattccacatggctaacaagttctctggtgatgtccatgccatgccattggtgctgagtagcattttaagtcacaaaagtggaggtagcatactctaggtccaattctcaaccttggctgtcgacgctttctctgtttaatgattatggggcttggcattgtgagcatggtaggtggttggacagcatcactgacctctggccatgagatgacagtagcactcttgggagtgctgaggagacaaacaaccaaaaacttctccaggtattaccaaatatgcaagggcgggagtgggggcgaggcactgatctagaggttaaccactctggcttcacgttaaaatcatctgaggagttttaggagctatcagtgcctggcctcgcccagactgattatattctaatctctgcttgggggttggggagggtgcccacccagctttcgggaagtccagtgtgcaaccatctccgtggttgatggggcagcccggctgataaaacccaggactacacctgaacgcaggaagaggagcagtgtgggtggggaggtggcctgaggagtgaagataagacttcagatttacatgttgatacgagggaaatgcctggggctcatttagatggagatgctcactttgattttcttggttagtgacaagctctgtggcctcgtatctatgaaatatattttcaggtttttattttactcgtcaattctgatagtatctactctatgaatagagcagattgatgaaaaggtaaaataaatgaatggatgtgaaagaaagtaatagctgtcttacactattgcacacacacatgctcaagagttcttcagaattttatttgaaaaatcgtattttgaaagttttggaaaacacagaacaacattctataatatcagggcaagaactgatttctagaaaaaagaacaacaaacaaaaagcacaaatcataattgatgcattcaagtaaattaaaaagcaccatcaggaaagttaaaagacaaagactgaatgaaggtatttgcatagcatataattgacaaagctttagcataaagaatatgcaataaacccctaaaaatcagttacagaaagttgaacaacccaagagaaaatagacataagatatcaataagaaagctacagaagaggaaacagaaatagccaatatacataatactacaagatgctcaacctccacaatgatccggcaaatggcagctggagctgcaatgtatactatttcttacctaccagataggcaaaattttacaagtctgatacaatgaaatgttgctgaaatggcaaggaagaggaaactcatgctgctggtagggatacaaattagtactacgattctgtgagcaatttggcaatattaaaaattaaaatgtctaataacctgtgacaccgtaattccattcgtaggtaagttgtttacgtgcagagatgattgctgcagcattatttccaaaagtgaaaaattgtaaatgccctaaaggtctatcagtaagagaatggctaaataaattacattccttttaacataatggaatttgtgtatttttatgaatataaataaattagagctgtagatattaacatagataaatatcaaaggtgactgaaaaaatggtaagttacagaagctgtaattagtgtatcctgtttatttaaaatgtaaaaaatacaaaacaagactatattttatttacattggcatacattcttactttaaaaagaatcaagtgcatgcacggcaatgttgaaaaccaaattcaggatattggttctttgtaggggagagagaaatgagattggggagagtgacacagggtggagaagttaaatagtttgccctggtgtcaatagcttagagaacaggagagcctggattatacctcagcctccggccccagaacctgaactcttatgctctgtggttcatcctgaatttaaactctatctccatattgaaaaaaagtttcctggatgagctgttgtgctcaatctgctcatgataatttaattggagaaattattggttattgataaataatcttaaattttgtgattcaatcttaaaatatttctagcacagcatttcagtactagcaagtatcatagtataattgtgtgactacctgtattaccttttttaaacctacatttgatgtataatacattgactaaaataaaattcctcatcattgaaagtcaaagattcagtacaataatgattttttataaatcagctttctattcctttttaaatctgttttctactctcaaaagttctaaattttctactaaaaaaattctagtttgataagattttgtgaactttataaaaacatctctttatactgagaaggaaggagtccataaatcttgagtttgagcccatgatatggttgtttggctcctagaagtgtctgaaataggacccaacatgtacacggagctttcctaatttaaaagttccttcatgtacatgctcaatctttgtcttcgagctcagattgctgtaaccaagtcccatggacccagtgacttacaaacaggaatttatttctcatagttctggaggctggaagtccacaatcaggatgccagcacggttgagttctggtgagggcctcttccaagttgtagagtgctgacttcctgtgtatcctcacgtggcagaaagacagccagcaatctctttggcttcttttcataggggcactaatctcagtcacgagggtcccagcctcatgactttatcacctcccacaggtcccacctccaaacatcatcacattgggattacagtttcagcatatggatttttggggggacacagacattcagtccattgtacccttgaacccaaggattctgtggggtgggtagatgctatttgttacactcatcaatttgcaattgataccaaagagcagtagtttaagtgatttgctctgagacccagtgaccctgtggggattggagccagaattgcaatgtaaagcccttggtgttatcacttgtgtttggttcacttggacctgctcgttatcatgcacagaaccattgctcactgatttgacccctttctcttcactggagcagctctccagaccaccatggccttccctgcacatcctccttctgtccagagcagcaacaattcttggctcagttcatcacttcccccttgaaatgctctctggcttctgggacctcctctcttgctctttctcagtcactttgcaatctccacacttctaaatattggaggtctcaggactatgaagttctcttgtatctacatgcatttgttattttttaaaatttaaaatatcataaagacatacataaatcaacagagaagtaaactctaggaaagaccttggcttttgatctatgtacctgatcactactcttagagtgagaattaaactattttcagagaacagttattggctgatttttattacactttggatgatgttaataccagaagtgtcagtataagagctaggcttacacagcaaaggcttcggaaaaccatttcccccccatcctcaagttatgaggcagattaggagctagaaggataatgggcagtgttcatagcaatgggaatttagcaattttatcggcaaattaagaggaggagagatggtgagtattaaatgtggccatttcaaaatccttgggatactgtgttaaccctcaagagaagcagcagataaggaaccagaaatacatttggcaccgagaggctggggacacatagccaacaaaacaggtgaagttggaagagacatgatgaagtagtgaagtaaatttattgtatatcagttgatgatatgtgctaagaaaaagaaataattagtgggatagagagtgatggtgtgaaagtgccattttttacataatgctcagggaagtgctaaagataatatttgactaaaggcttgattgaaaagaggtcaagctagctttggagtttctagtaggcagtttgagatgtacaatgattggtaaggggtgggatgtgagctggagtccagattcaggacttgttggcacatagcgggtattgaaaaccatggggcaagatgaggtcatctagtcaatgtttaatggccatgaaaagagcaaggcccccaagagatgtgggatatctcaaaggaagtgtaccaaagctgactgggatggatggtctaagcagggaggtggataacccaggtggggtgatatggtttggctgtgtccccacccaaatctcatcttgagttataactcccacaattcccacatgtcgtgggaggaactggtgggaggtaattgaatcatgggggtgggtctttcctgtgctgatcttgtgatggtgaataagtctcatgagatctgatggttttataaaggggagtttctctgcacaagctctctcttttgcctgctgccatgtcagaagtccctttgcccttccttcatcttctgccatgtttgtgagacctgcccaaccatgtggaactgtgagtcaattaaacctctttttcttcccagtctcaggtatgtctttagtttccacagtgtgaaaacagactaatacatgggttgtcatggaatgcaaaataaaagtctttcaagaaagggggtgggtgttagtatgtcttttgctgctatgaagtcaagtaaagaaaggattgtgaagttgctattatggtagatcctcttcaaagatggccccaccaattccttcttctccgtatgatacacatgcctatggggtgatagctgaagctggatctagaggaaaaaggaatttttttctttttaaagataggaaattctagagcatatttgaaacaagacagaaggagaaatagatgatataggttgtaaatggaattccgaagtgaaaaagcataaggcctttgataggacatttcattgctagcagtagaatggggtgcacagtatgggaaaagaagcaagtggattgttctttggtggatggaagatgaagggcctcctagtgatagttcctagcttcttcgaaaggcaatgctaacatctgatggggccaggggtgtgtatttttatgagaggtttgagccaagaggaacaaacaaaagggagaaaaaaaaaccctctgcccctcctattttgttttcactatatgagctgcccaggttcataaactattagtgactatttttatattaagcacaaaatattagaatttaagtcagaattgaattttttcttacaatttcactaaactacgttttaaagtttacttctctgtttgtaagacccatttatcttcaaattttatgttcaatataaacatgtaaatgtaatttattaagaaattattaaatggaaatacttatcatttatgtttagtaattagaatctgtctttaccactcttttttaggaagaaaagtgaaaaccatcttgataggttttagaatgagattttcatgagagccaatgcaatgtccatgcttgtttatgacatatttgaagtgcttaaaggaaatatccatggattatcaggattttaaaaagtcatttgtgttgtcaaactctctaatgcacaatattggagtgccaccacaaagtcagctaaaatatgctaaaggtaattaaatatgtcttagagttgttttttctcttttggggggtttgagttttagagctttgtttgattgtttgtaagggttagtcagagaataaaagtgtcatgctaagtaaggaaatgttcatgaaatagtgcactcatccttacaacttttttttttttttttgctacagataagcctgttgttagtgataaggaatttaacatgctttatcttagaaaaagaaaaaatagaacaaatgtatcttagatttcaatgagttaatttatagcaagggagacttttctgtttgtaatgacacaggatggtcaccaaataattgacccaatggagggctggggctctgtctgagcctagagcctggtcccagtggcatcctgttgttgtttttcttcattcagggatatccacatggaggaggtttgaggaaatcagattggacacaagttctgaacagtttttactgctagaagctgtaaatattctaagacttgttttgcttttcctggagttaatatttcttgggcaatgggatagcatcctagttttgatctgtatgggatgttgcataagctacttggtaaaatgagggggcagaagtagtctccagtgtctcttccagttctgtgtttctgattccatataaattaaatttcacacaacactgaactgtaagaagtaacttgcaacatgattctgcatttgccaatctgacttttaaaaagtcacactaatatattaaaacccaaaatgtgttaagtgaataaagtatttgaaatttaaaaagtgatacctggaatgaaaggaaaggatgccttgaccagttttactacggtagccccactgttccaacgtttgagggtatgaaagagtataaaatgatgtctcattaacacctcctcacactattttgaattaatcaaaataaacatagagcccattttctgacagcctgtgagcccaaacgtggcatcctatagttgttctttgagagaagtcaaggactcaaaggcccagctctcaccagactgttcagaatgtaaattttaccaactccaaaacctgaggaagacactgataattatatttctttccccttctcaatattactattagaaggatttcctagtatgttacttaattgtgccccagttttctcacctgaaaagtcagaataatggtacctacttcatagggctattttgaggattaagtgaataattttatacaataggtaaagttttttagtattaatataatttgttattgtcccatctccaatactatttccttcctctttaaagttatatgcatcattgcaccattcttgtgtgggtttttgtgctaccataacaaaattatgtacatgctttaaaaatttgtatagctgctaattcttttttcttttctttttttttttttttatgatacgaagtcttgttctgtcaccaggctggagcgcagtggcacgatcttggctcactgcaacctctgcctcctgggttcaagcgattctcctgcctcagcctcccgagtagctgggactacaggcgtgcaccaccacacccagctaatttttgtatttttagtagagacggggtttcaccatgttggccaggatggtcttgatctcttgacctcgtgatccacctgcctcaacctcccaaagagctgggattacaggcgtgagccaccatgcccagcctctatagttgctattatacatattcttctataatgtgttttcagtctgcaaaatgtttttgatatttgtttgatatatgtttatctagcttactgatttttactgatatataacttggagtttacttactcattgcaatattaatgacatttagacacttcattttttaaaaacagagacaaagtctcactctgttgcccaagctggagtgcaatggtgcaatctcagctcactgcaacctctgcctcctgggttcaagcgattctcctgtctcagcctcccgagtaggtgggactacaggcacacaccaccatgcctggctaatttttatatttttagtagagacagggtttcactacattggccaggctggtcttgaactcctaaccttgtgatcctcctgcctccacctcccaaagtgctgggattacaccgcacctggccattttattattcttttcaataccaatgtttatcctatacatattttacctggctccgtaaggtgttatctagaagtggatttgctgggtcatacaaactgtgcattttcagccataatagggattgccacattgctatccaaagtagtcaaagttacagtttcaacaacagtgcatgtataagtgttctgtcctctctgtctccttgtcaacatttacaattgtgtctttgccaatttgacaggtgtgaaaagacatactatagttttagtttacattttcctgatgaacaaataaggtgagcaactttttatatttattggctcttcagatttcttctcctgagtcttgtctgtttgtatgctttgctattttctatcaagttgtttgtcttttccttttgatttgtagaacttcatagactcatgaatgtacagttgattctcattctcagtagttacattctataaagtcacagggaacactgaattagtgaatactgaaccgttgctcccaggggaaatacagggctaggttccagggagccttccttcactacattttcttcacctgatccatacataaacttgttttatgtatgtttctgcttaaagacacatgtttaatatatattgttgattcattaacattgagttcatggccaatagcactgtaactcctacctgaaggaagcttatgtaacacaagtattttctttttttttaattttaattttaattttaagttccgggtacatgtgcaggatgtgcaggtttgttacataggtaagcgacatatgtattttctctacaaggcaatcacaacctcttgtgcttaggaacattagacagcacttcagtgatatgctttggggccattttaaatagggaagtcactaccaaaaagcacaaaaatgcaaaaatgtggcactaaatacaccttgaataggacatttgtttacagtatgagagctgaaacaagaaggcagaatgctgccttgtttggcttcagctgggaatgtgcgtttcaggtagctcaaatttttcactgctctgtgcatggctgtgaatgactgtgaaagtaccatcagtattgattttgaagttacaaataaattttagcgagtaggtgaattcacatataaggaatctacaaatagtgaggactgactttaatttgttcattgtacacaattcaaatatttttctccactctgtttttaaacaatgtttatgtgtcttttgtcatacagaacattttatttaaactttttcaattttactaagctttccttatatggtttacgggttccattttgttttaggcatctttccctatcctgatatcagataaatattcttacatgttatcgtataaacgttttatagttttgcctttcccgtgtagattttttgttttttttttttgagacaggttcttacttccatcacccatgttggagtgcagtggcatgatcatggctcattgtagcctcaacttcctgggctcaggtgaacttcccacctcagcctcctgagtaggggggactacaggtatgcactaccatgcccagctaattttttgtgtgttttcagtagagacggggttttcccatgttgcctaggctggtctcaaactcctgggctcaagcaatccgcccgccttggcctctcaaagtgctgggattacaggtgtgagccagcatgcccagcctcccatgtagattgttaatctattacgattattttttgagtaaaagatgtgataggaattgaataaaaattctccaaacttattaactagagcttttgctttgattcatagtatagcttctgttatatatcaagttcccatatataatggtctgtttctaggctattcttttccaagtttgtgtattctttaagaaagtccatactttaacaaactattatagctttatgctaagtctttctatttggaaaggaatactccttctcccttcttccaccttattcttcttcaaaattgtatcttactttccccaaatgagttacaagacttgtcaacttctttgaaaaatgtggttagttgcatgattagaatagcactcgatttacaggtcttttgggggaaaattatcattgttatatgacattgggtttttccatttataaatcatagtatttttctcctttatccttttaaaaagtagttataatttttctcaatgcagatcttgtatatcccttgttctatttattcctaggtaccttgtagtttggttgcactttgaatgagattttaaaaaggcatcattcctaacagatttttgcaggtgtgtagtaaaccattaacttttatctagcaatcttgctaaagaacttattagttttaatgatttgtctatagatactcttggatttttaatgtaggtaattatatcatctatgaaaacatataattttgtctgttcttcaaagtattatttctttttcttgtgcagttgtgttggccagtgtttttgtcttgatgcagctgtgtacttgcaacaaatcagctctgtgttttcaaatgaccagttggaatcaggtgttttctctgtttatagtctgcagtagcctgactgttacagaactctggaagatggcctaggtcctgggcacattatttaactacctatgacttagtatcctaatttataaaatagagataataatagaaccttcttgatcagggctgttttgatgactgaattaatatttataaaagccttaaaactgtgtctgacatgtataaagagctcaacagatcctatcaatcactactactactgctagtactgctacataagaatgacattggctttgggaggccgaggcgggtggatcataaggtcaggagaccaagaccatcctggccaacatggtgaaacccccgtctctactgaaatacagaaaattagttgggtgcggtggcacatgcctgtaatcccagctacatgggaggctgaggcagggtaatcacttgaacccagaaggcagaggttgcagtgagccaagattgcaccactttactccagcctggtgacagagcaagactccatctcacacacacacacacacacacaaaaaaaaaaaaaaaagaatgacattggctaacaagcacgtagtaggtatacacatttatggggtacatgtattttgatagaggcaggcaatgcatagtaatcacaacatagaaaatggggtatccatcccctcaagcatttatcctttgtgttacaatctattatactcttttagttatttaaaatgtgcaattaaattattttttactatagtcaccctgttgtgctagtaaatactaggcctttctcatactttttaactatttttttgtacccatctatccacttttgatattaagattttgcaaccttcataaaatgagttctttagttttcattctctttctattcttttaagtgtgttaatgtaaaaataggaataatctgttttttaaaattttggcaaaactcacatttgtaaccggttaagcctggagattttctgacattgatggctgatttaattatttaatgcttgatgtccattcatattttaaaatgtcttttggagttaattttggtaattcccattttctagttgtcaaatttattggcataaaattgttcatagtatcttttttgatgtcttaaagctttactatacctgttatgaccaattctctcatagaaagagtaaaatctgttctgttagtttatttctttttatttatttatttttgagacggagtctctctctgtcaccaggctggagtgcagtggcacaatcccggctcactgcaacctctgactccctggttcaagtgattctcttgcctcagcctcccaagtacctaggattacaggcatacgccaccacgtccagctaatttttgtatttttagtagagccggggtttcaccatgttggccaggatggtctcgatctcctgacctcgtgattcgcccacctcggcctcccaaaatgctaggaatgcaggcgtgagccacagcgcccggccctgctagtttatttcaaagatttagcttttgctttcatttctctaatttcttcttaatttcatcatttttcattattgccttttactttctttgggttaactgtgctgtattactaaatcctagagtcatatgcttagctcattaatttccatttcttcctaatgcatacacttaagcatatacattccctttaaatactgattttgtggcatcccatggagtactacatgtttggtttaaagagtcaccaaggattataataaaagagtcacttcccttcttaacatccttaccctaatcttactccacagagacgactatttttaaaacatttttagctatttcttttggagcctattgctttatttctaattaacatgatataatttcatttctatttatttatttctccaccacatgagctattttcatttcttgatattggagtttaaatatgatctactgacttcctactacggaagatgggatttgtccccacagctttccccttcctccatctgttaatagagccttgtctccattttgcagtaaatcaatattcagagtttgcattattatatagatatataggtataattcacagaagagctatgtagtatgctgtgattacatttcctgttttgccacctttttcctttcaaaagttaataatgggcttttattttttttttagttttccattttcttatcactctttcatccctaaggccgcctctataattcaaatcttctcccactgtggtcatacacattttgtattcgattgcttgtaactctttcccagaggtaaccctcctagcatcctctgtccgatccttccaaatcctttcaatctggacttgtgctttacgcctgctgtgcagctcccgtcttgggatttcccttcactgtcatgctggggagtccatctgcctttttttttgttgttgttgttgagagggagtctcactctgttgcccaggctggagctcactgcaacctccacctcctgggttcaaacgattctcctgcctcagcctcccaagtagctgggactacaggtgcctgccaccacgcccggctaatttttgtatttttagtagagatggggtttcaccatgttggccaggctggtctcgaaatcctgaccttgtgacccacccgtcttggcctcccaaagtgctgggattacaggtgtgagccactgcgcccagcccatctgcctttcttcagggttcatgtcactgattttttggtgcctgcacctcccccgttgttaatgctgttattttggtggagcacattctgcagtagctttctgagaatgggtgcataatattttggatcactttatgtaattcttaaacatttctgaaatattttggcatttttactcatctgtattattctggagatttgtcataatgtgctttggtgtgggtccttttcctttattgtcctgggaacttcgtaagtccttccaatttggaaactcatattgttacagagtagggaaatttctataattctatgataatactctcacttttctttctcctttaggtgtttatggaaaaactaggatgagatgttggatctcctgaatttatcctctgcatctcttcgcctttctctcttattttccatcatctctgtgtgtgtttatgtatctttcatctttaagtctaaatataatttttcttatgatttcttctttgatccatgagttatttagaagaatcttttatcatttctaaagtatatgtgtgcatgtttgggtaagttattggaaatctttctatcattgatttttaattttattgcattttgatcagataatgtggtcaatatataattttaaaaatacttgttgaattttcttttgacttaattttcctttttttgggggggttgggggagggagatgaagcctcactctgttgtacaggctagagtgcaattgcatgatctcagctcactgcaatctctgcctcctgggttcaagtgattctctcgcctcagcctcctgggtagctggggctacaggagcacaccaccatacgtggctaatttttaaatttttctgtagagacaggggtcttactgggtttcccagtctggtctcaaactcctgaactcaagtgatcctcccaactcagcctcccaaagtgttgggattacaagtgtgagccaccatgtccaaccactgatccgtctgtatagttttgcctcttccagaacatgatgtaaatggagtcacatgatatgacatctcctgggtctggcttctttcacttagaaaaaagcactttagatgagacacatggacatgtagaggggaacacacagtggggcctattggagggtgaagggtgagaggagggacaggatgaggaaaaataactaggattaatacctgggtgatgaaataatctgtgcaacagacccaagtttgcctatataacaaatctgcatatgtacccctgaacttaaaataaaagttaaaaaaagaaaaatgcatttaagatttacccatgttgttgcatgaatcaatactgttttcctttttattgctgagtagcattctattgtgtggacatgccacagattgttgatccagtcaccttttgaagcatatctaggttgtttccagtttggggatattatgaataaagttgttataaacttttgcgtagaagtttttaggcaaacatatgtttgcatttcacttgggtaaatacctaaaaattgtatttctgggtcatatggcaagtgtatgtttaattttataagcgactgttaaattgttttccaaaatggccatacgatctgcattcccacccgcaaaaagcaggggttcccatcgctctgtattctccccagtcttggcattgttagttttttaaaaaaattttagccattctagatatgtggtggtaactctttgtggttgtattttacttttcttagtgactactgatgttggatttttttttctaaaatttgttatctgtttatctttggagaagtatgttttcatttaaaaagtgtggattatttctaattgctgagctttaagagttctttatatatatattatcatcagatgaagcttcttaatgggaaaaatcctccacactttactaatttgtttccatcttgatcttatcattttgatctatatgtgtgtgtgtgtgtgtgtgtgtatgtgtgtgtgtatatatatataatatatattctaactttaattttaagttctggtgtacatgtgcaggtttgttacacaggtaaatgtgtgccatggtggtttgctgcacctatcaacatatcacttaagtattaagccatttatgcctagtgttccattattggaacacaagcttgttggagttgtttatatcctactgctcatggtcatcaccgaggtctgatttttcacacaaaaaatctgcaacctctggcataaatgggttaagccctgaatgcattagctgtttttcctaatgctcttcctcccccgaccccactccctgacaggctccagtgtgtgttgttcccttctctgtgcccatgtgttctcattgttcagctcccacttacaagtgataagatacggcatttagttttttgttccttaattactttgctaaggatcatggcttccagctccacccatgtccctgcaaaggacataatcttgttcctttttatggctgcatagtatttcatggtgtatacacaccacattttctttatccagtctatcattgataggcattttggttgattccatgtctttgctattgtgaatagtgctgcaatgaacatacacattcgtgtatctttgtaacataatgatctgtaatcttttgggtatatacccagtaatgggattgctgggtcaaatgttatttctggttctagatctttgaggattgccacaccgtcttcctcaatggttgaactaatttacattcccaccaacagcgtaaaagcattcccatttctccacaacctcaacagcatctgctgtttcttgactttttaacaactgccattctaactggcgtaagaagctatctctttgtgtttttggtttgcatttttctaatgatcagcaacgttgagctttttttcatatgtttattgtctgcatgaatgtttgttcatgtcctttgcccactttttaatgaggttgtttttttcttataaatttatttaagttccttgtagattctggatattagacctttgtcagatggatagattgcaaaatttttctcccactctgtaggttgcctgtttgctctgaggatagtttctttatgtattttaacacaagtcttgtatcagatatgggatttataaatatctttctccaagtctgtagcttatcttttcattctcttaacactgtgtttgacagagcaatgttttcagtttttaaaaagtccattttataaacttttcttttgtgggtcaagcttttagtttcacatctaaaaacttgttaccaaacccaaggtaacacagatttttctcctacatctcttctagaagttttaaggttttaaattttgaattaggttaatgatctattttgagttaatttttgtataaggcatgagtttttttacacatggctgaccaactgttctagcaacatttgttgaaaagataaaactttcttcattgacttgagtttgtacctttgccaaaaatcaattgactatatttgtgtctatttccaagatttttattctgtttcattttcatatgtatctatcctttagccaatatcatatggttagataactgtagctttataatgaattttgaaatcaggtagagtccttcaactttgttctttttccaaagaactttgttttggcttttctagttcctttgcttttccatatacgttttagaattagtttgtctatatttacaaagaagcttgctggaattttgattttgatgtactgaatctgtacatcaactggataaaatagataccttaacaatattgagtctttcagtccataaatatagcatatctctctgtttacttaaatcttctttaattctttcattagtgttttatacttttctgtatacagaccctgtacatattttgttagatttaagtatttgcatatttaaggacatatttaagtgtttcaattttggtgctattacacttggttgtactgtttttcgcattttaaatttcagttggtcattgctgtatgtaggaagacaattggctcttctatattggccacgtatcctgtgaccttgttaaactcactttttagttctgagagatgtttttgtagattcttgggattgtctttttaaacaatcatgtcaattgagaataggggcaattttatttcttccctttctctttgtgtgacttttatttctttttctttacttactgaaaaggacaggaattccagtatggtatcaaacaaatgtggtgagagaagatagcctgtccttgttctcatcttatggagaaagcattccattttctaccactgaggttagttgcaggttttatagttttatgtatatatgtatatagtatgtagtgtctttcataagattaaggacattcctttctaattctagtttgctgagactttttactatgaagtaatgctaaattttgtcaaatgctggctttagaatcaattgagatgattgtaagggttttcttccttagtttcttaatatcatgaattatattacttgattttcaaatattgaagcagcctcacattcctgggataaattctgctagattaggatgtgtaatcctttttctattaatatattgctgggctcaatctgttgaagaaatttatatctaaggtttgatataataatggtttgcaattttcttttactgtcttttgtttcaaattagattagttctggcctcacaaaatgacttggaatgttttcccttcttttatttgctggagaagactgatagatttgttcttatttcttccctaaatattggtagatttcaccaaggaaatcatctatgcctggagtttcctgtgtgggaaggttttcagttacaattcaatttctttaatagacatagtgttattcaagttctctatttcttctcagtgagttttggtggtttatgtcctttagaaaattggcctatttcatctaagatgttgaatttatggagggtatacagctgttaattgtattctcttattattcctttgatgtcagtgaggcaaaaaatgaagttctactcttttattcttggtattgttatttatatctgctctcttttcttcttagactcactagaggcttatcaattttattgagaatcagcttttggtttcattggttttctctattgttttcctgttttcaatttcattgatttctgttctcatccttattatttcatttctctgcttgctttgggtttaacttactattctttttctaattccttaagataaaaacttagggtactgactttagatctttgttctttcctaacataaacattcattgctgtaaattctctttgagcactatttcagctgcactcgcaaattttgtttttatttgcattcagttcaaagtactttccaattttgcttgggatttcctcttagacctagtattatttaaaagtatgttgtttaatttccatatattttgaggttcccctaatttctttctgttattgatttttagtttaattctgttatggtctgagaacatactttacatgatttctattctttaacatttatcagggtttcttttatggctcagaatatggtccatctcagtgactgttccatgtgctgctgctgtgaagaacatgtactctgctgctgatgttgttgttgggttgcatgtttcctaaatgtcattaggttgggtgggttgataggtttgttcaggttacctatacacttaataattttctttctatttgttttaccaattactaagacagaagtcttgacttgtccaagtataattgtggatttgtttattctgcttttaaatatatcaagttttacctcttttattttgaagctctgttgttaattctaccttcaaatatatcaacttttgtctattttattttgaaggtctgttgttgttaatatgttgtaaacatatttaggattgtttttcttctgggaaaacttgcttggaaaattgatagctttatcattagttactttcctgcttatttttgataatatttcttgtgctgtagtgtaatttgcctgaaattagtatagttactccagctttcttttggttagtgtttgcatgatatatatttctccatattttttacttctatctatgtcttcattttaaagttggtttcttgtagacaacatatggttgggtcttgatttttttcttctggcccagtatgacaaatccttttctttaaactggcttatttagattagtcatgtttagagtgattgttaataaggttagaataaaatttactatttaccatcttgctatctgttttatttgttccatttattctgtattttttcctttttaaatgctttctctgtgtttattggaaaatcttttattattccattttacctttatttgatgttatttatacctcttaattttttttctaagttgtggccctagggcccacatgtaatttttaagtaatcatttgcatttaaaaacaatctgagtcttctctcaatagtacaccattgacatattgtgtaaggaacttattatagcatatccttaattcctctctaccattctttgtgctattgctgtcatctattttacttttacatagctatgaatagagactatattgttactattttctttaaacataaaaagtaactacagtaagaaaataataaattcgatcttaattctatattttctatgtatatgctcttcatttatttgtgtagattcaagtttctgacctctattatattcccacagtgaagatcttctcagcctttgttgtagagttgaactgctgcaatcctcctctgtctgcagccccagggacttccaactctggttttatctccacactgggccttcagcaattcatcaaaaatttctagctgaatcttcttattggcttatatggcacctgatggcatctacatctgttccaggtaagcaagaatttgggtcctgtttctccccacagacaaatcttctctgaagatttctggttatttgtttgctcttgtgacctcagctctccaatggaaaagtcattcatatggctattattaaaaagtaaaaaaataacagatgctggtgaggttgtggagaaaacggaatgcttatatacggttggtaggagtgtaaattagtttaaccactgtggaaagcagtgtaccaattactcaaagacataaagacagaaataccatttgacccaacaatcccataactgggtatatacctaaagtaatataaataattctattataaagacacatgcacgtgtatgttcactgaagcaccattcacaatagcaaagacataaaatcaacctaaatgcccattgatgatagactggataaagaaaatgtggtacatatacaccatggaatactatgtagccataaaaaggaatgagatcatgtcctttgcaggaacatgaatggagctagagaccattatccttagcaaactaatgcaggaacagaaaaccaaatgccacatgttctcacttacaagtgggagctaaatgaagaacacatggacacagggagaggaacagcacacagtgtggcctatcagagggtggagggtgagaggagagagaggatgaggaaaaataactaatgggtactaggattagtacctgggtgatgaaataatctgtacaacaaacccccatgacacatatttacctatgtaacaaacctgcacatatacccctgaacttaaaagttaaaaataaagaataaataataaaataaaataaattattcatttgttattgtccagcatttttcttgttgtaagggtgtgtgtgacactctttccagccctctatacctccacaatgaatctggaaatccaatgaatccggttttggttttattttgttttgttttgagacagagtcttgctctgtcacccaggatggagtgcagtggcttgatcttgggtcattgcaacgtccgccccctgggttcaaattctcctgcctcagcctcccgagtagctgggattacagacaactgccactgcgcctgtctaatttttgtatttttagtagagacggggtttcatcgtgttagccaggatagtcttgatttcctgacctcgtgatctgcctgcctcagcctcccaaagttttgggattacaggcgtgagtcaccgcgcctggccaaatcttttttttaatttctgtgtttcacgtttttcttccccaaatatcctcaagctttaaaatactgtcttgtattttattattgtttatattttttcttttacctgtaaaataagcttaaactatctttttaatggtggctttcagatttttctatttcctctcatttctttttttcttttcttttttttttttgatggagtctccctgtctcacataggctggaatgcagtggcgtgatctgggctctgtgtaacctccccttcccaggttcaaatgattctcctgcctcagcctcccaaatagctgggattacagctgcccgccatcacacctggctaatttttgtatttttagtagagatggggtttcaccatgttggccaggctggtcttaaactcctgacctcaagtgatccgcccgcctcggcctcccaaagtgctgggattacaggcgtgagccaccgctcccagcctcctctcactcttgagcactaattcttttttatttatttatttatttatttatttatttatttatttatttatttttttgagacggagtctcgctctgtcacccaggctggagtgcagtggcaggatctccgctcactgtaagctccgcctcccgggttcacgccattctcctgcctcagtctcccgagtagctgggactacaggcgcccgccaccaagcccggctaattttttttgtatttttagtagagacagggtttcaccatgttcgccaggatggtctcgatctcctgacctcgtgatccccccgcctcggcctcccaaagtgctgggattacaggcgtgagccaccgcgcctggcctcttgagcactaattctacctgtgttaattcttgcccatctctgtgtcacgatggttcctcatgcagttttgatggtgcttgcatgtgtagttttgactatgtaattttgaattctgatttattgtcagtaagagctatgccttctatggtgatctatacatcctgggttgtgcactaagggaagttttttgtttgcttctgccagggtttcaggattctactgccctggctcaatctttctgtttaattctcaggtacctgtaggcattataactcacatctctacatggtgtattctgaggttttgatttcttgcaagtaattatttttctttttaatacaaagcacctgtagactagaagtttacgtttcagtttggctagcccttaacacattcggacagtgactcggttccaattcccttcttccttcatctcctgtcctcccctgggcattaaaaccccagttttcaggccaagtctgaaatccctgttgatcacatggcaacagctcctgcacattgttgtgagtctcattgctggaacctagggatttccattggtcaagcacaatgtcaacaaaacgtgacctacaattctacttgcttgtttctgggtgggggagtccctccccatcccctgatccactccctctgatgcctggatcagctgggagaggactgagcacaagttttatgtgatgcgaattctgttcatgaccaaaatgcaaagtgtctccctctgtttctttaaaagagagagattcaggtcaaggccaattcaaactccaccctccttagtaacttgaattaaaaatacagaatttagtgatatttttcttatcttctttcccactttatgagttgtaaatacaatggttattgtctacatgacagcaagaaggcaaggtattttgatatatatccagggagtttatattatagccttagtttatttgaatgtgacgtttaagtataggggattaaatttcttggtatttcgctaattactaacatactgactatacttttttttttttaactttaattattttcctccagtaaagagtagacctcctattggaggaagcagcctgtctttcacccataaactgttgtttgccacccttaattctgtattactctggccctcaaagcagtctcaccccgagatgagcctggacatgagtgtcatagccagcgatgtaacaagtagagaggctgtgtatgaagacactccatcttatctgccaatgtttttctgatctgtacaattaaggtgctctattaaatcagctctaaggttgtttcaaggttaagaaaaaattaaaatcataaatcaaaatttcagaggcattggaggattgagatgctacaattttggagtttataaattgatagtaaagagaattgacagaaaatgacctctgtcctgagaggaagcaaccccagggaagtcttgccagacctcacctccacctgctcttctttcagagactgcacaagaagggtgttaaggacacttatttccaaatctgtctccctccccacagcacactgctgggcaggattcaggcctcactgttttcttgattcttagaacctgtcactgatgcatgtgtgttgaccaaataaataacgctactgtttttcttacacttgccctttctgatcatgagttctaagttagtatcctgagtgactactgcttcccacttgccttattttcatcatctttcaactttctcctttcccttcctcaacaccaacaagccctacatctgcacgcctgattcctgcactgcaactcagagttttaagtcatgactatttaaactcacattgaaaacttgtgcctggttgtgtgctagaaatgtctccttggctctagctgtcttgcatcccagaaggaataaaaatctacatagctgcagaaggcaacatagccccacctgaaggaggtgagatcccggtgtgggagaagcaggcctgagtgacaggacatcggtatcggtcctttaagatgatgaggaagctgccttgccggcccagcattgcctccattttagctgcccatttaaagtgaaggaattcttaaagataatttccagattattactggaagaatagggaatttttatttcaaatttagaatgatgaatggtggagaaaatcttttaaaaattctctttacccatgtagctcatttaaaaaatgttttttttctggaccattaatgaagcaggtgtagtgttttatttattcgcagtgatgaacaaagtgaataaagccagtctgattttacctggaaacattatggaaaaaaaaaaagactcgccttccagatcaaggtagctctgccaatgctccctcagtgcctctgcatgagtgcggtcctcccagagctcgcctcttccctctgcagtcccgagctgcactgatgctcatgcgccacaagatggagccttcaaagcgggtcatttcctagtgcttcctctccatttccccctgtgaaaagtcaatgtctgggtttgtgagggtttaggaaagagaggcaaacacaataaggacgaggtgagcagccactgaggggagccacaggattgtcctaaaggaagcagacctgatcttggctttctcttgatgaacactgctatcagcgtctccatgaaggcacagaagacacgctcagcaggtgtgcaggtgacataaagccagaagggatagttggtgcatttggatgatatcgtaaagattctaaaaactttcagcaggatgaaactgaccaggtgaaagtgagcgggagcacatgcataggtgtgtcttcgatggagtagtaaaaacagatttggatggtgaaagaggagacctgaatctgtcccaaaccatactaacaataatcatggtgcctgtgatggttattacaatgtcatctcacacagcgctccgcagagtatggttcatggacagtgagctggcaaactgcttgttgcttggcctcaacaagatatggagctctggttagagtttcaatggacattatgacaaacttcatcacattttttagtacagccgaataagcaaaactttcccgaaggaagcagggcatcaatctaccttctggcttgaattcctcaacttgcagaggatctgccctgagaatggtgctaaaatttgaaggctcccctgtgtccgtactaagtacttagtactgattgtgttaagtacttcaaatgcatctttgtatttgtagagacatgatgtactttgagctggtgtagtggaatggttaagtacatacatctggaccagactgcctcggttccttcatttgatggataacaatacacagggttgttgtagtgaaggtcagaagtatagtgcgtttgaagacaccatgtttcttggcacatcgcatgtgctcagtaaaaggaagtgagtaataacgtgtttctcctcaataactctttgaggaaagtgccgttgatacctgattttattgatgaggaactgatctgagtttcaatgaagcaaaataaattgctgcggtcacgcagttcttaaaggcgagatccaagaccataaaccagggattttctgactctaaatttcaaacaaatgcttatccattatagaacactgccatttcctgattgaactggatcagtggcatttaagttttttgaccaaaactcaattatggttataatctatacacacacatacttgtgtatctaaatctgaaacataagttttattgataatacttgtctttcatatgtgcaatgtactctgatactttctactgcatcttattcagtttttaaagaaagctgggggtgaccgtcttagtccgttcaggctgctataataaacataccatagactggggtggcttaaacaacaaacatttatttctcacagctccagaggttgggaaatccaagatcaaggcaccagaagatacagtgtctagtgagggtctgcttcctggttgaaatatagcactttctcactgagtcctcccatggtggaagaggcaagggagctctctggggtctctttcatatgggcactaacaccattcatgagggttctaccctcatgacccaatcacctcccaaagaccccatgtcttaatgccatcatgtcgggggattacgacctcagtatgtgaatttggaagttgggggacacaagcatttggctcataacagtgacctacttaaattgatttcatggcccatgaatgagctatataacccatgacttgaaaatatgtaccagcaatttctacggactctttcattctaatgttctctgactctcctaaaaaacaaaaatacaaaaaaaactttcaaacccaattcccttcgtccagaacagaagactctgacttgggagcagtgcatgtgaaaaagaagtaagtattttatcgcaggtcgatatgtgaaaaccctgcaatgtggggacaaaaaactcacctgtaaggctccatcagggatcctgcatttcctcctgggaatcatattttaagagaaattaacaacctagactgtgttcagagaaggacagtgaaggtggggaagtttctgaaattatttaggaaactgagaatgtttaatatgactttaaggaagaagtgtctctaaatagtttatatgtatatgtatatgtgtatacatatgtatatatgtgtgcttgtatgtatatattatgataataggtctctgagttagtagaataatttttcagcattaaataggtcttggtccatctgacatggtattttgtgtaaaacttatgtttctcgtgtttttagattttgatgtctacagtgagaatcctgtaaaatgattatgactgcacctccctcctgtgagaggctgtgaaatgcaggcaggaaacagcccctcccaggttaagcggaggagctctgaagcttggcgttggcaagatttttgcccagcttcaaagggatttgaagggtggtgacaggctccagcccagactgcgcctcggaatgcagacgcttctctgcctagaacctggcccggccctatgggaaagccccggttctcggcggcactgaactggtaaaaagcagttgctgtgggttccctccctttctccccgactccctggccatgggattcaggaaaacaggcagtgaaaggcttcaacagttcctttccagttttccacgggggccccaaggaacgcctgcggctggaattccccgggagacagggagctgtaacaatagaggtctgcactgtggttgccgagggagggagggcttcttgttggagtgggtctccgcagatttgttggtggcttattaaattcaggaaggaaaggggagagagaagttgaatgtgactcaaagcttacttggttgggaaacctgggagcaaaacggggccaccaaaacaaagtggaaaaattgcagttgcataagttgtagggagaaaggataaatacttttgatagtactatgtttgtggctttgagttggggctgtgtctgggaaggttcgaaatgaagctggagtagttaaaatatattaatcttgtccgggcacggtggctcacgcctgtaatcccagcactttgggaggccgaggcgggcggatcacgaggtcaggagatcgagaccatcctggcgaacatggtgaaacctcgtctctactaaaaatacaaaaaagttagccgggcgtggtggcggtcacctgtagtcccagctactcgggaggctgaggcaggagaatggcgtgaacccgggaggctgagcttgaagtgagccgagatcgcgccactggactccagcctgggcgacagagcgagactccgtctcaaaaaaaaaaattatatatatatatatatatttatatatattatttttatatatatttatatatatatttatatatatatttatatatattaatatatatatttatatatattaatatatatatttatatatatttatatatttatatatattatatatatatttatatatataaatatatattaatatataaaaatatatatatatatatataaatcttgctgctcaaccttctgctacccaatgttaaatccagacacttgggtaacctttgatcatatttgagactgaagtggctttagagatactgaaacttcactgtagtcccggctagcatattcattcattcgctagctgttggcacctcatactgaggttaactcttagaacagaattatcatatttatttttggtagttatttcaagttctttcagtaggcttaaacaggttagtgagttttgcttttttaagcgcctaacacagtatctggcacatagcaggtacacacacacaaatatatacatacatatatatatatataattttttttgagatggagtctcactctgttgcccaggctagagggcagtggtgtgatcttggctcactgcaacctccatttcctaggtagcaattctcctgcctcagcctcccgagtagctggtgttacaggtgcgtgccactatgcccggctaatttttgtatatttttagtagagatggggtttcaccatgttggccaggctagtctcaagctcctgacctgaagggtacacaaaaatactgagtgaaagaaaatgctagatgcaggaaagcccatccaacccacccagctccttactttgcagataagttaaccgtagccaagggaggtgaaaagacttccagctggaatgggatcagactcagatttccagatggtcagccatatattttcccactgcaccatcctgccccctgctgcttgacttgtcaagaaacagtaggtgtttcaaaaggcaggggttcttcgagaacttcttgttctctatagttgacgttctaagatcagatttgaaggaaatttactttttgtgtgttccgcttcacaaagaagatattttctgcattgaggagaaagccaaacagattgcattctgctctaaacattaaaaccaagagatcacaatttgattgcctaaaaccaaatatcctgatttaaaaaaggattcaaacagacatttcttaaagaagacatacagatgggcaacaggtacattgtaagatgctcaacatcactgaccctcaaagaaatgcagatcgaaaccaaaatgagatgtcatttcacacatgctgggatggctgttttaaaaaaacagaagacagcaagtgttggtggagatgtggggaaactggaatccttgtatattgttggtgggaatgtgaaatggtgcagcagctatggaaaacagtgcagagattcctcaaagaattaaaaatacaaaacatctcgtgtatcctataaatatatacacctctgtacccacaaaaattaaaaattaaaaacagaactagcaagcctattacacagcatatacccaaaggaattgaaattagggtcttgaagaaatatctgtactctcatgttcatagcaacattattcacaatagccaggaagtgaaaacaacctaagtgtccataaatggacgaatggataaagaaaatgtgatctgtctatctgtctatctatctatctatctatctatctatctatctatctatctatctataaaatacatgactactattcagcctttaaaaagaaggaaatcatgctcttgcaataacatggatgaacctggagaacattacattaagcgaaataaaccagacacagagggaagaatactgcatgattccacttatgtgagggcttctaaagtagtcaaactcatagaagctgagagcagaatggtgattgccaggtgatgagaggaggggaaatggggagatgttgttcaaagtgtatcaagtttcaattatgcaacatgagtatgttctagagatctgctgtgtgacacagtggctatagttaacaatatggaattttgtactctaaaatttattaagaaggtagatctcatgttaagtgttcttaccatgaaaacaaacaaaacagcaaagacacacaggagactttgggaggtgttgggtatgtctattaccttgattgtggcaatagtttatgggtgtatgcatatgacatcatcaaattataaatatttacggttccttatacagcagatcctctaataatgttgtttcgttataatgttgatgaggaaaaaataatgtattctcagccagggccactgtctgtgtggaatctgcatgttccccccgtatctgtgggggttttctctgggtcctccggtttcctctcacaacccaaagctgtgcacattaggtgaacttgcatgtctacatggtcccagtgcatgagtgtgggtgtgtgagtgtgccctgccataggatggtatcctgtgcaagcgtgggtcctgccttgtgccctgagctgctggatatgctcagccacctgcgaccctgaactggtacaagcaggttggaaaatgaatgaatgaatgaatgaatgaatgaaggaaagttatgggttggaaaacgagtgaatgaataaaagttacaggttggaaaatgaatgaatgaatacaagttgattggaaaaaaaattcgtaagatctgtgataatcatacaaatgcacgacaataaacaaagaagtgttttgggagcctgttgtatttgtaatggttttcaaactgcgaggtgggaggaggtgctcctgacaattttcgctttgcaaacatttattccttgatttaacccactgccattacgaccactgtgacttgctgatttatcaaaaattggataaatatgttacttgtttttattaatctttctcaagtgtatatttcacatttatttcaatggctaatattaggagtgttgtagtgtttatttagaagtttggtgatgtttttatgaccaaatatatgctgtaggaacttgactcttgtttatatccatcaacttatgggaaaattggttttgttatacgttgctttgcttgaagttgcagtttccaagaaattatcaacaatattaagtgaggacttactatatatccattatgcctcaataaaactgtttttttgttttttttaatttgagacctttacccggggtcctggtgaccaaaattaaggccatgaggacattgagtgatttgatacatgtatcaccctcccaggcccctgtctccctgggcggcctgcactgcgcagtgcccagtgaccagctgtgcttggcctaaataagtgtttgtgtggttgttgaaataatgaataaaaagtagaaagaatacatgcttactgatggttgtcactgtacaaaagataactgacttgtgaattcttggaagtcattttttgttttgtttctttgtttcaggttcatattctaaagagagcaggcactgagcaaatgtttgttgaactgaaccaatctgctagttatggggacatgacctccacttcatggtgttgaactaaacaaacacatacttctccagacaaatattaaaactggtgaacttcaaaataacgtgaaaagctcctatgtttccatgcctcattatatgccacaaaaaatcaaatgataacgagaacaaagtaggttattttgtttgctatttaacttgtgtgcaggtcttcacagaatgagaggcataccaacactcatgaccccaggctagttctgttctttgccagtgtgtggtttgggagttctgtgaagtgtttgcagtcgctactaataatccaggtgacacggcaaacattgcagttcctaggtccagcacaattagaggagggttcactcgtaggcagcatctgagcaacaggctcaccagacttcagcctcttcactccgactcttccacgctccagctctcttcattaagatattctagaagcaactgaggagtttctacaaacattttggaaattacaggtaaaatatatgtgttttcttttctccttgcctgttttatagggaatgataacgaacatttaagtttttataattaggctttttaaaagggaggagatgtttaacttttatttaaatgtgaaaggttgcttaatggtatggaaaatatgccaaagatggtaaagcaagcagtggaaggcctgagctaaataactgtgtcttggttgctgtggggatggtgagtgaaccatttttcctgtgaggcatttttgcagatatttgtaaggtattgtagttttgagagggagtttggacagatatcctcacggcctgtacacgtgggccatgtatacgacttgtgatttgatctttaaggcctggggaaacccctggagggtgatgaacagaacaacagcatgatccgtcttaggttttccggaggagagtgggtcacgttcgggcaggactggctggaggcacaaagaccagttaggaggctatggagacagtatgataaaggatgactattagagactgagaaaggccacagcaaagaatgtaaaaagagtatggacaagatgagatggggtggggacatatttagggactcagtccccaactgggagaaggagaagtttaatatgactctgtggtttctaacttggatgatattaatttttcatattgttgagactgtaatttttcatgttgaattagtaactgttaagccacaaacatatttgcagccggcagaatgtagctcgagaggagaagcttcagggcatcatggcaggagcttgggctgtggaggctggggtgggtctgcgtttgaacccagctcctcctgggggagtgactgcagccaagtgcctcggaattcctcttgatgtgagggttgggacctccatcccccaggagttttggggatggggaagttgggtgagatattctaagtgaacgcactctgaatgtcagctatcacttttttctcagcaggtcaagtggaagtttgttttcatttcagttaaggtacgagttgttctgactgctgtgcagacattcacacgcccgctgctagaaagctggagctggaaggagcattggggcccgctgagtcctcctttctcatgtatggatgcggatgtggaggcaggccctaagtcttagtgtaggtgccgatggtgcaggtgagaagccccctggtaactcacttagtgctctatctgctcttccacactctccaacatgacgtcaccggtttataagtgagaagcaggtcacaggtccctaaggtttctgcgagggaggcaagcgttgcgcagtggttcagaacacctgctgcacgggttcatcccgtgcaccttctctcacctaagtttctgtttctatatctgtaggttgggaataatgctgtggctgtgtaaggccacaacacacagtgcttagcacattgtgagcactcaacgtagaaacagatcttatttgctctaggtctgacaggcctagagcttgtcatccaagcaggagacccacatggcctgcagcacatttagggccatctctatgtcaatagcatccaatggctttaggtggggcctggactggagcctccatgttgggggtgcaggcagggggcatgttctctcactcccctcggcattggagacaggtgccactttgcaggctcagggggtgtgacacaggatctggatgctagggagaccacagccgatggggaaagaccacacagtgtaaatgggtggaagtgggggatatactgggggggtggccactggatgagccaccctgggagattggttcctcagaagggtatctctcagtctgaccctatacactgaaaaagcaagtccatcaaaagcttctactattagagcttcttaactaaatccctagtaaacctctttacttcatttggtaaattcaaaattaatggcataatacttccacaaaaatataccatgaaatcattttccttcttctttttggccagagtttacacgttttaaattttaaactcagattccgagtaaacaaagtggttgtttaaattacttgtcatcgactccacagcaataggtgtttagtttctgtttatatttattttacttagtatcttagaaccatttaatagcaacataacagagcaaaaacagcacccttagaaacttgtatacacaatcaagacctgggcattaccatggttgaaggattccttcagtacaaggaaatactagagaagtttggcaggcatgacttaactggccaagtcatagagaaagtgaacatcacagatggtcagcttgtaaaaaagtgagatgtggcttttcagatgattaactggcagaaatgtgcaaacttttgccgttggattcttttacactaggttgactcacttaaagaagaatttgaatcattatctaacagaaaaagatcaataacaagcattattgctggaacattctatggatagactgctttctatacatgattggtgaatattgtatttcaattaattatatatcctgataatatatgaattaatactgtgatatcctgcatacaataacaataatcaatggaaatatagtaaaacagaaatgaaaataattttgcttttccttgagaaggtatttcaaatttttgtagtatttcagggacattaacataaatgccacttatcacaacaaagtaccttagctacagaaggtatatgaaattgactgtcaaatgaatggatggtcctcaaacttgtctagagaaatatgagatcctgacagttaaaattaagtaatttaaagtgaatcaacctttaaaaactcagcagctttgctattactcaaatgataaaaactccgaatttaaaatttcatgtcatagctatgctcacatgtaaaactagtgaatatgaatatgggagcaacatttttcattaaaaaaggaaagactgatcaattattgcttttattaaattgcatgattcacatctgaagctatttaacatttcagagaacgcatgcctgaggctgtaataacatttggtatataaaccagtctgtagaataagttaaaagaaatattttaagtaggctgggtgtggtggctcacgcctgtaatcccagcactttggggagctgaggtgggtggatcacctaaggtcagcctggccaacaggatgaaaccctgttgctactaaaaatacaaaaattagcagggtgtggtggcaggcacctgtaatcccagctactcaggaggccgaagcagaagaatcgattgaacccgggaggcagaggttgcagtgaaccgagatggtgccatggcactctagcctgggtgacaagagggaaactccgtctcaaaaaaaaaaaaatcttttaagtaatattaggataggtgaagtattagtataagttgataattttcacattagatttcaacattaattgatcaaaaatcatttttctagcaggtgctagacagatagatggcatcttctttcacatagaagagcaaagcagttttccaaaggtctttgaaattccccagggagttctgtgcaaagaccacggagacaggtgaatgccttctatttctacaggctttagcctgaatggataatgcagttgctggtcaaccaggcaggccatatggagtcaccctttactgaggcccctggtaggcccagtcctacagcagtcaaagatgtcccagtaatgactgtagactcttactcttaactttacatcctatcatctgttcctcaagcctaaatcagctcttcagagagagagagagaggaaaacataatttgtttccccccacacctcagagcagaagagtcagccctcagggctggcttcctggtctcaggctccactctggctgctggtggcttcctaaggagatctgagattgggaacaggctgagagggaggagggcctcttgttcccttgaccacacaggaaattcctcagggacacgctcactctgttatgggctcctcagagcctctctcagaaggaaagactggcagtgagtggagggcagcgagtcagggaccatctcatcttctcggctcagttacctccccgggtacccatgtccacatatgtgatgtagataaaatatctcccttgcagaggtgcttgatatttaagagtccagcacattttgaatggcttacaagtgtcagctattattactatttgtgtgtgtgtgtgtgtggtttttttgtttgtttgtttgtttgcgatggggtcttgttcctcccaggctggaatgcagtggcgagatcatagctcactacagccttgaattcctcggctcaagtgatcctcctccctcagcctcctgagtagctgggattacagttgtaccccactgtgcctgactaatttattttttattttttgtagagatgagatcttactatgtagcttagggtggtctcaaactgctgggctcaagtgactctcctgcctctgcctcccaaagtgttgggattatagacatgagccaccacgcccggcctactatttgtttttgacaaccaaaatcttcacaccttggccctaaatctcaatacatttgtctagcaaatggaaatagcaacaaaggactaatccgtgtcagcagaaatgttggctatttcattagaaatgtgagtaaactcatcccaggagctatttcaagttatgctggtgtgagagaccgctgcggagttgttgcccaactcagatctcctctgggtggcacttggcagcctccatctctgtcctggtattcatgatcccggaattgtcgggactggtcagcacagtggacagatgccattacagtggtggtcttcagtctctggagggctttcttaatgtaagcttttttactaggaggctttccctctttggtcattgcagggtctgaggatgccactaaaaagaatgtcaccaattatgggtgcctaccgggtgcaggtactgagctcatttgctgcagaggggtggggtgaggactctggagccagggcttgggctggaaacctagatccagcacttcacagtgcaagtgtgggcgagtgaccaagctctgtaaaatgaagtttcctctggataaaacacagaatggaagtactgagctcagagggttgttgtgacaataaaaggtgttcagtaagtgttcgctgttgacactgtctcatggcaccttcatgatgtcttggtgattgtttcagtcccgtttcacagatgacaaaaacaggctcatagaagcggtggactctgtgacacacactgaataagcagagaggctgtgctttggggttagagaagaattgcagctgtttccactccgaaccttagaattctgtttctccctagttaccaatacactttgagcaagccaattttattggacttagagacccagcacacctgattgattccttgtggtgggagatgtgaatttcctagtccagtctctttgaggattgaaagagctcagtgagaagccagcagagttggcaaggttgttgatttcagtaacctgtgggcacacatctgcaggaattacaggtgcaccccactgtgcccaactaatttattttttattttttattttttgtagagatgagatcttactatgtagcctaggctggtctcaaactgctgggctcaagtgattcttctgcctctgcctcccaaagtgttgggattataggcgcgagccaccatgcctggcacagaagctgagaaccacagcttctcagagagaaggtgtgaacagacaggagtgtgtcagttgcctgggatttacaggcagcagagacagagagtttctgtggggcatgtgctcttaggaatgtcctggagagaagtatgctacctgtgatctgctcagtgtgcaaggtccaggaagacagatgggccagccatggaggtgaacagcaagtagcaaaaccttagctggggctgggtgtggtggctcatgcctgtaatcccagcactttgggaggccaaggtgggcagatcaactgaggtcaggagttcgagaccagcctggccaacagggcgaaactccgcctctactaaaaatacaaaaattagcctggtgtggtgtcatgcgcctgtaatcccatgtactcaggaggcgaaggcaggagaatcgcttgaacccaggaggtggaggttgcaaaaaccaaaaaccttagctggcccaaagccctttatactggtccatttgctcttacagatccacccagacaccaggattgcctcaccctgccatagaggggcatgatgagagaaaatccacaaagttcatcaatagcccacatgtggttagggtatgtgagaaacaaggccctcactgttactctctgggggtggagagcggggattggggggatctgggttctgactggcctggtctctcatcagacttacttcctacattagacttttagggatgctggaacaaagcaccacagactgtgcggcttgaaaaacagacaatgactgtctcacagtctggaggctggatggctgagatgaaggtgtcagcagggttggctcctcctgaggctctgggggagacactgtccagtcttctccccagctctgcgggtgtgctggccatctttgacattccttgcttgggggagcatcactcctgtctctgccttcatcttcacactggtgttctccctgtgtctgtgtccaaatttcctcttttataaggacacagcccagctggattcggggcccaaccccactccaggatgactccgtcttagccaatcacatctgcaaagactctatttttcaaatatggtcacattctgaggagctgagggttggacttcaacatatgaatctggagtggagctcagggaagtggggcacagttcaacccttaacatcttcctttttcttaagaataatcttcaacttctctccaccccaaacttaatcagtgtcgtcctgataagagagggagacgggaagactcaaaagcctgcttcagaaggcagtgagctgaccccaagctattctagaggttggtgaaagttaaagtttaatgataagccttctgtgttgactccttccaaatcactcaaagggcagctcacgtttttggggctgtgtcatctgagaagagtgaaggacctcacagggtaaagccccgcccctcccatttccttctcccccaggaaggagtggctagaggaatgggccaggcaggtcaaagccatcagattttagaatctctacctggtggctctctccttccagctgcttctctgagggttgtcttagtgggttagttctttttctctggcattagctgtggttttgtaacctgaggctggccaaggagagctatagatggtggctcccagctgagctcagcgccactgctaccaccagaccctgagcctccaccccagtcatttgaaagtgaaagaaaggtaaaagatatttaatgcttacagattattcacaaagggctcaaaccaacaactagtaacccagagacaaaactactttaaagtgtgctaagttagacatcactaaaatgtcggatggtaccgaggcccaaggtgcgctgtgtggagccagctgaggcaggcagtgaggtgagccacgaactctgaacctccctggtggcagggagcccggtgtgaggtctggaaaatagagccaatcaattcacttgcaagtcctggctgcagttctgggctcaccctgaaccctgggtgttccctgatgttcctatagctgatttcaatactcaagtcacggtagttcaaagggcaatttgacttttgcttgtccaaagaaaacttttaaaagaaaaactcttcaatataggcaactattttgtctcttttcacccaaatgcctatttgacatgtttgtcagtctctcagtcgcggaatgtgcactgttaccatcagctaagggctttcattatattctggtaaatgggccagtttaacctggacatcagtatctaggcatcttttttacagtctcagagcctaatacctttcaggaaactacaaaaggctttatttttaaagcataattcaaagcttatcaaagtcacaggaatttcacttattattatgagacttcctgaggaaaagtaaagtaaaaatataggtaagcaggcttctagaactttattttttagcaggtgggatggagaagaaaaaaatactactactggttttgaggtcattattttttcagtgtaatggactttaaaagcaataagcaatgggaagctggacctcactttgtaggttcagggaaaaaaaaaatcacccttcttttgtgtggtagaaaacctcttgtaaatgcatagatttgagaccatgtaacaaaattcttgggtcctctgaagcatttctgtaaaatttatggaagaaatgcttgtgattggtgtgatctgtgattacttcattagatcaggctttgcctatacatccaaatgatttattttcttgtttatgtgtgtgttgtggttaggggaggtagagggggatttgtctgtagcctaatgcttggcacacagtagaagcttctctcagataattttggcttcaaacaaaagcagcatgaaaagcagacacatatatttctttctcattaaaaaatgtgaaatatatagtccagggctggtatggtggacctacagtgctaaaaccagactctatttttccattctgctgtgattggctaccattcccatggtcaccttatggtccatgaaggctgctagagctccagctattcaaccattctagaacaagaaggaggaaaaggggagaaaaaggggacccctctttattcatgagtcttgctgaaggtaccacataacactactgtttccagctcagtgattggaacagtgacatggtgacaggtggctgcgacagagattgggaaatatgcatggattagggaaaaaagtcagaatctttttattaaaaagaagggaagaatacattttgagagacagctagcaatccctgctacactgcccaaaataatgtttgttgaattgaattggatcaattggccagaactggtggtagtgttcctgagttattttgttcttgagttattttgttcttgagatatttggagatatgttgttgaagatattttatcttcctccttgaaaaatggagtaggatgtttctgtacctttagtgtgataagtgtgggacttgggagacagaatgctgacataagtacttcttcagctgacaccaacttactctgggcaaggacattaagacgcttgtgctcttttatcttaaggaagttgggtgtgaacaagaatggtgtgagacacatgctttcaagttccctagtatgtgccaggcacattgtaaggtgaaaatgaagtgctctggtgatgaatgagaacaatctgaggatcttatctctccagtttcctccacatagtcaccacaggggacaaaatctggagaagcctccagttccctcatgaatttggaaatcactggcattataaatggttccaccacttgtttttttgtatgaccaaccaacaataagttatttaacattgctaagcctcagtttcctcatcattaaaatgagagtaataaaaatccctatgttctggggttgctgtgaggatttttaaaaatgcatgtaaagagctttgctccatgcctggcacatactaaatactcaataaatattagctgttcttattaataatgcaaaaaagagcagaagaaaaatgcccaaagttacgttcccaggagagcaagtcctggttggatgattaagtaattataggaagattatgtgtcagtcagaagtggggagcagtcatggagggcctaggaaggcacacagcacacaaagaccaggccacctgtctgcccactctgaccgagaggccttctcagtgaattggtttggattcttggggtcccaagggaaaggctttctcaattgtagataaaagtacacatggctatattagcatgatgccattttgcatttgattttggttcctcattcactatataatcttgtgattgtaatttgccttgccttgtagatctatgtacggggaaagaatgaatgggccatattggcttgagtattcagctgtgattcccattgtaagatgaacaaagtggcattctgatattatacattattctctttgaggttggttaatgtgagtctgccacccaaatgaaaaaacattcactgtctctgcccaccatgtgcttcataggcatcttcttttggaactttttcccagaagtttttacaccaagtaatgaatataggaagctgtcaccacagattcactgagggcccagtggttgtcaggcactgtattaaggactggggaatatggcagtgaacaaaagggacactatccccaccttgtggagattacagtccagtaggacagagagttggtaaactattactacatcatcacagacgacgtaccgcatgatgtcagaaagaagcccagtcataggagcagtaagacagggaggtggacacagacaggctggtgtaggaaaggttccctctcagtctccacctgagacctggaggacgagtgggagtatggagagagcacataccccacactggagtctgcgtgctcctcttccaccttccttgtcatgggtgttgggtggggacacgggaagctacatcacgagccctgtccccttgaatctggacctgtccactctgcgtgttcctttgaacgtccccacgcttgtaccctgtgtggcagctgctgcagcccgatgttgcagcctcccctaagatgtggaaaacccaactgcccagaaggaagcctgtgctcctggaatgtcatgagggagggagaaggaaagacagcatcacaatattcatcctggctggatgctgtctccattcttcagaaaccaactgaatgggtgttcagtattctgtgaatctttgcttttatgtacttttttttttttttgagacagagtctcgttctgtctcccaggctggagtgcagtggtgtgatctcggctcactgcaacctccaccttctgggttgtagtgattcaccagcctcagcctcctgagtagctgggattacaggaatgcgccaccatgcccagctaatttttatatttttagtagagatggggtttcaccatcttggccaggctgtctcgaactcctgacctctggtgatctgcccaccttggcctcccaaagtgctagaattacaggtgtgagccaccgcaccagacctaggtaaactttttttttttttttaatcaaactattctttgttttcaaacaaacacacggaacacattctcacagaaacctaacaaccaaaaagtgtcggaaaggaaaactggctttgtgtttcacattaaataatacaatacttgttcataatttatcttttcagcctgctagactccatttttaagtagaaaacagaaagacagccatcaggcccaagagaagtcttaaatatatctttgaagtttggaagtgactcatgccgtgagtctggaagtgtaggtttcttttgaaacatgcactgctgccgcagctgtaatcactgcctcctcagcactggtggcctaggcaggcaggagggctcatgtcagctgtgactggccgtcatcacatcccacaggacactcttgctccttctgttgccagccctacattctcccccttctgcctgtctagacagccccttcccttagagaaaggggaggccctgtgagctctgcactggtcctgcctgcagcacacacactgtgccctccccctccttactctgttgggtgctaaatccttgcctccattccccatctctgtgtaaacctcattggcttatgaaagtctcccttggcccatagactgatttccccaggacagcctctgttccacagcacacatcacacttgcagtcacttttatagagctgatcttcctgggaaactctgggtcctccttggcagggactgtgtcttcctgctcatggctgtgtcctggtgcctaacatatcataggtgcttaatgaataggtttcttgtctgagagatgtggcccctccttcccatgaccacagtcaggtttctcagagtcaggagtgggctcagagcccctatgcaccccagtcctgtatggcagcatggatggttccacttagaccagctggaaggactggttaagatccatcagctcaagtcttccttttcagatgtggcaacaggattagtttgctaggactgtcaaacaaagcaccataaactgggttagttagacaacagaaatttattgtctgccagttctggaggctggaagtctgagatcaaggtatcagcagggttggttcctaagggcagtgagggaggatctgtccaggcctcttcctcagctcctggtggtttgctggccttttttttagcatttcttggcttgaggaagtatcatcaatcttgcactctctctgaaggtgtctatatccaaatttccctttttttgtaaggacaccagtgattggattagggcctaccctaatcacctcatcttaacttgatcatcttaagttaagtcatctatttgcagataaggtcacattcacaagtactggggggaaggacttcaatatattttaaggaacccaattcagcccaaaacagtgactcagtttataacacattatcctccctgctgaaagatgatcctactcacccataataaaggggtcatgctattttcccaggtgtagtcttatttgttgctctttgtgagcaggaactggaagacagaggaaaactctggttataaaataagaggtcatctgcctgggtgatggggctaattgctaagtctggaacatggtctgcacagggtgtttcagctgaccggcatcaggcccacttgactgaacatcccataagaaccccaatcacaggagttcagttaatcttctggatcaataaacaattatttagagaaagtgactttgtcaacaatttaattaaaatcacccaacctatgaaattagaagtaattcaagtttgagcacatattagctgtgtggcctaggcaagtcatttgtctggatagcaacatactctctgtaaagcactgggattaggtaacctctgaagaccctttcgactggaaccttccttggattatgtggttcttttcgtgttgaaagcagaaaagctctctaaggagttgggatatacaagtatgaaaagaaattaaatgaagtgcttttcctcttcattatcattgtagatatgaggtggttcttgcctctgcacggaagaaacatgctagatctctgtcttgatccacttttatgtactcaatgtctactccttgcaagagataaaccagcacacaggacatgggacctttgctgatagggtaccattcttggctcaccctgctggtcccaccctgctgggctggtggtgttagaatttgcatgggttgaatgtatcattttcatcttcaaaataaccaattttccaaagagttatttctgtaagtgtctaataacatatttaagaaccaaatcagagtgtcagttgtacaacctagtcttcaggctatagacactcactttttacaatcttggcataaaaaatcttactaataatagtgtcttgactataaatagagattttctaatgtcctctcctgctattgtattgctcattacaatgctcaatgtatcataatccctttttttggccataaaactgtgcctcttgattgtgagaaggatataaaatagacccagatgtcttaaccaagtttggataaatcagtcatcaccttctttttttccagtaagaatgaggcataacagcttgagtgatgcacagactttattttccatttggtctttccaaagcaaacagaaccaaggtgtaaagtctgctaatggcactgtgtcagccgtgtggcattcagttttaaggacgcgaacatcactattgtgaaaagagagggaagttaaattgttagtgtttagtctcatttaatattaagaccaaaaataaaaacctcaggagaaagacaaagagaatgactaatgaactcagttctagtttaatgcttgagaggggcatagactttgatatgaaactagggagacgagctctcaatacggtagcttttccctcaaatataagaattcttagatttaaatttaaatagtaaattattttagaattttccgttttgcaaaaaaaggtaataataaatacaagaagtcccactcaacaaggtcataatgaggcagagtggatctgcagtaacataacaatagtcagacaccagagcattttttatcccaacattttatagaatgtgttatgtgttggtcactagatgggtgttgaatatacatggcatttaaaacacaaagctacattacaggattggaacaactccaatgtttaaatgaagaaaacataacataaaggggttaatagtctgctcaggctcatccagttaggaaacatttaatactaaactcaggaatcaagaggggagcagggccatttgactcaagtcctgagctttcagaagacttgggttttcctatgaagaggacctgcatgtgtgcagatactgctctcatgctgctttccaggtgcgagaataagacgaacacaaagatctggttgtgataccaattctgatggcatcattaatctaagccaggcctataccatggagttagaaggaggattggaaaaagtcctggcaatgctgcccgtgacagtctgaggcactacagggcacacagagatgagggaaacacagttcctcagagcacttttaggaaggccctggtagtgtacatatcatgataacagggaggctccaggtgtcatgaaacaactgtgaaagaatgctattgggagccgaagcggggtgagaccctggtagcaaaggcctttctgaagcccattccacgcatggctattgctggtggtgactgcagcactaggagacaggagaggaaaggtctgttagaggaaggggagcatggcacgggcctcaaggatgggtaggttttgggtaagaagaaagggggtgggagatggcattccgagcagagggaataataagagagaggcataaaggggagcatcacttgggacaaatattgggagatgtagccctaaatttgtaagactggggcctgggagcattccattccagggattccaaacttggtctgaagattgtctaagaaatctgggaataggctttggttagtctatgaagttttatttgaaactaaatatatgtgcatgtttcacttatctatgttgttggattaaaaaaaaccactccagagttaacttaaaaatgaactgtcttaaaacaacaatttcttatttcttctagttctgtaatctgtgttgggttacctaggaacgaaaaaattgttccagaaccccagtctggtgtctggggccctgccacctattttcagccctccttcatgttcagtgcctaccctcctgctgagagtttgaagtaacagctaaccctatcaagggattcctcattaaaggccatctttggggatatttctatattttatattgaaacttccactgccgtcaagtacagaacttgtacaaaagagtgggtttcctgaaggccagttttgactcaacacaaataataacattattttatctagagctgttcaactatgaactttttcccaggtcaatgagtcctctaataatagatgatttgaagcagagggtggatactgtgactcagggtttctgtagatacaaatccttcaccccaagactctactgcaccagcagatgctcttatgatgatctggaagctgtgaagggtcctgatttagctgttccctaatgtaacaaggatactgagatggagaaaaaccaacagtgttaggaaacagcagtgcacttgataactggaagaacaaacaatgtctatttctttctttaagaaaaattattttttttttaatttttagtttttgtgggtacatgctaggtatatatatttatggggtacatatgttttgatataggcatgcaatgtgtgataatcacatcatggagaatggaatagccatcccctcacatttatattttgtgttataaacaatccagtttacacttttagatattataaaatgtacaattaagttattacgacaatcgtcacctcgtttgctatcaaatagtaggtctttttaacttttatttttattttagtttcaggggtatttaggttcatgtgctggtttgttatataggtaaacttgtgtcatggatttgtgcacagattattttgtcacccaggtactaagctcagtacccaatagttattttttctgttcctctccctcctctcgcactctatcctcaagtggggccccagtgtttgttgttccctactttgtgtccatgagttctcaaaaataatgtctatttctgtagcaccgttatcaataggtgagagtgttgttctttctcacgtgagtgtgtgagcagagagaaggcaggtgctactttcttaaacattctgtagttgctgcattaaaaggttcccacctgtgtgctatttatatatcctagggagaaaaagaaagaataaacctgtcagactctttttttttttttttgagacggagtctcactctgtcacccaggctggagtgcagtggcgcaatctcggctcactgcaagctccgcctcccaggttcacgccattctcccgcctcagcctcccgagtagctgggactacaggcgcgcgccaccacgcccggctaattttgttttagtatttttagtagagacagggtttcaccatgttagccaggatgagtctcgatctcctgacttcgtgatccgcccgcctcggcctcccaaagtgctgggattacaggcgtgagccaccgcgcccggccagaacatgtcagactcttaacactgattaatgctgtaatcagcctggcaacagctgctggcttaacaacttcatttgcagccacagaagtacgtgtttctactcttgcattacttaccggcaacctaatttatatcgagcctcttctcatgctttaaagatgttcttcaaagatatgttagatgtcagcaaagtcatcaccagtcatgtaacgtggatgatgccattgggattacaatgaagagatcctagcctgtgggttctcattttaattcggaatcatagtgtaattaattatccttattctagacatgtaacagatctggttacagtcaaaggcagggaaaatattagaagtctggaagtgaaaacactgggaagtgatttatcttcagggcaagagttaatctctttccactttgggtctggaaattcatgggttttgttttctagataagacttcctacaacactggccaaccagaatatgttggttggcaattctaggtgtggacggtgctttctgttgccccaggttaaatttgatagacatttctgaaaacttggtttgattaaactgattgatcaggatagttttaagtttctttgtaatgtatgctgttatttgtagttgctctatgtattattctaagaatgtatatatgaaatgaaaacttaattttctttttttttgagatggtgtttcacactgtcacccaggctggagtgcagtggcaatctcagctcactgcaacctctgcttcccgggttcaagtgattctcctgcctcagcctcctgagtagctgggattacaggcacaagccaccatacccagctaatttttgtatttttagtagagatggtgtttcatcaagttggtcaacctggtctcgaactcctgacctcaagtgacctgcccacctcagcctcccggagtgctgggattacaggcgtgagctgccgcacctggctgaaaactttaaatcagtgaaagctatctgaatagatgggaaacaactgcctatttttggtgtaaaaagtgtcaatcatttatttgtgatttatatgtaagagggaaaatgttgctgtcatatttactgaaagataaatgctaaaaaaagaatatgccttctatgtggtttttcatgtttacttgtgtactttttttgcttatgaaattttgagaatagtgtattattagattcacacccacttcttaagtcgtgtgttatgaagcagtcacatgtgttgtgaattacttatgaataataatgatagctaacatgatttcttactagatactatgctactttatctcatttaatcctcaagataatattgtaagatatatactgtgatatcctcctcatattgtagatgaggaaatggatgcttagatagtttaactacccctcacggagctggaaagcgtacaggaggggctcaaatccaggtgtgaccattgttcaactgcattgttaaactgcacttcactggcttttcacacggtgccttgataatttcagacttggataacttccaatgatgagaagcttggtagacattttcagagaggaggagatgaaagcatgacaaacattttcttttttttttattattatattttaagttttagggtacatgtgcacaatgtgcaggttagttacatatgtatacatgtgccatgctggtgtgctgcacccattaactcatcatttagcattaggtatatctcctaatgctatccctccctcctcccccgaccccacaacagtccctggagtgtgatgttcccctgacaaacattttctaattatagagcgagaaatgggagctcagaggaatcaactaatttttaactttttaatttttatttttttagggacagcgtctcattctgttgcccaggctggagtgcagtggtgcaatcatagcttattgcagccttgaactcctaggctcaagtgatcctcttgtctcagcctcctgaatatctgggactataggtgcaccatcatgcctggttaatttttattttattttttgtagagatggagtcttgctatgttgcctaagctggtcttgaactcttggcctcaagtgatcctccctcctcagcctcccaaagtgctaggattataggtgtgagccactgcacctgacctaattttttaagaatattagttgacaaaaattagttgaaattttccaaaagcagttctacatctcatgctatatttcatttcttttgcctctgaattttactctggaagtgaaatattttaaaatttctaatgaaggtcccaggatcatgtagtacctttcaaataaaaatatcctatatcatgtgtacataaaataagctgctgtgttcttttgtttagttaatcaaagaagggttttcaacatttattatgcactacacaccgggctaagcaaggtacttcatttaatcttcacaagcatggtgtaagctggtattactgtagctgaggaaacagtctcagggcagttaagttccttaacaaaagtcgtacatattgtaagccacagagctgggattacaacccatgcctgcctcatcccccttcttagaaacagatttactgtcccctgaagatgagggaaataaagccatttccccaaataagcaatttctatttttttagttaccttccaactctcttagttccaatgcttcacttgtaaggttggatgcttagtcaatatgagttctaattcaaaatctgcctcaaagtttcaaaagctgcgctggtgtgttgtttcaagaactccaatctaatcaccatagtctgtctaggaaacagacatcaggggcctgaagtgtccagatttccacttggtgttatctcagtagacacacagctgcaaatcagtagcaacagacagcctcgtttaatgattcttaacatttccctccaaatgagagagaaaactaagcaaaccgaggatgagactagtcagcatgttttatatccataaagactcaagaagctgaaatgcaggattaattctgaaggctgaagagctggaagtattaatgactcaccttcctaaggagaccaactcctctcttgtcacgttgagtgatgaagactctggtgtcttgtggcatttcccccccagtagatggggcatttgggattagtgagttgcctgtaggaatgagtcctaacattctcttacatcctgtgtcagggagaagttctgggtcagcatccttatgacacgtgatcctgtaagtctgttctgatcctgattcaaagctttgaatgggtccagcatctttgaaaccaccatgggatggtcggcaatctaaatgtggtcattgtgcatcaggctgctgttcctttgtcttgctcgcagttagagaagcagggacctctctatcccactctgtactctggtgtttccctggcctctgagcctaagttccttattccttcaagttaaatacatgtgccaatcccttcctcagaatcagcctgcacacgggtaactgcaatgttcaccaacttctctccaggactggtagaggcagcctgtctcctgggagtgcagtgctctgctccctcacattcctcctgggctaggagaggacctcctgtttggacttcgagagccctggaccaggtaccaacaaaccctgacaaaggtgctgtagtaatggcccagagcagcagaaaaagcaaggcttttttagacagatgacctaaatagtggctccaacacacattcaaccggcttgaagcccccaggaaatgctcagtttccttatctgtagaatgaagtaactgctgtgcaggtcagagtcaatgtatataaagcacttggtgtaatgcctggcatgtaatagccacttaataactggtagcatttattatgtctttcaatgaactttccagacagtgggaagctaaatgtatcgtagacttctttttttttttttttttttttttttgagacagagtctcactctgtcgccaggctggagtgcagtggtgtgatctcggctcactgcaatctctgcctcctgggttcaagtgattctcctgccccagcctccagagtagctgggactacaggcgtgcgccaccacgcccagctaatttttgtatttttagtagagatggggtttcaccacgttggcctggatggtctcaatctcttgacctcgtgatccacccctctcagcctcccaaagtgctgggattacaggcgtgagccactgtgcctggccaatgtagatattttatttatttatttatttttgagacggagtcttgctatgtcgcccaggctggagtgcagtggcacaatctttgctcactgcaacctctgcctcctgggttcaagtgattctcctgccccagcctccagagtagctgggactacaggcctgtgccaccatgcccagctaatttttgtatttttagtagagacggggtttctccatattggccaggctggtctcgaactcatgaccttgtgatctgcccacctcggcctcccaaagtgctgggagtacaggcatgagcaactgcgcctggcccaacatatacatttttaagcctttgggatagtttgtaatattggaaacaatgaaatcaggactcaaattctttttatttatttatctatttatttttttttattatactttaagttttaaggtatatgtgcacaacgtgcagttttgttacatatgtatacatatgccatgttggtgtgctgcacccattaactcttcatttagcattaggtatatctcctaatgctatccctccccccttcccccaccccacaacaggccccggtgtgtgatgttccccttcctgtgtccatgtattctcattgttcaattcccacctatgagtgagaagatgtggtgtttggttttctgcccttgcgatagtttgctgagaatgatggtttctagcttcatccatgtccctacgaaggacatgaactcatcattttttatggctgcatagtattccatggtgtatatgtgccacattttcttaatccagtctatccttgttggacatttgggttggttccaagtctttgctattgtgaatagtgccgcaataaacatacgtgtgcatgtgtctttatagcagcatgttttataatcctttgggtatatacccagcaatgggatggctgagtcaaatggtatttctagttctagatccctgaggaatcaccacactgacttccacaatggtggaactagtttacagtcccagtaacagtgtaaaactattcctatttctccacatcctctccagcacctgttgtttcctgactttttaatgattgccattctaactggtgtgagatggtatctcattgtgcttttgatttgcatttctctgatggccagtgataatgagcattttttcatgtgtcttttggctgcataaatgtcttcttttgagaagtgtctgttcatatcctttgcccacttgttgatggggttgtttttttcttgtacatttgtttgagttcattgtagattctggacattagccctttgtcagatgagtagattgcaaaaattgtctcccattctgtaggttgcctgttcactctgatggtagtttcttctgctgtgcagaagctctttagtttaattagatcccatttgtcaattttggcttttgttgccattgcttttgatgttttagacatgaagtgcttgcccatgcctatgtcctgaatggtattgcctaggttttcttctacggtttttatggttttaggtctaacatttacgtctttaatccatcttgaattaatttttgtataaggtgtaaggaagggatccagtttcagctttctacatatggctagccagttttcccagcaccatttattaaatagggaatcctttccccatttcttgtttttgtcaggtttgtcaaagatcagatggttgtagatatgcggcattatttctgagggctctgttctgttccattggtctacatctctgttttggtaccagtaccatgctgttttggttactgtagccttgtagtatagtttgaagtcaggtagtgtgatgcctccagctttgttcttttgccttaggattgacttggcaatgcgggctcttttttggttccatatgaacttaaaagtagttttttccaattctgtgaagaaagtcattggtagcttgatggggatggcattgaatctataaattaccttgagcagtgtggccattttcacgatattgattcttcctacccatgagcatggaatgttcttccatttgtttgtatcctcttttatttcattgagcagtggtttgtagttctccttgaagaagtccttcacataccttgtaagttggattcctaggtattttattctctttgaagcaattgtgaatgggagttcagtcatgacttggctctctgtctgttattggtgtataggaatgcttgtgatttttgcacattgattttgtatcctgagactttgctgaagttgcctatcagcttaaggagatttggggctgagaggatggggttttctagataggcaatcatgtcatctggaaacagggacaatttgacttcctcttttcctacttgaataccctttatttccttctcctgcctgattgccctggccagaacttccaacactatgttgaataggagtggtgagagagggcatccctgtcttgtgccagttttcaaagggaatgcttccagtttttgcccattcagtatgatattggctttgggtttgtcatagatagctcttattattttgagatacgtcctatcaatacctaatttattgagagtttttagcatgaagggttgttgaattttgttgaaggccttttctgcatctattgagatagtcatgtggtttttgtcgttggttctgtttatatgctggattacgtttattgatttgtgtatgttgaaccacccttgcatcccagggatgaagcccacttgattgtggtggataagctttttgatgtgctgctggattcagtttgccagtattttattgaggatttttgcattgatgttcatcaggaatattggtccaaaattctctttttttgttgtgtctctgccaggctttggtatcaggatgatgctggcctcataaaatgagttagggaggattccctctttttctattgattggaatagtttcagaaggaatggtaccagttcctccttgtacctctggtagaattcggctgtgaatccatctggtcctgtactttttttcattgataagctattaattattgcctcaatttcagagcctgttattgggctattcagagattcaacttcttcctggtttagtcttgggagggtgtatgtgttgaggaatttatccatttcttctagattttctagtttatttgtgtagaggtgtttatggtattctctgatggtagttagtatttctgtgggatcggtggtgatatcccctttatcattttttattacgtctatttgattcttctctcttttcttctttactagtcttgctagtggtctatcaattttgttgatcttttcaaaaaaccagctcctggattcattgattttttgaagggttttttgtgtctctatttccttcagttcttctctgatcttagttatttcttgccttctgctagcttttgaatgtgtttgctcttgcttctctagttcttttaattgtgatgttagggtgtcaattttagatcttgtcttctttctcttgtgggcatttagtgctataaatttccctctgcacactgctttgaatgtgtcccagagattctggtatgttgtgtctttgttctcattggtttcaaagaacatctttatttctgtcttcatttcgttatgtacccagtagtcattcaggagcagattgtccagtttccatgtagttgagcggttttgagtgagtttcttaatcctgagttctagtttgattgcactgtggtctgagagacagtttgttataatttctgttcttttgcatttgctcaggagtgctttacttccaactatgtggtcaattttggaataggtgtggtgtggtgctgaaaagaatgtatattctattgatttggggtggagagttctgcagatgtctattaggtccgcttggtgcagagctgagttcagttcctggatatccttgttaactttctgtctagttgatctgtctgatgttgacagtggggtgttaaagtctcccgttattattgtgtgggtgtctaagtctctttgtagctctctaaggacttgctttatgaatctgggtgctcctgtattgggtgcatatatatttaggatagttagcttttcttgttgaattgatcctttaccattatgtaatggccttctttgtctcttttgatctttgttggtttatagtctgttttatctgagactaagattgcaacccctgccttttttggttttccatttgcttggtagatcttcctccatccctttattttgagcctatgtgtgtctctgcacgtgagatgggtttcctgaatacagcaaactgatgagtcttgactctttatccaatttgccagtctgtgtcttttaattggagcatttagcccatttccatttaaggttaatattgttatgtgtgaatttgatcctgtcattaggatgttagctggttattttgctcgttagttgatgcagtttcttcctagccttgatggtctttacaatttggcgtgtttttgcagtggttggtaccggttgtttccatgttcagtgcttccttcaggagctcttttagggcaggcctggtcatgagaaaatctctcagcatttgcttgtctgtaaagtattctatttctccttcacttacgaagcttagtttggctggatatgaaattctgggttgaaaattcttttctttaagaatgttgaatattggcctcctgtctcttctggcttgtagagtttctgctgagagagcagctgttagcctgatgggcttccctttgtgggtgacccgacctttctctctggctgcccttaacattttttccttcatttcaactttggtgaatctgacaattatgtgtcttggagttgctcttctcgaagagtatctttgtggcgttctctgtatttcctgaatttgaatgttggcctgccttgctagattggggcagttctcctggataatatcctgcagagtgttttccaacttggttgcgttatccccgtcactttcgggtacaccaataagaggtagatttggtcttttcacatagtcctatatttcttggaggctttgtttatttctttttattcttttttctctaaacttctcttctcacttcatttcattcatttaatcttccatcacagatacgctttcttcctgttgatcgaatcggctactgaggcttgtgcattcatcacgtagttctcgtgccgtggttttcagctccatcaggtcctttaaggacttctctgcattggttattctagttagccattcgtctaatttatttttaaggtttttaacttctttgccatgggttcgaacttcctcctttagctcggagtagtttgatcgtctgaagccttcttctctcaactcgtcaaagtcattctccgtccagctttgttccgttgcaggtgaggagctgcgttcctttggaggaggagaggtgctctcatttttagagtttccagtttttctgctctgttttttccccatctttgtggttttatctaccttgggtctttgatgatggtgacaaacagatggggttttggtgtggatgtcctttctgtttgttagttttccttctaacagtcaggaccctcagctgcaggtctattggagtttcctggaggtccactccagaccctgtttgcctgggtatcagcagcagaggctgcagaacagtggatattggtgaacagcaaatgttactgcctgatccttcctctggaatttttgtctcagaggagtaccaggccgtgtgaggtgtcagtctgcccctactggggggtgcctcccagttaggctactcaggggtcagggacccacttgaggaggcagtctgtccattgtcagatctccagttgtgtgctgggagaaccactagtctcttcaaagctgtcagacagggacatttaagtctgcataggtttctcctgccttttgtttggctatgccctgcccccagaggtggagtctacagaggcaggcaggcctccttgaggtgctgtgggctccacccagtcgagcttcctggctgcttttttacctactcaagccttggcaatggttggcgcccctcccccagcctcgctgccaccttgcagtttgatctcagactgctgtgctagcaatgagcatggctccgtgggcataggaccctccaagccaggtgcgggatataatctcgtggtgtgccgtttgctaagaccattggaaaagcgcagtattaaggtgggagtgatccaattttccaggtgccgtctgtcacccctttatttgactaggaaagggaattccctgaccgcttgcgcttcctgggtgaggcaatgccttgccctgctttggctcatgctcggtgcactgcacccactgtcctgcacctactgtctgacactccccagtgagatgaacccagtacctcagttggaaatgcagaaatcacccatcttctgcgttgctcatgctgggagctatagactggagctgttcctattcggccatcttgtctccacccctcaggacttgaattcttatgcagcagtcccagtgatctttagagaatgcacatcttgcagaacacctgaggtgaggagtttgagaccggcctggccaacatggcgaaaccctgtcactactaaaaatacaaaagttagctggacatgatggtgggcacctgtaatcccagctactcaggaggctgagacaggagaattgcttgaactcggaagatggaggttgtagtgagccgagattgtgtcactgcactccagcctagctgacagagtgagaccctgtctcaaaaaaaaaaaaaaaaaagagagagagagcatgtccattttggctctgatggtctcaccttgcttaggcattttaaaagtacacctgacaaggaggtgaaaatcctccctctaatactgtatctgcagttacagctaagaaaggccaaggcaagcattggaacctactgggaagttgaaaatttaggctgaagagctgcaaggggtgaccatttctgaaggtttgttagacagcagaatacttttacaaataaaattcctgaagtcaagactcttgggtcatctaaaattagacgggacaaacccttgagaatgagctactgacagggacatgagcaaggtgaactgatgactttttctatttctaatttctgtgagtctatagaaaggtctatttctttcagtattttataatgcatgtttctcctttagccttctttacattttttcctctgatatttttatagattctacttacaaagcttaaaattacaacaaaaatgccatttcatacattattaagtttagaccatttaaaatcctgtcttgcaaatttctcttcctacagagcaatgctgtcccatcatgttgccttatgtctgctgctatttttgaattacagcacatttcatccacctttgataaggaacttaatatccattggcaggtcaacttgtgactttatgctgtgactataactgcaaattatggtgcatatttcattttaagttattccctgggataggaagctggtccaacggcagaactttgtgttataaagactgaagaaggaatcttacagaaacaatgtttccacggtgggcaatgcttacaggatagaatgtcagggaagattgcaataaaatatatggaagggagttgggtgcaaaagagcaaacacataactggagagcaacagagatcagtgtgggattgaggagtccagaaaaggttaagcatggagctgaggttcagagagggacccaaggtctgactggtgcaggaagctaggccttcatgttttgaagattagaataaacagctgcaatattaggatctcaccatagaaggaagctgggcccaggaaggagctggcacacaggctatggctttggcaaagggaaaggctgtggacactaaaccaacttttaagttgagctctgaagttctataatcatcgtgtcaggtcagaagctagtgttagtagcctgaaggcgcaggcatagggaaataagaatattggggaggaatatcatggagtgagatttagaggaagagagatggttactgactttacatctctagatgtacatgggcctcccttaattttaatattctttgcttttcggcttttgttcagatactgtatcctctatcttggaagtaaagtgaaagggaattaaacaaacatttctagaatatctaccatttaaaaggtacttggataagcacttaacatatgtactcattgagctgttccaggagagtgggttattgttatctccatttcacagacaatacacaagctcaaaggttaagtaactcaccctagtgtgcacaattaataaatgggggcctttagattcacttccaggtgtgtgtgtgtgtgattccagagtcctcactcctttcactctaccatactgcttcctagagatagatgtctaggatcagactccagggactgggcctggcacacagcaggccctctgtaaatcgttgacttcctctctccctccctgtcctccaccccttctaacctctttaaagtccactgctttattttcaggtttttagttgactctatagagttattgtgttaggttataaaatcacctgcatattctctttcttttcatgaaggaggataatatcctgaatttggaaattttggataattttttttgggggagagggtaaagcaaggattgatacattttttttcttattcttaaaagccagactctcagactcttggaatataatggtttttaagaaattcatgaaataaagggattttccaatttttcagagaaagtggaaaaaaagggctctatttcaacctacatgatttagctccttgggcccaatgacagcacaggtccacatgtctgaagctcactttcttgcatcattgttgtttctgctgctcagctcttcctgatcttattcctaatcatgtgactgttaagtctgcactttgctggccctcccacttgtcttccagccttgtatttttagatatctacaggacattgctaattggagctcaagatgtgaaaaactgacaactccataatttttcttcaattttccccaccaaatatgcatcttttctcaattctggaattctaatggtcttttggtcctcattggaataatttttgaccacttcctctaatttccactgccactggaatggacttaaaatgaatgatctcaagtaccaagtgggcatccaacatggcgctaaaatcctaatacagttccctagtaatttacttctttctttctgagatgattttatccttttttccttgaacctcctaagcttcctctatgttctcaataactcatccagatgacctgcatcaagtaccacatcatctgccttccttctgcttctatgaaagaagcgtgcctgctcctgccattccactgtgctcagggtcccattctctttcaccttcttaacatcttccattcagcattatcccttccctgtcttggaaaatctatttctttctctctgttgaatcattctgctaaacacaaaaatacaacttagtatcacgtatctcagagaacatcctcctttgatctcatagccctcctctggcattgtatcactcctctgctccccttcacagaaacattccagcaaagagccgcccacctctctcatcccttagtctttcctcaaccctccctaactggtctgtcttctaccactccactactgtggccattgtcaagctcaccaatgacctccctcttgcacaagcagtgatttatatacccaatcaggggtgctcacccagcctaaccgccacctttccttagagtgccccctcctcaaagctctcaggaccctttcctaccttgttttcctcttaccttgttggccacacatgatcagtttcttttggaagctctcctcctctacaagaccttgcttgaaaagcccaaggacgttatcttaggctctcttctctttcgtttttaaattctcttcctagaaaattatctccagttatgtagtccctcccccaccatatttatgtggtttaaagtgccatctgcaagcgtattactctcaaatttacatacagctccagatgtgatcaccagcctgagcttcagactcagatagccaactgtctacctgacaccaccattttgaaatccacaagtatctcaaacataacacagctgaaatataattacagatgtcagccttcatccactctcctcttctcaagccttccccgtatcagtaaatggtcctaccattcactcatacccaaacctaaaggttaaacttgaatcctttctttatcctataacctacaatagtaagtctcaacagttccattccatgaatataacccaaccaatccacttatcgttattttcctggctacacacctcatgtaagccaccataagttttcatcccaactagcagagcagcaaggctcctacctctactcctgctgttctaacacccatgctcctcatagcaaccacaatgatctctttaaaatgtataacatcaaaataccttaaaaaagtacaatctaaactccgaaccgcagtccagagggccctaaaaaatctggcctcttcctatttctctgatgaagtcttccttgactctccatcttgttactgtttttcagccacactggccttctttccgtcctttgagtatccccagtcctgactcaggggctttgtacttgctctgtcttctgtttggaatacatttcttctgtatctttgaatagtctttgaatagttttttctctttaaattagttttaccttaaatgtccccttctcagagaggacttccctgacaaactgagtggccttatcacctctacaaaattaacctacatgatctttttcacatcccttctgtacctgaaattatcttatttatcaacttgcttgtttttgctgtctgtagttgtatcagatttatggcataaaaaatcactccaaacttagtactaaaacaaacatttattgagctcacaatcctttgggtgggccaattggactgagctcaaatgggtggtatctggattaggctgggtttatcatgcgtcagcggccaggtgggtggctcttcttctgggggttggttggctgttggctggggtaactgggcactggggctaggtttctcttatcatccagcaggccagcccaggcttactcacagggtggataacaggattcctgagagaacagaaatgtaccagttctcttgaggtttcgttttggcactagcacaatgtcccttctgcctcattcttttggtcaaagcagcccaaacactagaagtgggggaaatagtctctactgcttaaggggaagagctacagattacattgtaaagggatgtggatatgg

SEQ ID NO: 38 - DNA, 73822 bp, Artificial sequence
  Sox17 GFP reporter BAC (RP11-47H10) upsteam region
gcttgccaaataatattccatagtatgaaggtatcacattttatttatttattcatccattaatggctatttgggttgtttccactttttggctattatgaataatgctattaatatttctgtacaagtttttgtgtgaacacgtgcttcaattctttggggcatatacctaggagaggaattgctgggtcatataggaactctatgtttaaccttttgaggagctgctagagtgttttccaaagcagctgcatcattttatattcccactagcagtgtgtgaggattctggcttgtctatatcctcaccaacacctattattatcgactctagccatcctagtgggtgtgaaggggtatctcatgatgactttgatttgcatttccataatgactaatagtactgagtatctcttcacgtgcttgttggctagctgtatatctttcttggagaaatgtctgttcagatcctttgtccattttttaaatagaattacttgtctttttatttatatatattttttgatacggagttttgctctttttgcccagactggagtgcaatggcatgatctcagctcactgcaacctccacctcccaggttcaagcaattttcctcccttaccctcccaagtagctgggattacaggcatgcaccaccacgcccagctaattttgtatttttagtagagatggggtctctctatgttggtcaggctggtctggagctcccaacctcaggtgatctgcccacctcagcctcccaaagtgctgggattacaggtgtgagccaccacgccaggcctattatctttttatttttgaggtacaagaattcttaatgtattctagatatatgtcacttatcagatatatgatttgtaaatattttctctcattctgtgggctatattttcaattttttgatagtgctctttgctttatataagcttctaaggttactcttaaattaatacatttttagcattatccaagtagaaacatggaacatgaatacatcaatttgaaccattttcaacctctgcatagtacttaatactatgactatttagaattaatttattgattcattattctgtcagtggaaacttgggcttgtgccagtatttggctgtggcaaacaatgccaccatgagcattcttatccatgtctcttggggcacatttccaagtgtctgttgggcaaatacaaggcataccttagagatagtgtgggtttggttcgagaccactgcaataaagccaatagtacaataaagagagtcacataaatttttggattaccttgtgcatataaaagtcgtatttacaccatactgtagtttattaagtgtgtaataacattaggtctaaaaaaaaatgtatagaccttaacttcaaaatacttctttttttttttttgagacagggtcacctagtgacagacagactctgtcacctaggctggagtgcagtggtgcgatttgggatcattgcaacctctgtctttcggcttcaagtgattcttctgcctcagcctcctgagtactgggattataggcatgcaccaccatgcttggctagtttttgtgtttagaagagatgggtttttgccatgttggccaggctggtttcaaactcctggcttcaagtgatccaccagccttggccctccaaagtgctgggattacaggtgtgtgccgtggcgcctggcctaaaatactttatttctaaaaaatgttaacaatcatctgagccttcaacaagtcttaatctttttgctggtggaaggtcttgccttgaggttgatggctgctgactgatcagaatggtggttgctgaaggttgaggtggctgtggcaatttcttaaaataagacaataatgaaatttgccgcatcgactgactcttcctttcatgagagatttctctgaaacatgcaatactgtttggtagcattttaccaatagtagaacttctttcaaaattggagtcaatccgccaaaccctgccactgctttctcaactaggtttatgtaatattgtaaatactttgttgtcattttaataatgctcatagcatcttcatcaggagcagattccatctcaagaaaccactttctttggtcatccataagaagcaactcctcatccattaaaattttatcatgagattgcagcagttcaatcacatcttcaggattcactttaaatttcagttctcttgcaatttctaccatcagcagttatttcctcctctgaagtcttgaaaccctcaaagtcatccatgagggttgtagtaaaattctttcaaactccggttaatgttgatagtttgaccttctcccatgaatcataaatgttttaatggcatctagaatgctgaatcctttccagaaggttttcaatttactttgcccagatacatcagaagaatcactacctatggcagctatagatttaggaaatgtatttcttaaataataagacttgaaagttgaaattactccttgatccatgggctaccgaatggatattgtgttggcaggcaggaaaataacattaatctccttgtacatctccatcagagctcttgggtgaccaggtgcattgtcaatgaacagtaatattttgaaggaagtattttcttccgagaagtaggtctcagcagtaggcttgcaatattcagtatgccatgctgtaaacagctgtgctgtcatccaggctttgttgttccacctatgaagcacaggcagagaagatttagcggaccctaggattttggaatgtaaaatgagcattggcttcaacttgaagtcaccagctgccttaacccttaatgagagccagcctgtcctttgaagtcaggcattgatgtctcctgtctagctatgaaaatcctagatggcatcttcttccaataaaaggcttttttgtctacactgaaaatctgttgtttggtgtagctaccttcatcaatgatctttcctagatcttctggataacctgctgcagcttctccatcagtatgtgctgcttcactttgcacttttatgttacagagatggcttctgttcttaaatttcatgaagcaaactctgctagctttcaacttttcctctgcagcttcctcatctctcttagtattcaaggaattaaagagagctagggctttgctcttgagatgagggtttggattcagggaatgttgtagctggtttgatcttctatccaggccactaaaattttcttcatatgagcaataagtctgtttcactttcttatcattcatgtgttcactggagtagcatttttttttttttttgagatggagtctcactctgtcgctcaggctggagtgcagtggcgcgattgtagtagcactttttttttttttttgagacagagtctctctctgttgcccaggctggagtacaatggtgcaatctcggctcaccgcaacctccacctcccaggttcaagcaattctcctgcctcagcctcctgagtagctgggactacaggcacgcaccaccacgcccagctaatttttgcatttttagtagagatggggtttcaccatgttggtcaggctggtcttgaactcctgacctcgtgatctgcctgcctcagcctcccaaagtgctgggattacaggcgtgagccaccgcaccgggcctggagtaacacttttaatttccttcaataacatttcctttgcattcacaacttggctaactgcgcaatgcaagaagaccggcttttggcatttcttggcttttgacatgccttcctcactaagattcttaatttctagcttttgattgcagtgagagacatgcaactcttcctttcgcttgaacatgtagaagtcattgtagggttattaataggcctaatttcaatatcattgtgtctcagggaatgaggacgcccaaggaaagggaaagagataggggaatagatggtctgtggagcagtcagaacacacacacatttattaattaagtttgctgtcttatgtgggtgtggcttgtggtgcctcaaaacaatgacaacagtaaggtcaaagattcctgatcacagatcaccataacagtgataacaccataaaaacaaagaaaaagtttgaaatcttgtgtgaattaccaaaatgtgacacagagacacagagtgagcatatgctgttggacaaatggtgccaaaacccttgcttgatgcagggttgccacaaacattcaatatgttacaaatgcagcatctgtgaagcacaataaagcaaagcatagtaaaatgaggtgtgcctgtatctagaatacctggacttagagaatgtaggtcttcaggcttatttgatatggttacagtttttcttttttctttttttcctttttgtaccagcagtgtattggagatctcagtgtgggacgtctttgctaatacttggtattgtttgacatttaaattgtagctattcagatgggcatgaattggttctgattgctgtttttaagatgtggcctgactgtcaagccttcagagaacaggtaagctgctgggcctgttttgttatttgtaaagcagagtcatgaaattgtggccataatatgctcttgtgtattcagagttctggagacccacatagaaagagaacaatatgaagaactttatgagatacttgtatggttcctctgtacagtagtagttggctgtattacatcattgatgatttttattatactaagtatggaaaatattttaaaatctgtaatgtaaacttttcgcaactgaatagtataaagttctagaaatttattagtgtaagccatttgcaaattctttagcccctggaagtcctgtaaaagcaggatcattcccatttccattctttgtctccacccttcatttagtcttgctgttaataatgccaattccttcagcattttctcatatagttccactcaactctttaatcttgtaaaagttattgttttttttttgatactgcatacataatgcatgcaaactttgcataactttcaaaattaactcctcttccaagatgaagattaaataactgagaccactatggtgtttcttgtttgacatttttagcagagtggaatgttaccagatagcccgtttctagatttctcatcaaagttatacttaaatcaatatgttagtatttaggtaagaaagaaacttttcatggtaaatgaaggtttttctctcagactagagtctcatttggaagaagactaaggagaagcttcaatttgaattgtgaatagaccatgttgtgcattgtgaaatatgactagaacatgtttttcagtggagtttctcacatgggtgttgatctgttgcttttaatatttgtaggtagatcctgcagagtaaaacaagcaaacaataatctactaataagtgagaagctttctttttttttttcttgagacagagtctcactctgtcacccgggctggagtgcagtggcatgatctcggctcactgcaacctcccacttctgggttcaagcaattctcctgcctcagcctcccgagtggttgggattacaggcgcccaccaccaagcccagctaatttttgtatttttagtacagacggggtttcatcatgttgtccaggctggtctcgaactcctgacctccagtagtccacccgccctggcctcccaaagttctggtatcacaggcgtgagccaccatgcctggctaaagtgaggagatttctacacggagagctttataaatgttgtgtcacttaatttacacaatgtgtttttttctaaaggtattttaacaaaatggttctcttacggaacgtttatgtgccactgtgttcagtttgcacatacattcattatatcattttctgctgaccagggtgtcactagacactacctcactcatcctggctttagctattttccagaatcttccacagatggtgatattaatttaggctctgaaaataaactaaatattatagtctttggatatttccctccagtaagttttcaaaagccaagaaagttcaagagtttgattaaaaatagttggccttcttggctatcaattgaagcattctccttcagagggaaaggtaaagtcaggaaatcctgagatgttctgtctaaatcctactttactgaagtgataaaagattaaaggtcagcttcaaagttatttttattgaaaactgggcagacttcagtttgcaccagattttcttggcccgactctttctttttctttttctttttttttgtgagacagagtcttgctctgtcgcccaggctagagtgcagtggcgtgatctcggctcattgcagcctgtgcctcccaggttccagtgattctcctgactcagactcctgggtagctgggattataggcacatgccaccatgcccagctaatttttgtatttttagtacagacggagtttcactatgttggccaggctggtcttgaactcctgaccttaggtgatccacctgcctcagcctcccaaagtgctggaattacagacatgagccattctgggtgaagcttgggactatctctgcagctggtgggaccttgcctatggaagtgcctcaaacgaagggatgtcgggtgcagagaggagaggttctgaccctgttcccaagcccgtgatcatccagtggtagcacaggctttgtatcaacatgactgtggatgtggtgttggccagacgtggaaacaacaccctgcatgggagcagatttgagttgatgaagaatgaaaatgtcccacttcacaggcactgcaggtgtctgacttctctgctggtggcatctgcctcttatgtggttatgaaattaaggagaaacctggattaggtctgctcagcagtttagctttgccacatattagctgcatgtcatttaacttctctgtgcgtcagtaccctcatctgtaaattggggatactaatagaacggtcccatagagctactgggaggattaaatgagattaaacatataaagtgcaggaatagtgcctggaaaagggaagatgctcagtaaatgttagataggatgattactgtactattagtaatatgtccaataaagtcaggggaaaataagttaatccttaatgaagccaaagagttgtctgaataaacctttagcagttttagagatcaatcatgtgcattcagtcatgtgcattcaattagaatcaatgtaggtcttctcaatgcatatacaaattgaacttaaaggagaagttggccaggcacagtgactcacacctgtaatcccagcactttgggaggccgaggcgggaggatcacttgaggccaggagttcaagaccagcctggccaacatggcaaaaccccatatctactaaaaatgcaaaaaaaaaaaaaaaattagccagatgtggtggcgcatgcctgtagacccagctactcagaaggctgaggcaggagaatcgcttgaatccgggagggggaggttgcagtcagcagagattgtgccactgcactccagcctgggccacagagccagactctgtccaggtctaaccctggggttttctcatgaagagcagagtgtaggaagcctggtgagacctgagtcttatccctagagagaacacctgtcagccgagaccatttgggaagcaggaaaaataaagagaagcacaaacagccacagactaatttcaggaaatagtagtaagggagagtcgctgagcttgtcaaaccttggtttgagtttggaggtgagatgaaaaagcaggaacgacccctcagtccttcataagagagacaccatactccaaaagtttccagagtgtgatgtttaaaactgggatttggttagttttttttttttttaacttttaatgtagaaaattgtacaagtcacaaatacgcaggttaatttttttaattgtgataaattatacataacacaaaatttattattttaatcattttgggggcacagttcagtggtatcaagtacattcacattgctgtgcaaacaccaccattcatctcaaaacgttttcatcttcccaggctgaagcttcattctcattaaacacagatcccccactcccctgtcccctggcccaggccctggcaatccccattgtaccttctgtctctacggattcgactactctgggtacctcatgtaatagaatcatacagatttggtcctgctgtgatgaactcatttcacttagtgtaatgccctcaaggtacagcttggtgaattttataaacttgaaccacctatgtaaccagtgctctgacagagaaacacggcattgctagccacacagacctccctgtgcccacctctggtgagtcccctctacccttgcaggaccccgagggcaaccttgtcctttgtctatgcagagaaggaggcagaagggggaagactaaggtttctgcctcttacctccccagtagggaagctgcacattttatctgtttcacacattaggctttagtgtctctgccaaagaaaatttggaaactttgacttgggcaatgtttatatttcactcccagattgtacagataaatgccttgttttatttagtctgcctttgttcaactaactcccatttttgcaactctgtttaggcagcctcttctgggggaagccttcaaccctgtgcatcccacaatctggagacactgttggctgactgtgacttaccaccagacaaatgcccaccagaggacagtctccttggcatctgtgtaacctcaaagcccagcacggtgtccaacactcagtggtttctacaatgcatgtttaactgagcagagctgaactagtgctcccagggaactgactgatggaagtctgtcttaaaagctgagctctataattttgcagctgtttgcccttggagacgtcatttaacttctctgtctgggactctggcaatataaggaaagtgccataatattaatctgaacaagtgcccaggcaactcttaagtttaacagcagtatcatatcgccatttagtgtgcacacttcattctcttatatacctgagagagattattttaaaatctctcatgttaatcaaaccacatttcctgatctagataaaaaaggtttcagagtttaattacacaaaaagtaggtaatgttgcatgaagatttacaaagaagccaagattttttttttctttttaaagtatgactaggtaataatagatataagcatatttttctcattcctaatacatgttttatttggatggtgtgctgtgatatttgaggatttgggacacactcttttagtgtaggttgcaagaaaactgtgaaacacagacgccaacagtaggtgaagtcagaagatcttctgtgttaatttctgaaatgtctagcagtgggccattctttgacggtagcctgatatctgataaagataacattctgccactggccatgtgaggagcaattcccagccaggggaaggactccaagtccccaaatctttcttaaaattttagattgagaattgacagaaaacatataaactcagataaataggcaaaggtattgaacagactattcataactgtacttatgaccacaataaaaatagaagcaatataaatttgggtaaaataattagatatgtatttggggcctatgaaatcacaaactacatctaaaatttaattagaatgataggtgatttttgttttcttatttgcatttgtcacattttaaaaaatactgcataggtattacttttataaccacccaatagtatttgagaatatgctctaaaacaaatgagcccagttcattttattcatgttcaggaagctaaagtcagccagtggaaacagtgcagtgaggtggctgtgactggttttatttgtacttgccacttactctgcagataccatggattggcaggcatagctcttattttatcagatagaagagaaatgggaaatgacacagaattcccacacatgggaagggggcattttttaattgagcagatactatatcctgtatgttatgctcagtactttacacctatatctcatgccatccttaaatgacacagagtggggccttccaactggaaagaatgctgcagtacgatggctgataagcagaaaacaacatacaacaaagcttggcattaaaattactttcagaagatatggtaaaactgctttttttgggtcttggattgttagtagagcctcaaagtttaataaccaagacccaggtgcctaatttgccccactgggtcctgtcactgactcactggatgaccttagtgaaatcgttttccatctgtgagtgtgtttccttgctgtgaagatgaaactaaaaataaatactgccttcatcatgggttatggtaaggactagctgagtaatgtttactaagaaattgcaactttttcaagcaaaagggggagaacaaaatgcctgtttcatcatataggaaacctgtttgggagttttgtgaccctaaagtgatataaataaaatagaggactttttttcaacctcctttgttagagtatgagacaaaactggctgaattccggtgttctttggtgctggctaagaacagcttggttgcccatgagcagcgtggtcagaggctggttcctggtggcagggtgcattctggagaaagcagtctcctccagcctgagctgtgctcccccacgggactgagtcactcaggccacccagtctctctctcccaaagcttccaaagctcactctcttccaggtgctaagtccaccatcaatttttctttgactagtctagttttgtaagtggcaggttttctgattttaaacagaaaaattctgcctcccttgcattattttttaaatataattttattcttctctttgatgtgagtgtccagttctcatagctaagaaggtccaggagtgcaactcagaagtgtagaaagaaaatgggcttcaaaggtaaggttttccctacttggtttccaactgtcttatgatggccttggacactaacctctttgagcttcagtctccaatgggaaatattaaccttatagggttgttgtaaggatcggagaccttttatttatttatgtttcatgtcatacaaaacacacattatgggcacgggcaccaagttccttacctcataatatggtggcaaaaaaagataagccctgccctgatagaacccgtgttgcagggggaagctaagtcctaagtatgaatctacaattcaggttctaacaggtgaacagtctatagcacagtgggcctctctgcgttgggtgctgatgagctcttcatttaccctccaaacatagaacaaaagaacacattgagggcttacgtggtctcatgttgctcccatttttcactacttgttcaaacaacagtgacagaacacctggttcccatgggcagggagttctgctgggcactaggaacactgagatcaaagggaccctgcgttgtcctgaaggggctgacagtcagagtaggggaggcagacacctaaacgggtgttacacttcagagcactgagcaccacagggctcttagagaatgctccaagctgggactaggaactgagtcctgaggatcaagggacatttgtgatgcagggtggcagtgatatggtggggaagaaggtggagttggtgcttcagacagagaggacagaggaaaaggctgtggggggacacagcatttttggtttctggcatgtcacagaacagttcaattcagtgtgaggagcttggagggagcaggggacaggcagttaagaggtgagaataaaaactggaagtgtgaaggggttggcctgtgcgtggtgctgaccttggaaaagggaagacaggtggaagactgggagtgagaggggctgggggcctggaggaggtgccaggaccagaaacagtcaggggtcagtgtcccaggaagggtggacaagacttagtgagtggctggtgtgggcattgcggggagaaggagacgctgaggacaggaccaatgtcccctgcagggaggatgtggtgacattaactaggggaggctgacagcgccacctttgatgccaaatcccacctccagctcttccctgtggctctgggaaaattgcttaattatctgtgtctcagactcttcacctataaatgaggatgacaataacagaacctcatagattggggctttattgtgtagattaagtaaaatgaccacatgtagatatcagaacagtgtctggcacatctgaagtcctcagtaaggactggttgttattctcggggaacacggggagacagagaatcttggaggagaaagattagggtggtccagttctgattacatgacaaaaagctgcctcaagactctgaggccattatggccatctttgtcaaaagaaggtgaactgccccgtggagtgttagctcggaagtctccagctgtggaaacccagagcaactcttgtgagatttcctatcaaccagaggcaggtggagctgtggaccctacatttatttcagggctggggcaagaaaaatgtgaatgaaagtgttaaacctagtcccttgggttgtttagtctgcaatgctggagaccacactggctcctggtgagactgtgaaatgggtgtagtttgttttggcctgcctcccaacttctctaatgtttctctaaagatctattcctcctaaatcttctttttaaagacttaatttttctagggcagttttaggctcacagcaaaattgagcagaaggcacagagatttcccatgttcccctgcccatcacccctgcagagccttccccatcgtcaacaccctgcacctgagtggtccatcagccacagccgaggaagccactcacccgttgttatcacccaggctccatgctgtacagtacggttcactatctcttcatggcaacaataaataacacagttttagttgatgatttttaaaggctatgcaccctactgggagcatagggtaactacccttgcctgacaaccaaggcatttcaaaaccagcctgctccatctcctgtctctcaccaaacaataaagctcccaatgctggaatgactgagggtctcaccaaggcctgcctggacactcaccactgtttgtgaaactttggaactgcattctttctcttcatcctcacatttgcttttattcttgacacatccgactctgtgacctcttagctccttgacccagtgaccttgctttccagtgggccatggcttccctttctcacggtgcagaatgtgagtctgaaccatgttatctcttgcagctgctccacctccagcatcacagattcaaacatcctcctcgctgcccgcaaaccctgccctgcagcttcctgctcgagtattccctgtacagcctcctttacttctgggtgaccttccctgacccccactttttccctattcacggcctgccactgttaacttgtctgacatccatgctggattctgtcccatcatgtcaactgtgccctctttctgttgcacgtgctggcaaacttgaaatctgatgaacccactaccttcactacactcactgtctggtctctctcaggtagctgaggactgagaaacaccccagccaggcaggttggggtcactataaattcacagtcaccaaccacacatggtgctctgtttggctggccatctcattatacctgtctgacttgcttactgtcctgccctccgaaaaagcttttcaaacactatctccttctgcctcaaatgtatcacctccccctcaatgactttgcttcatatgtgacacaaagaaatgttaataccagccaagaccttcctcaacttccggccagcaaatctggaacacaagctgcatctgtcctggtttgcctcttctctcttctcgttacagtagagtagccattcctcttctaaaaaacactgatctcccatcctgctctggacattaaagtactgagaagtggttttgtgttcccagcaatatgggagtcattggtgaccttaataaaagccacattgaagtgaaatgagaaggaattagaaggtgaagacagaaacaagacagttacagacaactcatttaagcaatttcattatgaagggaggccattgctactatctccgaaaccttaagctatcagttattccttttgctctttcttcctctctgcccattcccttcagcccttaaacagacaaaggtctgagccctctaaacagtagcagaaactgcatacacaggaaacagaaaccctgctccagccttacatccctcacctattggcctattcattgctgcccttcatagtcagatttctcagtggagttgtcttgtaactttttttttcatcttctagtcctttcacatctcatttcaatattattttcttaaggtcaccaatgactttgagatgaccagaactgcccccactcccccgccgccaaaaaaaaaacaaaaaacaaaaaacaaaacacttttcagcctcctaaggtgcttttcacaggtggtccttgatggaagagtcttgcaggtttggggaagtgacttcccgaagaaggttacatcatcagttcaacaaatcaatggcacgtgcgcagactgcatactctggaggcactgggccctgtccagagaatgcacagcagcgtgagatccagctctgttctctaggccctgtggactggcctgtggggggcaatgatggtacgtggtgggtgccacacgcagcagcagccaccaaggaagatgggccccagagcacaaaggaaggagtggggagccgccttcgctggagtggttggaaaaggctttgcaggagaggtggtgcccaggctggagtttgagaagtgaaatgcaggggctgagaggctggggaagtgcactccaggcagtgaaatcaacaggtgcgacatgcagggagactcgtgtcacgtgggaccgtgaaagcccagggtggaagtgaggtgagtgtggggcgcggggtacggtgtggagatggcatatggagctggattcatggtgaaatctgaccaggaatgcctgggtgctcaaatcctggcctctggtctgtctctccaatcccaatgacatcagaatcactatatttagcctaagtatggtcctaggtgctagcaggtacagaataaatgaaaaatggttgaatgactattttagttcatgaaattctaccacattatttgtgctatttaagttaaaagtactaggagtagagttaggcacagagtacaagaggcagtgaaacataatggttagggcatcatctatgggactagatacctaagtactataaccttcccgaagaaggttacatcatcagttcagcaaaccaacggcacatgtgcagactgcatactctgctcagtagaccagatactggcttcaccacttactgtgattttggacaagttacttaatctctttgagccatctatacactgggaattccgagagtgcctaactcataaggttaaaagagtttataggtataaagcacttaacccaatgccttgtaacaattcataataattgtttgtaattaccattaataataaatcacaaacaggttgggtatggtggctcatgcctgtaatcccagcaatttgggagcctgaggtgggagaattgcttcagcctagaagtttgagaccagcctgagtaacattgcgagacctcatctctatcaacaattaaaaaagtagccaggcatggtggcgcacacatgtagtcccagctacttgggaggctgaggtgggaggatcacatgagcccaggacttcgaggctgcagtgagctatgatcatgccactgagctcatgccatgccatgtcacccagcctgggtgacagagtgagaccctgtctctaaataaataaataataatactataagccacaaacatttattactaaaatttaaattatgattatttattgaccattatgattgaatcctcctagagctccaattcttaatgccctctctcccacgccaattgcaatcttttcctgatgtatctttttttcatttgagattcagatcactcagcaagtgtatttgttagctggtagaacataagttacatgataagtacctgcaaggagaattggaacaatcattcattgacctaaacatgatgctattccaaagccgagatagcccttcttcctcatttaaagtgcaattggattattgatgtgtaaaccagtatatctgtctggaattacgttctacagggctaaagaaatgatgatctgacctaggtgtgcactctggaagattcccatgaaaatctctccatgttttttgtttattggcacgtcagcttttcagaggcactgttcagccaaagggcatgtgtttttatgttctgaaaaattgtattaaccaacagtgtaaaacaacagaaaccggttgcaaagctttcacttttaaagagtttccaagcaccctgcccttttcctaaaggactcttttcccttttatggatgagcaccaggctccaagacagtgtaaatagagtttcctgttccagggaagtgctggctcctgcaggagcccaggggtcctttgggaaaagttgataggaactatgagctgtatgtgccctgaggcttaggagccagctgagccaggagggagggaaacacatttaacagcccctttgtgcagacttcagtcccagaagcacttctgggaaaataagtccagtgccatacacacagtccttgcaaagaatggcagggaagctggccgggctggagagagccattcccagattagaggcctaaatctttgacctggccactttgaggaacccagagatgtctgtaattcccacaattcagggatcctgtgcttcagatgagtgaggtttcaagaagcagaagaaaaccgattagatgttaactttggcccaatggcaaatatttttcagtgtggttagtgtttatgcactgaggacatgaaaattaatatctattcttctctcttggattttatcatcttcctgtgtttttaaatgataataataaaaagcattatttttgtggttgagttgatgggccgttcactttgataattttcttttgacttttgtgtgctttagaatctcatcagtggtggcaaggaaacaaaccagaaaagtacaatgaatacttttggacttattcattatgatattatgacaattatattattttgatgatagttaacatttactgaacacttgctatgtgctcagcagtgagttaagtcaatagtctccatccgtaaacaatcttgcatgaacttacaaattgtcagctaaattaatacaaagtatgtaaacgtacaaccatgctattatgttgtgtacatttatagagcataaacaaaaataaaaactaaaggagtgacataaataaacataaatatcagttcttatattttcttcttgcataagagcagattgtctactactggagtctcggcacccctgtttgaagaccactctgcaaatactgtccaaactattattaattccttgcccaagaccatgggttatctttgtgtgtctaccctgtaaccttactgacttctgtagcttttccatcagcacttccaggaagccacactatcatattagtgtattcctatttctgctgcttcttaatctaaatattagatgcacgtatttaaacagtgtgtccaaattttttacagacttatcatctaagatccttaaaacagtttgagtcaaatttgtagctttatcttctgatcagacataagaatctcagaatgagatttcctcctctgaagcttctttcttaatccagaaatgaagtctaagtatcagtcttgttttgggtatgggtaagattaagctcacaaacacagataaaattaagaaaatggttccatttagaatagcagcaaaagaaaaataaaatatttaggaataataaaagtggtgcaaaacatgtactcaactacaaaacactgttgaaagaattttttttttttttttgagatggagtcttgctctgtcacccaggctggagtgcagtgacgtaatcttggctcactgtaacctctatctcccaggttcaagtgattctcctgcctcagcctcccacgtagctgggattatagatgtgcgcaaccatgcccggctaatttttgtatttttagtagagacggggtttcaccatcttggccaggctggtctcgaactcctgacctcaaacgatccacctgcctcagcctcccaaagtgctgggattacaggcatgagccaccacacccggcctgaaagaaattttaaaagttctaaataaatgaaaattcatcccatgttcatggattggaagagttaatagtgttaagatgggaatactcttcaaattgatctacacatttaactcaattcctatcaaagtcccagctgacttatttccagaaactcacaaactgatcctaaaattcatgtggaaattcaaagaacagagaacagccaaaacaatcttagaaagaagagcaaagttggaggactcatactttctaattcccaaacataatataaagcaacagtaatcaagacagtatggtggtggcataaggatagacatatagatcaacaaacagagttgagagttcagaaataagctctaacatttatagtcagttgattttcaacaagtgtaccaggacaattcaatgggaaaagaatagtattttcaataaatgatgttggggaaactggatatccacatgccaatgaatgatgttgggacattacaatcatgccatataaaaaaattcaaaagtggccaggtgtggtggctcacatctgtaatctcagccctttgggaggctgaggtgggtggatcacctcaggtcgggagtttgagaccagcctgaccaacatggtgaaaccctgtctccactaaaaatacaaaattagccaggcatagtggcgcatgcctgtaatcccagacactcgggaagttgtggcaggagaactgcttgatcccaggaggcagaggctgtggtgagccgacatcacaccattgcactccagcctgggcaacaagagaggaactccatcaaaaaaaaaaaaaaatcaaaattgatcaaagatttaagggtaagggctaaaattaaaaagcacttagaagaaaatataacattataatcttggaataagcaataattcttttttatggcactaaaagcataagcagccaataagaaaaacaaataaattgaacttcatcaaaattaaaatattttgtacttcaaaggatactattaagatagtttactctcttaataataaataataataattattatttttatttagatggagttttgctcttgctgcccaggctggagtgcaatggcccaatttcggctcaccacaacctctgcctcccaggttcaagtgattctcctgcctcagcctcccaagtagctgagattacaggcacatgccaccgtgcctggctaattttgtatttttagtagagatggggtttctccatgttggtgaggctggtcttgaactcctgatcccaggtgatccacccgccttgtcctcccaaagtgctgggattacaggcgtgagccactgcatccagcccaataattaataattattattaattaataagtatgtgagccaattcacagaatgggaagaaatttgggcaaatcatatataatgtatttgtatctagaatatataaagaactattacaattaattttttaaaaggcaactcaattaaaaaaaacccacaaataccacaattaaaaaataggcaaaggattagaatagacatttctctgaagaaaatatacaagtgactaatacacacatgaaaagatgcttaacatcactagtaatcaggaaatgcaaatcaaaacaaaaatgagataccaactcacatccattaggatggatatcataaaaacaaaacaaaataaaaaacactaaataaggctgggcacagtggctcttgcctgtaatcccagcactttgggaggccgaggtgggtggatcatctgagaatgggagttcgagaaaagcctggccgacatggagaaaccctgtctctactaaaaatacaaaattagctaggcatggtggcacgcacctgtaatcccagctactcaggaggctgaggcaggagaatcgctcgaacccaggaggtggaggttgcggtgagccgagattgtgccattgcactccagcctgggcaacaagagcgaaactgtctcaaaaaaaaaaaaaaaaaaaaaagaaaaaaagaaagaaaataaccagtataggcgaggatgtggaaaaattggaacctttacgcattgctggtagaaatgtaaaatgatacaaccattgtataaaatagtatgatacttattgaaaaaataaacatagaattaccatatgatccagcaattccacttctgagaatatacctaaaagaagggaaagcagggatccagacaaatatctatacatccatggctgcattatctacaatagccaaacagtggaaggaatccaagtatctgcccattgatgggtgaatcaataaataaaatgaaaaggggtatatacgtataatggaatgttctccagccttaaaaagaaatgaaagtctgacacattctacaacatggatgaaccttgaagatgtgaaataattcagttatgaaagggcaaatattatatacttccacttatatgaaagtagtcacattcatagagacaaaatagaaaggtggttgcctggggctcggtagagaaaataataaagaattattgcttaacgggtgcagagtttcagcttgagaagatgcaaaaattttggagatggatggtggtgatggttgcacatcatcaggaatgtaagtaatgccacagaactgtagacttaaagatgattaaaatagtaaattttatgttatgtatattttactacaataaaggaatatattaaaatataataaaaagcaaattacccaatttaaaaacaaaggatctgaatagacatatctccagagaagatatacaagtggcctatatgtacatgaaaaattgctcactgttattagtcatcaggaaatgaacatcaatactgtcacgagatacctctttacatgcaccaggatggctgtgatcaagaagacagataaatgttaacgaggatgtggagaaattggaaacttcataccctactggtgggaatgtaaaatggtgcagccattttatttatttatttagttagttagttagctagttaattattttagagacagagtctcactctgtcactcaggatagagtgcactggtgcaatcatagctcactccagccttgaactcctaggctcaagcaatcctcctgcctcagccttccaagtagctgggactacaggcaacaccaccatgccgggctgatttttattttttatagaaacaaggtctcactatgttgcccaggctggtcttgaattcttgggctcaagcaatcctcccaccttatcctcccaaagtgctgagatttcaggaatcagtaaccatgcccggcccatgcagccgttttagaaaagagtctggaagttcctcaaatggttacatatagagttaccacaagatccactagttccactcctaggcatattctcaagaacagtaaaaacacatatccacacaaacttgcacataagtgctcatagcagcactgtaacagacaaaatggaaacaacccaaatggtcaccaactgatgaataaataaataaaacgtggtatacaaacagtgggatatttgcaataaagagaagtaaaatactgatacacactgaaacacggaggaaactttgatagcattatggtaagggaaagaagccagtcagaaaggactacatattgtatttttatatgaaatgtctagaataagcaaatctatagagacagaaagccgagtagtggttgcctagggctgggagagttggggaaactggtgtgacatcagggtttctttgggggttaataaaaatattctaaaacagattgtgataatatgtatgcaactctgtgagtagactagagaccacggaactgtccactctaaatggatgaattgtgtggtgtgtggattttaaaatagttttagaagaaagtaagcacaaaatgtttaatatatatttgtgggatgactaaagtacaaagatataaatatttatagaataatttcagaaaaattaattattgactctcatacccctctcatatatgtgaatataaacatgaaattggggctattctccttgatgttaaaagttggcctttggtagaagagagatcagctatcttcctctgtggaaaaaaatgatgacataggatttcactattcttttccttctcttttttaaaaacaaatttattgagttatgatttacacaccatacaatccatccattttaagtatacaattcaatgattttttgcaaatgtatacagttgcccaaatatcactacaattcagtgatagaacatttcatcaccccaaaacgttccctggggcccatttgcagtcagctcttgctcctaccctatacccatttagctgctttccgtctctgtacttcctctcttccttttttttagttcatacaaatgttatacaatatgcagtattttatgtctggcttctttcacttagcttaatgtttatgagattcatccatgctgttgcatgaattaacaggtctttcattttattgctgagtaatatttgtttttgtttctgtttttgtttttttgagacagtttcgctcttgtcacctaggctggagtgcagtggcactatcttggctcactgcaacctctgcttcccgggttcaaatgattctcctgcctcagcctcccatgtagctgggattacaggtgcctgccaccacacctggctaatttttgtatttttattagagatggggtttcaacatgttggccaggctgttcttgaactcctgacctcaggtgatccacctgcctcgacctcccaaagtgctgggattacaggcatgagccaccatgcccagccattgctgagtaatatttcatgggatggatatacacatttcatttactgattctagtagatggacatttggtgtgttttggactattatgactgaagctgcaatgaacatttatgtacaagcctgggtggatgtatgtttctcatttcttctgggctgagtttctgcattatacaggtatgtgtgagtttaactttcaaagaaactgtcaactgtttcccaaagtggctgcaccactttgtattttcaccaggtgtgtatgaggattgcagtttctccacatccttgtcaacactttgcactatcggtctgtttacctttagccatccatcccagtagatggatgctgatctaatcttttttttttttttttttttgagacagggtctcattctgttgcccaggctggagtgcagtggcacagtcatcactcactgcagccttgacctcccaggttcaagtgatcctcccacctcagcctcctgagtaactgggaatacaggcgtgcaccaccatgctcggctttttttgtatttttgtagagacagggtcttgttatattgcacaagctggtctcgaactcctgggctcaagtgatctgcccacctcagccttccaaagtgctgggattacaagcatgagccactgcctgatctagacttttaaacccaaatataaattacttctggattttgctgttgaatgggaaatgctgagtctcagagagggccacaggatgtgttgggtgttgccacgttcccggagcaccttgtactgagtgtgctctgggtggaggaggggagggagagctggggactctccaacatctcttctcctattttcagggaaaaaaagaaagccaaccttgagaagaagggcagtaagacactccgtaatgaatttaagaagaagcactgtaatactttttcattaaaaagcaatggaggccggctgcgatgcctcacgcctgtaatcccagcactttgggagcccgaggcaggtggatcacctgaggtcaggagtttgagaccagcttgcccaacatggagaaaccccatctctactaaaaatacaaaaaattagatggctgtggtgataagtgcctgtaatcccagctactcgggaggctgaggcaggagaatcccttgaacccgggaggcagaagttgcagtgagccaagattgtgccactatactccagcccaggtgagagtgagactccatctcaaaaaaagaaaaaagcactggaaatagtttgtagccttaaattctagttgcagctaagtccctaaatagcccaataagcatttttatcactcttgggcctcaggtatcttatgtgcagagacagattttcaaatatcatacttaagcatccttctaattccatacttaagcaaccttctaattctacttagaaagttcaagaatgtggctgatgtttctaagataagaggcagcatatgcagtgatattagactgttgaaaatgaatgtattttatttttatcttactattgatattgtagtcagaagatgcaagctgatatcttgctgatatgattaggggaaagggcatttacatgagtttcctaaattctatcacttggtgacacatttgttagtagtctttactcatccacgtggcatatgctatcatctatagcagtataacctgtgatattatgaaaggaataaaaatgcttatttaaaatattttcttatctgtgagatgaagatggattgcgataagtgggccaggcgcgatggctcacacctgtaattccagcactttgggaggccaaggcaggtggatcatctgaagtcaggagttcgagaccagcctggacacatgctgaaaacctgtctctactaaaaatacaaaaattagccatgtgtagtggtgggtgtctgtaatctcagcaactcgggagactgaggcaggataatctcttgaacctgggaggtggaggttgcagtgagccgatatcgtgccactgcactccagcctgggtgacagagcaagaatctatctcaaaaaaaaaaaaaaaaaaaagatacctaagtgggctgcttaaattttgtaccaggagatcaccaagtcaatcctaagccaaaagaacaaagctggaggcatcatgctacctgacttcaaactatactacaaggctacagtaaccaaaacagcatggtactggtaccaaaacagagatatagatcaatgaaacagaacagagccctcagaaataacgccgcatacctacaactatctgatctttgacaaacctgagaaaaacaagcaatggggaaaggattccctatttaataaatggtgctgggaaaactggctagccatatgtagaaagctgaaactggatcccttctttacaccttatacaaaaattaattcaagatggattaaagacttaaatgttagacctaaaaccataaaaaccctagaagaaaacctaggcattaccattcaggacacaggcatgggcaaggacttcatgtctaaaacaccaaaagcaatggcaacaaaagccaaaattgacaaatgggatctaattaaactaaagagcttctgcacagcaaaagaaactaccatcagagtgaacaggcaacctacaaaatgggagaaaattttcgcaacctactcatctgacaaagggataatatccagaatctacaatgaactcaaacaaatttacaagaaaaaaacaaacaaccccatcaaaaagtgggtgaaggacatgaacagacacttctcaaaagaagacatttatgcagccaaaaaacacatgaaaaaatgctcaccatcactggccataagagaaatgcaaatcaaaagcacaatgagataccatctcacaccagttagaatggcaatcattaaaaagtcaggaaacaacaggtgctggagaggatgtggagaaataggaacacttttacactgttggtgggactgtaaactagttcaaccattgtggaaatcagtgtggcgattcctcagggatctagaactagaaataccatttgacccagccatcccattactgggtatatacccaaaggactataaatcatgctgctataaagacacacgcacacgtatgtttattgttgcactattcacaatagcaaagacttggaaccaacccaaatgtccaacaatgatagactggattaagaaaatgtggcacatatacaccatggaatactatgcagccataaaaaatgatgagttcatgtcctttgtagggacatggatgaaattggaaatcatcattctcagtaaactatcgcaaggacaaaaaaccaaacaccgcatgttctcactcataggtgggaattgaacaatgagaacacatggacacaggaaggggaatatcacactctggggactgttgtagggtcggggggggtaagggatagcattaggagatatacctaatgctaaatgacgagttaatgggtgcagcacaccagcatggcacatgtatacatatgtaactaaactgcacattgtgcacatgtaccctaaaacttaaagtatagtaataataaaataaaataaaaatttcgtaccaggagaaaggtcagtccacaattacctgtcggttagcaatatgctttatgaattgggtatggagcatctaaaatagaattttgttttagaaaatagttatttttcacaactgcatattatttgtgttggctataatagatttgttattttaaatggataaataacagtacttaaaagtgttcaattttaatttctaatatgcttactatcgatagatgtgacccacataaacaaaagcatttgggtttctctgtaatttttagggtataaagagttctcagggccaagaggcttgaggcctgctggtctacatccccatcatctggacttcctcatctcccacacatttctcagccctttgctaatattgctgcttcttcttctactgctttcctgaagctctttgtggtaagattacctataaatgccaaatttcaaaatccaattcacatttttgtttcttaccttgtttgaacatctttaagcctcttacactgttgtctacacccttcataaaaatgtttctcccctgatgttgggacactagcactggcaccatctcctcctgcctccccactctccaatcctctttggctttctccttgcccttatatgctggttgtttctcagggttccaacctagattttctcctgttactgatctacgtattttccttggtgtgtctcattcaaatcattggcttcagttgcttccaatataccaatgatttccaaatctgcatttctttcctgggcttcatatccttatttcaaatatgtattcctgccaaagaagcatctcaaaaagagcatgtccaactgaaactcatgagctttttcttcctgaactcacatttacttgcatgctgcgtaggtcaataatattattattcatttatttggaaacaacaaaaaagaaaatcaaaaacaatagcttaaaaattttgtaaagctgttttttactcctcctgctccttgccccctgcccgtgccatgtagtaaatctccaactccaattctagctccaaaatatcttgtatgtacttcttgtttttcctcctgtctctgttgctcacactatcttttccctgagtgatcgcaactgtcctattgatcagcctcctgcacaccttctccccacccctcgtcagggtgatctttccagcatgcatatggcattgtcacttctggcagtcaacattcttccatgcttcctcctcacctgcaggatgaaattcatgctccttaagcaggcaaaggcacaggagtccttcattatttgatcctatggagtttcccactgagtgtcttgccattcctagtttctaccctgtttcccagccgtgctttatgatgggaccgtgcctgtgctcaggtggttttctctgtccaggatgtccataccctccattctgtgtgccccctcttagaggtcatctcctctttgagagcttccttctctctcagcccccaggcatttatttgctttatctagcaaattcccaaatcagttagaatcaggccttatcatatctccctgtactgtagatacatttacatctctaattccccacaaggctgtgtctcctctgtgctccacacactgtccaagcccactgacaggtgtgcaaatggattagtcagaactaacggggaggtcagaacagggatcttttactttctctttgaagcagctgcagagattaatttcttttcattgttaaatcaagatagaaatattaaattgcttcatcacggaaaaaaacgggttcaaaataaaaaatttggggatgtagatgaaatgaattttccctcacagagcgatcaagattgttccctgcagtctcgtcgttggcttcttcccatggattagcaatgtgggccaagatttagagaaaataagatatgctggaatgaaggcatttgggggaaaaaaaggaaaaccaggtaggttacttggaaagaaaagtaccaaaggagatgagggagatagaacaagaaaaggaaaaaaagattgtgggaaagaatgcacagaaacagtactaaagaatagtccatttgctgccaataaggggctacagggaaaaagaaatacaggaatgagaggaaaccctgacaggatgcagcttcacaattcttttcagagctcaagctcaggcagacttcttgatattgtctctaaagtgtgtgttcaccctgacgctcatgtccatgtagtttctctctctgaggcattccagggtcaaaaggtcagagctccagcattagaataggaaactgtcttttctggacggagtgccatcttagaaataaacctagccaatgcttcaatcatttgatgaaatagctccaataattatgagtttggtttaagacattgatgagatgtttattgaccccaattgttatatttaatttcttctatcttgtatagtatataggattttaataaaatctatgccaaatcttaacattcttcaatatcaaaagtcataaataactcttactcaaaaccatataagagatctaggctatagctagcaattgcttcagttaaagagtgatacagctataaatttaatcctaattttaaaattgcagcaaaacataaggattgaatttacaaatccctcattttttgcaaagatttctccagaattggaacttttgtttgtttagtcataaactacatgttgaatgaaattatccaaaatttcataagagtgttatgtggtaacactttataagtaaaatatgctttcttatttaacctcctggtaatgtttgcctggtattgaaagacaacaccatatctaattattttaaagtcagcagagtattaaaaaaactaaatattttgcaaagatagaacttataataaccttcattttcatttattatttttttttgtgtgtgagaaatagtcccactgttgcccaggctggagtgcagtggcacagtcttggctcactgcaacctccacctcctgggttcaagcaattcttgtgtctcagcctcccaagtagctgagattacaggcgtgcaacaccatgcccggctaatttttgtatttttagtagagatggggattaccatgttggtcagactggtctccaactcctgacctcaagtgatccacccacctgagcctcccaaagttctgggattacaggcttgagccactgcgcccagctataaccttcacgttcaaagcactctcccatctattattaaggcctctgagaaaatctcctttttatatatattctcaagtcagaattattagtctccatctttcatcttagtcttcttcaaataccaaactctttactaagcagttagacacaagtagtttcaccagttctatcactcaaatacggtttcataagttctgcctagtgattgcccatcagaggggatatggatttgtgggcaggaaatagaatagaaacctaactctaactcttctgtgaaatgtagtgtttaggttaatattcttccttaactgccatctgcttttttttgtttgtttaacactttgtccaaatctctcaaaccttacaccgcagaatcatggagtgttcaagcctgaagggaatggagagattgggccagctcctcttggatgcatcctgaaatcgaggaccagtcagaggcagggagtcgcccactatcaatcccgatcactaggaggagggctgaagaagagtggaactcgggtttcccagctcaagcccctccccatcggggcacatcacaccacctcttcccatgccacttaaaacagcgtgctgctgcatcccccaaagtccggaacacatttcagattcatcagccaatccagtttaagagaattggtgttggctccccttgttagaacagacagaacagaccactcgagaatcttttgtatttgttgacaaatataaatagagataaaagagaggaaagaggggagatgaacttgaagctgtacggcttaacattgaagccatgtggcgtaagcagttaaacacagggaccccgtctcacactgcctggttccctcctccagctgtgttgtctgctaatgactgtgtggccgcgggccagctgcttggtctctctagcctcagcttagggtttctgtgatggctatatgagctcaaggatttacaaggagtcctgttacatggtgagcacacaggtgttaactgttagggaaagagctcctttttattcagaggagcccgacataacttcacaggacttgaaggtgtcttatatagtcactcatctgcaaagacatgtggtcttttcagcacttctttctctctctaatgtggttctactaagctacccacatttaagatcccagccaggtcactcgggtgctgctaaattgtgtaattcagtgtgaccctaagagacccatataggaatggagctatgatttttttgttgttgttgttgagacggagtttcactcgttgcccaggctggagtgcaatggcacgatctcggcacaccacaacctccacctcccaggttcaagtgattctcctgcctcagcctccctagtagctgggattatagtcacgtgccaccacaaccagctaattttgtattttcagtagagacagggtttctccatgttggtcaggctggtctcaaactcccgacctcaggtgatctgccgcctcggcctcccaaagtgctgggattacaggcgtgagccatcgcacctggccagctatgatttgttttagggctgtccagagccaactcatctaccccacacagactgtcttgagaggaagacacatctgctccctaaaagcctaggggtaggagtatctcattcccgtcagcgttccacacatcccttagctgaacccaagaggttgattccaaccttcatgtcaatttcagacagacggacccaaggtcaagaaggaaaacactgaaattatccaaggatcttcgctttctctccatcccctgggagaacatttcaggtttattagacagtttgtctgttaacattattcacttgaaacaaaaccctgggtgtgtgccttttggagaactatgtaaatcaacaaagctatacatagaacagagcgattcgctcagcagccaagttccccacagatagcaggtggacagatcacgccgaggaaaggaagcgcagcctttccttatttttctagcattctaggcttagcagtcaatgcacatcctctatgctgttgttggctattcaaataaatattgacaaaaggtgactaattattacaaggtgttagtttgtatgatcacactgtaagtaatggtggagctcatttctgaaacattagtattatgtgtatttattattttggtcttaattttagaggtaatttagaaatggcatatcaaaaagtaatcaaatatttaaattcatagctagcaaaactaaaatatcatttatgtatactttgaaaaactctacattaccactgtggtttaattcaactcagagacatttaaaagcggagatgaacaggcatttgtgccatgctaatatctttctcacattttcttaatgctgttgcaattacctacggaaacacagaaagccatgtcccatctgcccagcacacgtcgcctcctgtttttcgtttctttacagtgacattcagcacttctctggttttccagacagttttcagttctgaagtaaaagttgtttcttaatttcttctcaggttgtgtgagggagtatctcataaatcctaggctgacccctttttggagatcaaaaacaaaacaagattgctatgaagacctggggtgaaattaagcctccagggttgtggctgttgtagtgtttcccccttttctaactccctctcccaaacctctccttccaggatgcgccacacagagtcttgatgcaggcccagtgtcttgtctactgccaaccaggggccagcttttgcatttgctttgatggtctattccagaatctttttttctttactttttttttttaatttaagaggcagagttggccagccgcggtagctcacatcggtaatcctaacactttgggaggccgaggcaggtggatcacctgaggtcaggagttcgagaccagcctggccaacatggtgaaaccccatctctactaaaaatataaaatcagccaggcctggtggtgcatgcctgtgatcccagctactagggaggctgaggcaggagaatcacttgaactgaggaggcggaggttgcagtgagccgagatcgtgccattgcactccagcctgggcaacaagagcaaaactccatctcaaaaaaaaaaaaaaaagagtcttgctctgtcatgcaggctggagtacagtggtgcgatctcagatcacttcagcctcgatctcctggattcaagcaatcttcccacttcagcctcccgagtagctagggctacaggcgtgtgtctccaggcccagctaatttttaatttttttgtggagacacagtcttgctttgttgcgcagcagtccttttgccttggcctcccaaagtgttggggttataagcgctagccaccgtgcccatcttttcctgaatcttcaggtgaaaatctgaagggaggaagtagggcaggcttcagactagcttcagtggtgacttgctcttcagggtctttggtcagatgaacctttccatgcagtgatgctcggggacctatacttgaagtgaggcagagcattttctggctctttaagcagaactgataaggacatgacttataaggacatggcattcccgaagccaaagatgtcccagctgcaacctgtgtcccagctgcagtccacttggctgcctggcaaatccatcttccttcatggctggccctgtctccacctccttatgagagagccccgctgctggctgtggttatttttacagatagtccactttcttagggaagacaaaggtttcctgataacgttttgatttagcaagtggatgtattctcactctctgaacatcctgaagtgtgtgcctgtcactcaccctgcaagactctaccaccaggcttcatcatgagaaaagcccctcctggccctgagggagccctagagcagggcagggcagggtctcttattgtgtacccacacactagcgatgtcactgcctgtcacttgtgtacacaaccttcatcccacgtgacttacgagctctcgagagtgggacatatgtctcctttgccatcctatcttctggcttagcagggtcccattcaaaatgcatgtgtgcccagcaacagggccataccctcaggtcctttccccagcttccgactgggagctgcagctacctgctcattagctgcattcagacatcaaacaggtagtgttaaaatcactggattctcctcccctccccagagctgctcctgctccggcgtccctagtcaacagtcattattcacatgattacctgagccttagacctggagtcacacttagctcctccatctccccagacactcccccctccacaatacagcttccacctttaatcagttacctaagtcctgccagcttcttatcattcaaatttatcaactgctctttatttgccttgacactcccttcatttcagcaatggtaatatgtcacctgaattaatataacagctcccaaatcagtgttcttgtccccactgcaactgcccttcatcataagaactgtttcttgcacatacattggtagcttcactgcttgctggaagttgctcagcagccttagtgtggtttcatgggccactgctgttttaccctgtctatcatccactcctcctacctctggtcacagtgcctgattttcacaagggcaactcccctttccacatcctccctccttttgctttgatccccgcccattcctctctacctctgataagccagctccaaggcagaaagagggatcatccccctggtgcagtgactgattcagggttggccattcatctccaccagccccacagaaaatcagtcttgggaactactggtcagcaagagttccttctgctgggtttgcaaaatgggagaatccgagcctggagctgctggtggccatctggacatgagggacttggcctgcaagagatgggccaacagcagagactgagcacagacttctgacatgtccaagcacttggatccaggcttgctcaaaccactgcacccccagtcttcagtttctgtttggatttatatttttaaacttgccaacaaaagagacttgactgctccagatacaagacccttggtgaccaggactctccctgtcttttggagggtccatgctttctcttaccgcccaactatggctcaagttacctccttttctgggatttccttttcttttctttgtttgaatatctcctattcatccttcaaatatttgctaacacttcaccacctctgagaagccttttctgacccccaccagactccttgatcattttaccttctcatagcacgtaacatattacatcctaatcacctctttatgtggggggactttctctagactacagcctccttaagactagtattatgttttatcattgttgtacctccaaaatcatatgtattcactcacatgtatgaaataagaaaattaacgctcaaaaagagacaaaagagaaattattaccttgatttgattaaaatacatttgtatgtacttggccatctgcacctgtggattcaaccaatcagggctcaaaaacattaggaaaaaaacaataaaaataacaatacaataaaaaatcaaacaaataaaaaacaatataagataaccactatttccatagtattgacattgtattaggtattataagtaatctagagatgatttaaagtatacaggagggtgtgcataggttatatggaaatagtacaccactttatatcagggacttgagcatccatggattttggtatccatgggggtcctggaaccaatccccaagggtacagagaagcaacaaaccatattttaaaatatcacttccttggctaaatcatagagaatggactggcgcaaggacaagtttggaagcctggagagtagttgcagtgatttaggcaagagacgatggcattatgaaccatggtagcgtgagtgggaatgaagagcaagggacagattcaagacactcaaaagagctaaaggtcaaatatcagggaaatgaggactacagagaaggaagaagtccaaatacctcataaggtgtcttcagatagggaaacacacaaggaggaagagttttggagtcagggaactttaaatctgattttttttttttcaatttaaaattgagatatggccaggcatggtggcatgtacctatggtcccagctacttcggaggctgaagcaggaggatcatttgagtccaggagttctgggctgtaatgcattgtgctaatcaggtgtccacactaagtttggcatcaatatggtgaccttctgggagcaggggatcaccaagttacctaagaggggtgaactggcccaggtcagaaatggagcaggtcaaaactcctgtgctgcagcctggtcaacatggtgaaactctgtctctactaaaaatacaaaaattagctgggcgtggtggcgggcacctgtaatcccagctacttgggagactgaggcaggagaaccgcttgaacccagaaggtggaggttgcagtgagaaaaggttgtgccattgcactccagcctgggcaacaagagtgaaactccgtttcaaaagaaaaaaaaacaaaagcaaacaaacaaaactcctgtgctaaacaatagtgggattgcacttgtgagtagccactgcactccagcctcagcaacatagtgagaccctgtctctaaaaataaataaataaataaataaaataaaacagaggtataatccacgtgtcataatattcacccttttaaaatatacaattcagtagtttttagtgtactcacaaggttttctaaccatcgccattatctaattccataacatttcatcacttttcaaaaagagacccaaactagccaggtacagtggctcatgcgtgcaatcccagcattttgggaggccgaggcgggtggatcacctaaggttgggagtatgagaccagcctgaccaatatggagaaatcccgtctctactaaaaaatacaaaaaattagccgggcgtggtggcacatgcctgtaatcccagctattcaggaaggctgaggaaggagaatcgcttgaacccaggaggcggaggttgcagtgagcccagatcatgccgtcgcattccagccgaggcaacaagagtgaaactccatcccccccacccaaaaaaaaccaaaaacaccaaaacaaaaaacccaaatccattagcagttactcctcattgctccatcacccagccttgggcagtgactaatctactttctatcttcacagatttgcttactctgggcctttcatataaagagaaccatatgctattgggtggttgtgtctggcttctttcactcagcatgttttcaagatttactcatgttatagcgtgtaccggtatttcaccatgttttatgactgaatatgattcaatcatataaatataccacaatttatttactcattcattagctgatgaacacttacttggcttgtttctacctttgggctattgtgaatagtgtttacaccaatagtggtgtaaaagtgttcttttacaccagaacactggtataaaagctattgtgtagacatgtatttcctattgtcttgggtatatacctagaactcgaaagctggattatatggcaactctgtgtttaactttttgtggaactaccagactgttttccaacgtggtggcaacattttagatttctaccagcaatttatgagagttccaattttttgacaaactcatcaacatttgttattaatatcttgtgttgttttgatacagcaatcctagtgaatgtggactggcatcttattgtcattttggtttgtatttccccagtaaataatgatgttaagcatattttcatgtgctttttggccctttatgtatcttctttggagaaatgtctatttaagtcatatgcccattttttaagagtgaaaacaaaattttattctaaaaatagaactcagtaaaacgaaataacaaaagataataaaaaggaagagaaaaggcatttttagatatttaaaatatctaaaaatcagatttttgtttaagtgaatgaagaactgaagatgccatcctagaattgtttttggggccaagttaaaaaaaaagtcaaccttattaatggtatgtagacaaagaggcagaagaatgtggaagcctctatctctgtttcctcctgactttgttcatagctgacattccttctgccccacacagagggctggccccagcacagctgccctggtcttggctgtgattgatacggatgctccaaagtcaacaggtgtgttctgatgtcagagttttttgtgtttcctttggatgcattccaagcctggatagagacgtgtctgcctgaaatggcttatctcttctacaagactgggtggctggaagatgcctgagaccatggtgccagagaattctccgttagagtatgtccttacaactcagtaagcttccagggctaagttccgtgttgtgtgatacacacggagtctatgatcacagggaaaccagctaaaacatttgattcaaaactttgaggccgggcgcagaggctcatacctgtaatctcaacactttgagaggctgaggtggttggatcacctgaggtcaggagttagagaccagcctggccaacatggtgaaaccctgtctctactaaaaatacaaaatttagctggaagtggtggtgggcgcctgtaatcccagctactagggaggctgaggcaggagaatgacttgaatccaggaggcagaggttgcagtgagctgagatagtgccacagcactccagcctgggcaacagagcaagactccgtctcaaaaaataaaaaataaataaactttggtccccagcaatatctaaaaattgtttttaataagaaataggcataacacatggttactcttcttccttgatttctaactaaatttatggtcaggtgattcatggagaattttaagtttgaatatattgttacttttaaacatagggtgcaaagcatgatatttagattgttcatattagaagaagctatcacaatgatcagtcaatttataatcattcaccagtcacaggggaagaagaaaatcctagatgcatcagaaaaataaattactaagacaattatagttataagatcttcatgctcattgaaattatttcatgggcttaattattaattcattgaagaaaactgtgttttcactagttaaagcttaatttaaattgtagatcatattaccttccttctccaagttattaaggaagatctttccaaagcaggaaaggatttttggtgtattgttaaaagtaaaaatatggtctatctatcaaactaactgggggaacttaagcatttttctcatgctctaaatggccatgctccatgctagctcaggatcctaataaacttccctcttccacatcaggaattatttgattgagttgctcaatgaaatcaactggttctcctttcattattataaccaaagtcttacattgttataataaatatcaaaattaggaatgtatttaaaggcgtgatttcataggctctggtccagagaactggactcttttccccgcatgtctgagccaaaatgaagcaagcccccacatacatgaattatggagaataaaactcagcaggacaggacattaacaaggatcagatcaaagggcattcactgagagtaagaggtgacataattcacagaataactacaggaaaaggaaatgttcttgacgattttagattaccttttatgagagagtcctggcagtttggaatatgtttcactaaaaggcaggccatacttccagatttctgatttataatattttttgagtgcaatcaatatctttgtctaagactgtccctatctgggctgcctttagaacaaatcaactgacacacaaagagtccctgctctccgggccccaacctccttcttgtacggatgggctcttcctaaatcaaaaaaccctgcctccttcagttctccagatttccttactcccagctcagctacccacaccccaagggaggggtgggtgataatccagctctggcaccctcctctcccctacatgagcctctctgcaatgaggcagcccaactcctctgatgggctgtcacaaaggtaattgaaaaggagcatcagggctcctgtccgcctccctcaccctccttgctggcagcatctaccacattcctgtggatgtgagtggaatcctggaccccgccatctcttaggtctccctgctctgtcaccaccagggccagagtgtgatagttgatgcctgctggacgcttggggattcctgagttctactttgttcagaaaaggtctgtgtccgctgatgtcttatcagctggcataagttggcaggtgaggttgaggattacctctgattgctgattctagagcaagtagaccctgtagtagaagagaagcccatccttgtcaagtggaggttgatgctcggactctgcagctagtttagaagcctagttaagggcttctcccatgatgaaaaccacagccctcgccgctggcgaaggaacaccagggtgaggttaccagcattccttcattgtatccttaccagggatattttttccagcctgcttccaccttgtatctccacaccatgtttttgtcttgtttagttttatttgcagatagggtctggctctgtcacccaggctggagtgcagtggcgtgatctcggctcactgcagcctctcgcctcctgggctcaagcggtcctcctgcctcagcctccaaagtagttgggaccacaagcacacaccatcacacttggctaattattctttctttcttttttattttttatttatttatttatttttttgtggggacgaggttttgccatgtcactcgggctggtctccaactcctggactcaagcaatccacctgcctcagcctcccaaagtgttgggattacaggtgtgagccactgcatggcccattccgtgtttttaattcacagacctggcccaggaggcatattccccactgtcacttcccctcggcccctccagggagggaaacccagcacccactcccattctatctaccgccctgagagctgttcagacaaagacaggcaatgagaagaaacaaacccagccttctctgtccatcctgtgaggcccggcaggcaacagggacaatgggaaagggaaggaattgctatgcgttaagaattcagtagtattttgtggccacattttcttcctctcttcttccaaactcctttatccttcaaacttaccaagttgatactgtacaattcctgacttgtattgtcttgagcaatgaagcaaggctgcagggagtccacagagaagctgctggagtgaatttccttatcgataattcttatcagctcaaatatgccactgctctctgacatagtttgaatgttttcagaatatgtcctttctttttagtcttatggtatcgttttttcttttctttcttttttttttttttttgagacagggttttgctcttgttgccccaggctggagtgcaatggcgcggtcttggctcacctcaacctccacctcctgggttcaagcaatgctcctgcctcagcctccagagtagctggaattacaggcaagcgccaccatgcccggctaattttgtatttttagtagaaacggggtttctccattttggtcaggctggtctcgaactcccaacttcaggtgatccacccaccttggcctcgaaaagtgctgggattacaggcgtgagccaccgtgcccggcccgtttttgttttgttttgtcttttaatatagaagagtaggtattaaatacgttttctttccagattattttggtttagtgagataactaaataatattcaaaaggaggaatttgatcagcatcatcttaaaagctatctgaaatctatttctaagccccagggtgccctgggctggtgagcctgcccagcctctgggggtggtatggactgaatgaccgcaggaaggaaagtgagtctgtgccctctgtaagcctctttgtggactttaaacagtacttgtggaccacctccctgggcgtgcttctttgtggagttactcattctcttggttgttatatttaccttgtgaacttcattccctctaaaaggtagctaaggatacagcagaatgacttgaagagtcaccatttagtaaatgtttggtttgacatctgccaagaaacaaattaacattgatgtcggcctgggtgcataggaagtaccaacactgatgagtgttgcggagaccttacttagttccaagtgctttatgtccagcattgcattgactcttattgcaaccttattaatagaatgagagcaccattattacctgctttaaaaatgagaggcttgcaaattaccgggtgtggtggtggcacctgtagtcctagctatgatgaggctgaggcaggagaatcacttgaacctggcaggtggacgttgcagtgagccgagacggcgccactgcactccagcctgggtgacagagcaagactccatctcaaaataaataaataaaaaataaaataaaaatgagagacttggagtgattcacttaaggtcacacataataagcagcaggaccaagacaagaaactagacctttaaacggtatgttacataaatgatacatatttttctttggatggctcctttccccatgagtttacaatgcatcatttactgaggacagaaggtaccgcaaatgagttcgtcctcaccagacatgatcttggtgctggagttatgggtagagggatggaaactgtcccgttcctcctacagtcaaagagctggcttcctcaggcaagaggctgaaatttgatttagctttgcaaacatggctcctccaggccctcaattttgactgccataacacacacagaaaatacaggagctgattctccccgctccccccgctcccctgggtcttactcttcttcactgttcagctcgtcctttgggtgttttcattcacccatattcctccaatcagttccctctctgggaagttagccagatttcattgctgtagtgagcactcaaagaaccgcatatgtaggatacttataaaattcatggcactgtgtgtggcagcaactgctttaatcctggagataagtcattcctcaacatctaggtgactatatcctgaggcactgggaagtaacttcctcaacactgaatagcaaaccagagttagaatgtgtacaagtccaccactccttatccacaattctaaaacccaagcagctctaaaaaccaccagcaaaacgtggcctgacctcatatgccgtggttgacggtctttaccttacttaatataatacaactcaagttgtgactcacagaacctgtgctcctcccccgttaatggataatggtcttgaaggtttcaagtttgtggtgagcctccaccctcatggtcatcctccactgtcggctcctccttctcataaatgtcagcagcttccagtgattggtggggtaggtgggggctataagtttctcacccaaatttgcaaatcttggaccacatcctgacaaatgcataaatgtttagcaagtaaatttcaaaattcataacttctgaacttttatgctcagggaaacccctccttcccttttttttttttttttgatacggagtcttactctgtcgcccaggctggagtgcagtgatgtgatctcagctcactgcaacctctgcctcccaggttcaagtgattctcctgcctcagtctcctgagtagctgggattacaggcgtgcaccatcacgcctggctaatatttgtatttttagtagagacggggtttccccatgttgaccaggctggtcttgaactcctgacctcaagtgatctgcccacctcagcctcccaaagtgctgggattacaggcgtgagccactgtacctggccccctctctgatcttcaaagagtacccgcatgagagttcactctgtgctgggtgcaattgtgttctgatgtgaggaccacatgagctgaatggatccttttgcagtccacacctgaaattgtaaaaataaacaaaataactaagaaacccctgacaatccaacactaaaaatcaaagttattttttcagcttatttgatagaaaacaatctgatactgagggttcgttataatttcattcatccactaagtgcgaatacttacatgttttgtgttgaagttttaatacatttgcttccagggtgtttcagacctctctgggttattaataactgcatggcgaatgcattttattctttttctacttggcccaaaggctctgaagaagggattaagatcctgtaatttgttcattcaagaacaaaaggcccatgtaatctttttagtcaccacttatcttgaacaccatgactttcaccaacaaaaaaattatttagcatactttattccaattagtgaatacattttttggtgtagagattagtagtttattgcctattagccattgctatggtaaagtttctgatacttgaaatgccagctaactacacttgctatttggctgaaatataatttgcatgaaataatcatcacatagtcactataatactctaagcaccaacattttaagaaatgtgaactatttgctatgaaattattttaaaattcctggccaggcacagtggctcacgcctgtaatcccagcactttgggaggccgaggtgagcggatcacgaggtcaagagttcgagaccagcctgaccaacattgtgaaaccccgtctctactaaaaatacaaaaattggccaggcgtggtggcatgtacgtgtaatcccagatactcaggaggctgaggcaggagaatcgcttgaacccaggaggtggaggttgcagtgagccgagatcacaccaccacactccagcctgggcaatagagcgagactctatcaaaaaaaaaaaaaaaaaaaaaaaaattccttagaaacctgcccatattttaaaatgaaaaggtttaaactgtattggaaaacctacaggagtatgatttcaaccaacagaaaagcattacaaacctccgcacccagtttctttttcattatctcctaactattaaagtggtgtcgcttggtgccactgcacgcaaacacaaatccaagcaggagactaaaactgtcagtggttgttaggagccggatatccacatgacttagaatgtatctatattgatatttttaaccaaccaaaatccaaacataaaattgcatagaaaatccatagatccccaagaatatgtctcagaattcctcaggcccatgaactctactctgaaaaacactaaacaattcctctgccattatatgtgaaatccaaagggagaactgaagactcaggctgatcccagaacaccgtaccatcttaagctagctaagcatatgaacttattcaatctacctatagttttcctgccttcaagcactcccctggactgtgataaaaatatatgtgtacttggcatgcaatggaatcctgccaagaagggcaactgtttcttataaatgctaaataaacctaaatttctaaaaattattggaaataaattcaaatgaaccaataaaatttttaaatgaaccagtaagtatattttaacggaactgagttcattgaaattttaaacacctagagtttattgctggggggaaaggatttgtgaagaaacttcatttattgcattatctgaatttattaaaaatattttgcttggccaggagcagtggctcctgcctgtaatcccggtactttggaaggcagaggcaggcgatcacctgaggtcaggtgttcaagactagcctagccaacatggtgaaaccccatctttactaaaaatacaaaaaaaattagccaggcatggtggtgcacgcctgtaatcccagctactcagaaggctgaggcagaagaatcacttgaacccaggaggcagaggttgcagtgaggcgagatcgtgccatagtgctccagcctgggtgacagagccagacttcgtctcaaaaaataaataaataaaataaatagaaaataaaaataaaaattttgctcatcctatccatgtattttcaatttagtaagtgtaaacatagtagatactttctgttgtagcatgtaaggcttgatattatttcaatgggggaggatttctagcttggtagtaaattgcattttacagaggacaaaaaaaaaaaaaagaatgcaagcattttaaccctcaccaaggatgctgaaaaactgatacagtttgctctgtttcagagaagcctggaaaaatttaacaaaactggagagatctaggactaaggagaggtttcagaggctctttggattgagcatttggcaggactctgggacaattcccatatcatcccaaatttatccaaagccaagaaatctataaaaaagagatcaccatactctcgagatgggttggaggtgaagggtcatttgttttgcagctttatcctgcgtattagacttctgtttcctagggaacagtaaatgatagcatgaggcttacttgtttaaatgcaatctctcaatggtgtaaggcaccataaataaaaatcaagttgacccaaaacacaatgctacttaatatgtaataatgttgtaatatatagatgtttaatgtaaaagatcagttttaaaattactcatttttcagtattaatgtgacaacaatcaataggatatatgtgagtatatatctatacaaagacatatgtatgtatataattataaatttaccagtgatgaagattgataactgttgtaataacacagaaaatacaaacaggctgggcgcagtggctcactcctgtaattccagcactctgggaggctgaggtgagaggatggcttgaaccagggaggtcaaggctgcagtgagccgtgatggcgccactgccctccagcctcggtgacagagtaagaccttgtcaaaaaaaaaaaaagaaagacaaaagaaaaaagaaagaaaatacatgcaaataattgtcctgttatcaagcatgtgtcttttgattggttcttgaacatctgtccggagtcagttgtatatgtttctctgctgtaaatgcatttttttcctctcaagacttaaagaaataacaacaacaacaaaaaccctccagtttacccggatactttttggtggctccaagaggatctgattgtgtccttgacctcaagggccacctgaagagtagtaagaaggccttttcttatgggatgttggagcaactcaaatctgtaaacttgtccctgttgctcagtttaattgaaagctgccttcatttattgccattttgaacatgactgaattgggatgagaagagagcgcatttcttcctgatcgttttgaatcttttttataagttgcttctcttttccacgggaagctatggttatgtatacggtgagcaaggtaaaaatgaataaaatcctgactaaatgtttagcgccacctattggtagtgaagtacatattgattcttggtgacagacattcccaccaaagagagcagaagtaattttaatgattctttttcttccagtgtatatgcctgtatgcatgctttattatgactattatatttaaatataaacatatacttaaattttggtaataatataaatatggaattcttctaggttatgatttgtattatttagcttcacaatacccttgaagtagaatatgcagtgatagtctacttttcaacagtaaaaagaaaattctaggctgggttcagtgactcatgcctgtaatcccagcactttgggaggttgaggcaggaggatggcttgagtcgaggagttcaagaccagcctgggcaacatagtgagaccttgtctctacaaaaaaaaaaaaaaaaaaaaagaaaaagaaaaaagaaaaaggaaaagaaaattctagagaacggggaagaaacaacaacatgacattgtcacatgttgtttgttatgtttgtcttgaaatacatattgtcacctatacacaaagtatcttgaatgtgctctatatcttttgaaaccgcctttaaaatggttttccacagaaatttgagtttgaaataatgatgttatttaaattcagttacttatctgtgctaagaatgaactggccacagatggtgctgagacaactggatttgcacatggaaaacaataaagttggactcctacctcataccataaatgacacttaaatcaaaatggatcaaatgcctaaacaaaatgtaatatataggccaggcatggtggctcatgcctgtaatcccaacactttgggaggccgagacaggaggattgcttgagtccaggagttcaggaccaacctgggcaaaataatgagaccttgtctccattactttttaaaaaagtaatatatgcatataatgggctattatttggccttaaaaaggaaggaaattatgacacatgctacaacatccatgaaccttgggggcatgctaaatgaaactggccaatcagaaaaagacaaagactgtagaattccatttataagaggtagtcaaattcatagagacaaaaagtagaatgctggctgccagggctgggggcggggagaaattcggattgttgttcagtggatacagttcccatttgggaaggtaaaaccattctggagatggatggtggcaatgtttgcacaacaatgtgaatacaatcaacactactgaattgtatacttaaaatggttaaggtagtaaatttattgtatgtgtgttttactataataaaaaagtaaaactttttaaatgtctcagactcctaaatgtaagaactaaaattaaaattcataatagaaaacataaatataaatcttcatgatcttggattaggcagtaagttcttagatctgacgccaaaagcagagacaatcaaagaaaaacagaacaaacacatttcatcaaaattaataagttttgtgtttccaaggaaatcattaggagagtgaaaaggcaactagggagaaatcatttgcaaatcgtatatctcataaggaacttgtatctaaaacataaaaataacttttaaggctcaataataaaaagacaaacaactcaatttaaaatgggaaaagagtctgaacatttttccaaagaacgtacacaaatagccagtaagtacatgaaaagatgctcgatatcattagtcattagggaaatgcaaatcaaaaccacggtaggattctgactcatacccattcagatggctgtactaaaaaagatagataataccaagtactggcgagaatatggagaaattggaaccctcgtacatggttggtaggatttgtaaatggtgccgacactttggaaaacaatctgtcagctcctaaaatggttaaggttagttaccatatggtccagcaattccaccaaaaataattataaagataaaaaacttgtatacagatgttcatagcagcattattcatagtagtcaaaaagtggaaacaaacaatccacatgtctatcacctgatgaatggataaataaaatttggcatagcacacaatggaatataattcagccatagaaagaaatgaaatgctgatatatgctacaacacaaatgagctttgaaaacattgcactaagagaagccagtcataaaagaccacatatggtataactccatatgtgttatatgtgaaatgtctcaaataggcaaaactatagagatatgaaatttctgtgaaatgtctcaaatagacaaaactatagagatatgaaatagggtagttctttctttgggccatatctggggggataaactgctaaaagtttcttatggggtcacgaaaacatttaaaaattaatggtgatgatggttccagatatctcaatatactagaaatcactgaatttgtacacttttaaagaatgaattttatatgtaacatcttaaaaagatgttaatgggtcagcactagatccaccattgtcaacttgtgacattgatttaaaaataccttcagaatgagcaagactagaaaaagagatatgagatgtgaatcatatagaaggatgtgaaacatccttcatggtattaaggaatataaaactatttatatttagatttaatgaatgtgagtattacagtgctttatttacagcaaataatttccactaaaattaaagagacattggtcttatcattccttatctctatactcttttcagcaaacaatatgaacaagcatcttaaacctagaaattgtcccccagctatgacaattgctctccttcctggaactgcctttcctatatgttaatttcctcagtgcaaaagctgttattttcattcagaatgttaaagatacccctaggaaaagtcattttaaaagtcttgattttcacagccttcttctgcattagaagcttaagagatatcctagggctagtcttcactccaggttttaggagcaatctaggtaagaatctgcagaagctaggtgaaaatgcagatccatggaagctatttcaaacctatcacatccttccccaggtaatttttatactaatatatgctagaatgcgataaggttaaaaatattctacttctccactttatcagagaggtgggagttttgaaatctcattgccatgcaaagaactacggcccagaatgtgataaatgaaaggcacctaagagtcatgtagggcagtccttttattctgtgaaggaagaaacaagatgattaggccaaagccacacagatattagctgcacaaccagcacaagattgagcacgagatggggctcgggtgttgtgacgtccagcgcagtttcttcagctcagttagggcagaattaggttgattgggcaccattgaagtacatgctacatccatccaccattagatgaaacctctaattttagttctgcttattattttttattttatatattttttatattttatattatatttattttattttggtttattttatttaattttactattattttttaagacaggatcttgtgctgtcactcaagctggagtgcagtggcgcaatcacaactcactgcagcctcgaactcttgggttcacgaagtcctcccacctcaaccccccagtagctgggaccacaggcacgcaaccaccatgcctgacaaattttttaatttgtaaacgtttttgtagagatagggtctcaccatgctgcccaagctgcaattttagttctatataaatagggtagcccagggaaaagagaggggagctaccatggggaaggggttactgtggatatgatttttaaaattttctctgctacagctcttccacgtttacccacataaatttgaagtttaatttttagtctctagaaagcattttgtgatgtcttttaaaatattatgtatgtattaagaaagcttgcatccatatgtgtagaactatttccttttctttttgggcacccgtggctctctattaatattaagaatttcttagatgttgcaattcttcaaggaaacaatttcagaagatagtttcttttcctcccttcccttcccttgcccacatttctctctctttttacttccagttctggaaattggccagcagaattatttatggctcttagttcccatcacaccttaataataaacagaaggagttttcctttgttttaaaatttcaacagtacagtagttaaaaattggcttccatcagaaaactctttctccaagtctaatttgctatgccatgtatatacatgattaaccagtacaatacgtacagcaaagaaaccaggtgagagatttattgattctggctgaaacaaattgaaaagtaaccttgaacactttgtgaagtccataattgagttccacaaatcaactttggagccagtttagcatgtccatttagttgaggcaaagagcctgtgtttgatctaacttaataaagtaattccagtgtaaaaaggtaggtcaaaatgactaccttctaaaattcaaagttccttttttcatgagagaaattatatttatttcaaacagaactaatgatactgtatttggtacaatatgttattttcttagatatcttaggggtaccttctactaactaatactttgggataggcttctgggattcatgagtgtcaccaagttcagagctgatcttaagcaaaactgaatggcttggcccttctagaaaattatcttgcctctgataactcaaaattcaaattgagattgtaaactataacatagaagtatttagtgtaggtgatattatagaacaggtatctgttctactgatagtcaccccatttgagttaaatatgctatgtgacaatattaagaagctatgtcttctgaaattgtgtaaactttaaaaaatatatgaaaaattagaatactatacaaaacaataattattaaaccttctcccactttctgggatatccaagtctaatttgctatgaattataattattaaaccttcttccactttctgggatatccaagtctaatttgctatgccatgagagtggcatgctgcccaagctgcaattttagttctatataaatagggtaatccagggaaatcagaaatgcagagtgtgtttataagcacatgtgaataattacaatagcagacacacaattttaaattcaaatttgttgttgttttttgttggttttgtttcttgtttgggaaccacaaaataagcctgtctttctttggatcttaaaatttattcacaatgttttcatgttttatattaggaattatctggttctacagaagtagagaattccattcctacgggaatatcagaaggaggttaaagtgggcacaggtaaatcatccatttggctatcaaaaagtctgattctgaccaggcgcagtggctcacgcctataatcccaccactttgacaggccgaggcgggcagatgacctgatgtcaggagtcgagaccagcctggccaagatggtgaagccccgtctctactaaaaatacaaaaattagctgggcgtggaggcgggcacctgtaatcccagctacttgggaggctgaggcaggagaatcacttgaatccgggaggcggaggttgcagtgagaggagattgcgccactgcactccagcccgggcgacagagtgagactccgtctcaaaaaaaaaaaaaaaaaaaaaaaaaaaaaggctgactcttttttctggtcccaaataaaaatgactaacttcttcaaaatatagggtaataaaataccctgaaatgagtaaaagttattcattctgactataatacactttgttttggtagaaaaaaaatcttcataaatttaaaaactgaataataagcccttggttaatcatttaacattagaactcctattttctcttctagcaaatgtttccaaacagaaaaacgaccacaatcaattttagaaaacatgtttcccctttgaggaaggaaggacaaataagatgtttaaactgcagttggtaaaatcatttgctaaccctctgcgtggtaatgatgccacatcacctgcactttgctgtcttgatccatgctgaagtgatatgttcttggacccaagcagaactctctagcgatttgcatgttttgtcatattgtcacagacactcatggttaaataaaaacaatctggttagtataaagctcaatttgcagagaaataactattctctgtgtcagagtccacaggcaccagaagaaaacattttcacacagaacatggctatgtgccttttaaatccatttgcaaaattgtttcatttcttatgtaaaaaggtggaatattgactactgataaaaatttcctcctacacaaatatttttcaggttcatccaatcccacccttactcaatatagtggaacatgaagctaaattcatctggaatacttcactaactcccaaaatgaacaagggagtggaaagttgataaaaaatactagcccatacataatcagggaaacaagggttgtatgttaagtggattttcttccatccgtgtgattacctgaatgtcatttttaacttgggtaacttaaggtaaacttatctctctaagttcatcaatattcctgcacaaaccttcattgccatttaattttaataaaactgagaaagagagagtgaaaactcatgttacccattccaggcaggaagatgggaagaaaggaagcatgccattcagaattctgaattgatttgtacaatgtcttaggcaaaagctcttccagaaatatctatgaattcacgttgaacataagacacaaaattacagataaaggttaaaatcaaacttgtcagatgttaacattatcctgactactcataaattgattcatttatgtgctagaacatttttctactacccaccctggaggaggagagaatccatttactgggaatgtggaatgtgcttcgtccgggaggggaggggaaagaaagaatcttgactggtgctatgtaaagtggctgcacctttcaaccagttttcaatttcaaacaagacttttaatatctatgtcttttgattgtttctgacttttaatttttgaaataactgctttattaagatataatttagataccaatttcctcatctaacgtgtacagttcactgatttcttggtatattcagacttgtgtaatcatcaccataatcaagtttataacattttcatcaccccaaaaagaaccacacaccttttagccatcacccctcaacgcttttttttatcctttagccctaagcaactcataagtctacagatttgcctattttgaacatttcatataaatggaatcaggcaatttgtggtcctttgtgatgggcttctttcagttagcataatgtttttaaggtttcgtgtttaaataattttttaaaatttgggaatcttttcaaatttacaaaagagtggctaaaaaacattgtacggaaaacctccatttatcccttatctagattcatggtattgttaatcatgtttctaaaggtttttaatgtctgttgttatagcaataaaacattcaaaatggttatatttataaaagagtggtctgcaaatgcttataaataatttggattgtcatttggaacattctgaaaatgacatggaactcagggctatgaaaatccactggtagatgtgtagttgatgtaggcagattgaatttccatatgtgcctggcattattaaccatacagtcatacagtcgtgtaccacaggaacctttagtcaacgacagacttcatatatgactgcagccccataagatgataatgccatatttttacagtatttttcctgtgtttagatatgcatagttacacaaatacatttgtgcatgtaatactacattataattgcctacagtattcagtacagtaacatgctaggcagccaggagcaataggttataccacatagactaggtgtgtagtaggtgacaccatctaggtttgtgtaagtgcactttaggatgttttcacaaagaccaaatcgcctaaggaagcatttctcggaacacatccccattgttaagtgacagaagaccatacaagaaaactcaagattctcacaatcaaaatgaacatgtaggaaacagggcttaagaaggtcatagggctgggtgcagtggctcatgcctgtaattccagcacttttggaggctgaggcaggtggatcacttgaggtcaggagttcgagaccagcctggccaagatggtgaaaccccgtctctactaaaaatacaaaaattagccaggcttggtggtgggcatctgtaatccaagctactcagaaggctgaggcaggagaattgattgaacccgggaagcagaggttgcggtgagccaagattgcaccattgtactccagcctgggtgacaagagtaaaactccgtctcaaaaaaaaaaaaaaaaaaaaacaaaactcatagggataccaagtccttttccatcattcttaatcaactggaattacaaccaattagtatttattaagcacctaataatttgtgtcaaaaagttgtacaaagaggtaaggagtaagtataaagaagaataaaacaaggtggtcagttttaacaagatgatctacattgtgacctgaactctgtcagcaaaattaggacaaaatagctatgaaagatataaaaaattaattctttctgggagtaagacactactggaatcacaaaagaagatgtactcaacaaagcttcaagtcataatttttttttccttctgacattaaagattaccaaggctctagctctcttatggaaaaaagtaataagatgaagttaaggggatcttttccttagaagttttattatttacaaataatgaggggactaagaacctagttgttgttgttgactttttaggaataatagtactcgggcaccttgaatttaagcttagcataattatagttttaatctatgttgcaacagttctatggaatatcattaatcttttaccacttttaatatattaaagcattgcatcccagtcttggctagggaacataatttaatctgtattcaagcttggggtgcttgaatacagatacccagggttctctgcagatccccttaggagaacctctgtcaaaaaaagtttggaaaactctttgaaggacactcctttaggagtttatcagctaaatgtaggatgctctgggttactatattcattattgacacctagtttatggacatagaaagtatcctcactaaaatatttaataagaagcatgttctactgtctttgaaccaagacagagtgctcttagtaatcaaggtcaactgagctgggtgcagtggctcatgcctataatcccagcactttggaaggccgaggtaggtggatcacttgaagtcaggagtttgagaccagcctggccaacatggcgagacaccgtctctactgacaatacaaaaattagctgggtatggtggcaggtgccggtaatctcagctactcaggaggctgaagcaggagaatcgcttgaacctaggaggtggaggttgcagagagccgagattgcgccactgcactccagcctgggtgacagaacgagactctgtctcaaaaaaaacaaaaagtgaactggagtccttcgagcattggataaatactacagtggctaataatttccctctttacatgtgtaaaaccatgttagcagtttgggacacagagggcacaaactatggaatgagaagattcaattcttcctcttgtgtgaccctgggggagccatttcatccttttgaacctcattttctcttgtagaaaaaaaatgaaaagagtaagaatatctaactggtagggtaattttgatgatgaaattgaagtatgtatataaaagtactgtacacactgtcattattattttattttgtaaaacaataatttttccacattcttgtcctttagaaagcagtgccaactattgtaacaacttttttctttacgaagctacataccattttaaatatattgtgcaagtctattatatctgaaaataaatctacaaaagaaataattttccccttttgtgtactattctgtactatagcaattttgaccctttcacaattttggatctcctccatacagaaagttcccactctaaaagacttgaagatgtttgtggatgcctgggttagagaaaatgtacagatatataaaataataaaataaaataatttgaattcaaaaaagctatttataaagaaatgtaacatgcaaggaatatggctacccaatttaagcatcttcgagagtacagctatttgcaatttagaatgaaaggaattgaggataaacagttcaagtgtctgcctggaaaatacaatggcacatcaaataataattttaagtcctctgtctgaacaaaggctttagtatggtaataagtagtacaaagcaatcaatgtttcatatattataatttttcacatatggaaacttgcaactacagctctctgttggctgcatgtggtggaaacaaaaggaagatgggaatttaagggactccaagtgtatttataaagtcagaagttacactgagttggaggatagggtggaaggcatgacttgaaatatctaggtgaggagagtttggacaaaaacgctgatcccattagaaagccaaatggcacctcccaggtgtggagcaggcctgtcgcatctcacaggcggaacagcgggcacagccgaggggacgcccactctaaagagggtgaagaactaaaccccttagtttgggcttctgccaccagatcccctggattgactattagaaacttcacttctatttctccatcagtaaaacagaaaaagaaatattcgatgggtaggagtagctatggttaataaaataggtttaaatatttggcaacagaagaaagaattcaaatctgtgattgagaagcaggtcactggaaggttaagttaacctgaaaactccaattccccctttcctcatcactgcgtagtttgcttttcagtcgtttcactcagtctgcacctacactaaatcccagcagcgaagttgaaggcattcacgtctccactcaccaaggtccctggatctgaatggccaggcaaataacctagctgtgcgatagcgaatgcagtcaatatatggcatagtgttcatctggtgcttacgagtgatagaagtttttatctaatttcacttttataatcagtttgaggtctcattatttttcctttttttaaaaaataaggaccagtaacataaaatggcaaaaaaaaaaaaaaaaaaaaaaaaaagggctgctgttttaaggccccctgtgaactgtttgtatcccacctgcaggggaagtacagaaactgcaagtaagcaggttgggaatttgggagcaatttgaatggaatctgacacctgctgaaatctagaataaaaaaatgtgtattttgtatgcctttattttattcttctagtgatttatttttaatgtatgttaaaagtactactgtgtgacagattggaaataaaggaaaaacctgattcctctccacaggtaatcagtgagaacattgaattttgatgggcatttcaatgactgagttattttctccatagaaagagtgacacaagtgaggggtgagggggtggggagggagccctgtcttcagatctcccgttgtttgacttgggcgtaaggaactttctgagtcaacctgcaggtggcttggcagggattccttcttcccagctcctggctccaggtgatagctgtggtctcatctcctcagcaaacaccttcaaagagctcacagcagatatgcagtgggcagggagattggctttctccaaacacaggggagattgtggagggggagcaggtgaaaatcatattgttaatcacaaacaaacataattaaccggcaactggattaagatacctaatcagtcaaaattatttagaggctcttataaccatcacccttcttttggaagttcctgcttgctctgtgagataatgctctgttaatgaaatacatgtccataggggtcccctgaaggggacattcctcctcttaaagtgacataatgaggcttcaataaaatctctaagggggaagagtgttttaaagaacaagaggagacgtgaaaatgtgtggtcaaggactaaccaagagtcaaatgcttgcccagctttggtccctctgtgggctttaaagaaatccttcagtaaggctcagtctcaggtgatctttcattcattcaacaaatcttgcggagttcccacgatgggccagtcgccagcagttctgggcatggggggctgggtacagcaatgaacaacacaggtaacacccctgagagctagcattctaatgggcagggggtagacaatacaaataaatatagaacataatgactgctagtaatgagtgctttaaaaaattataaagcagagaacagtgtgtcacaagtttgtggaggaggtgggggacagtaacgattctaggtaggatgtctctctgagtaggtgtcgctgaatgaggggactgtagttccaggcataggcaagagaatatgagtttcgagcaaaaaggagcttggcatgttctgggaatggccagaagccagttgactagaacactgtgatgaaggcagagtcatgaaggatgggagtagaaggataggaatgagccactttggctgggcgcagtggctcatgcctgtaatcccagcactttgggaggccgaggcaggcagatcacttgaggtcaggagttcgagaccagcctgaccaacatagtgaaactctgtctctactaaaaataacaaaattagccgggcttggtggcgaatgcctgtaataccagctacttgggaggctgaggcagaagaatcacttgaacccaggaggtggaggttgcggtgagctgagatcatgccactgcactacagcctgggcaatagagtgagactccatctcaaaaaaaaaaaaaaattagatggtcatggtggtgggtgcctgtaatcccagctacttgggagcctgaggaaggagaactgcttgaacctggaaggcggaggttgcagtgagccaagatcgtgctgcactccagcctaggagacagagcaagactctgtctcaaaaaaaaaagaaagaaccagttcatatgggaccttgtaggtcaccagcatggataggatatttacataggattaaatcaaaattgatgattgtgatgttatgcatgtacacaagaaagtgcaaggagcattcactaataaaatgtacctaaatcaaatgctaggcaaaaggttaaaaagtagctataagttaaccatctttataaatatgccattataattcatgtgttaaacagcataaaatatgtactggcaaaatcaaattagcataggccctccaactgttgaagacttagactgctcaagaattaaagcttcaattcgaacaaccaccctaaaactgagttgacatgttaggtatttgtggatcacactacatacaatgaccaaaccagttagtcatatacatatgattgctatttgttaaatcattcatgctcagagtctttgcttaaccagaggctgccccttctggctctgggatgtcctatcatcaccttttctgtagacacgaccctgtcagattttcctcctttagtcctggaaagggagaaaagatttgccaagaagagaagagcctgtttacgtgccctaggtcatccactgcagctaacttttggggtatctgtttgttttgttttttgaggcagggtctcgctctgttgcccaggctggagtgcagtggtgcaatcatgactcactgcagccttaacctcctgggctcaagtgatccttccacctcagcctctcgagtagctaggactacaggtgtgcaccaccacgcctggataataaaaaaaaaaaaaattgtagagacaggcactcactatgttgcccaggctggtctcgagctcctagtctcaagcaatcctccctcttctgcctcccaaagtgctgggactataggcatgagccaccgtgcttgacccgtagctaaacttgtacctgcgcactgtcaggtttcctggggctgccagcagtgccgctcctgagctctctaagagaaagcaccacaccagggatgtagagttcagagagccactgagcctgctttggagacagaggggttgatcttcattttaatgtagttccactgaactttccctcttacactgaagatggaaatgactcatgggaattcaatcatgcaaagcagcagtataaattagattggccagcctctgcacttggggcaagtcatgcaatctggcttgttatgcattattttcttcatctacaatcatggagagtaatgtgtgtgtgggtgtggctgacagcagggaaaggcaatatatttatgaaatatttcctcaaagctgccacatattttattaacacatctggaaaatactatttaatgcttactcctctttcttccttagggtttgttttgttttgttttgtttttgagatgaaatcttgctctgtcacccaggctggagtgcagttgcacagtcttggctcactgcaacctccaactcccaggttcaagtgattctgctgcctcagcctcctgagtagctgggactacaggtatctgccacaacacccggctaatttttgtatttttagtagagatggggtttcaccatgttggcgaggctggtctcgaactcctgacctcgtgatctgcccacctccgcctcccaaagtgctgggattacaggagtaagccaccgcgcccggcccccttatggtttttaagaaaagaaatcctagttttgctttagccatgactaaaagccccagacgcaaagaatatttgtttgtttgtttgttttgttttttgttttttgagacagagtcttgctttgttgcccaggctggagtgcagtggcgtgatcttggctcactgcaacctccaactccccggttcaagagattctcgtgcctcagcctcccaagcagctgggactgcaggcacacaccaccaatattttagttcttaatggtacaatcttacagttttaaaacgatgagtgactgcattcaagacaaaccaaaattgtgccttgtttttaactgatgcctgaggaacgtgccagcaggtaaagggagtgaagacgaaaacatcaattagcttagagtttatggtcacactcgatacttaaaataatttttaaatagatttaaacaagtaattctttctttctttcgctttggggcatggaggaagcagggtgctgggcaaagcctgcacagaggcgctggcatgcctggaagccaaaaaaatgggggctgggagcgggcagtggtgtggccgggagcctgattacagtgagcacatatgtgcacatatggagagaaacaggagccaggtttctcactgtgggaaaagagatttacaaatacagcaaaggagcagtctagaaagaaccctaagatgttggattggaattggagactaacacaagatatatatatataaacacacacagaggtagatttagaaatagttatagatatgtatgtatgtggacacacacgtatacatacatgagcatacattatttcctagctctgtcttttgagggtgcctggaagcagggacagtacagtactgatgagaacccagatttccacttctaaatgccatcctccacaaaaagatgcccttgatccttggagaaatgcctggatctagggctaaatgaagggaaaattcaaaacgagcctggaatatcgtgttgtgctaaaaactatgaaaatggtcaaagggttataaggacatatcaaaagaatacaggagctagctcgaaaggcacctcactggccaaatctgtggcaactgcagcacccaaactattgatacaatctagggaataaaaagagaatcaattggccaggcatggtgtaatcacacctgtaatcccagcactttgggaggctgaggcgggcgaatcacctgaggtcaggagttcgagaccagcctggccaacatggtgaaaccctgtctgtaccaaaaatacaaaaatgttagctgggtgtggtggtgggcacctgtaatcccagctacttgggaggctgaggcaggagaatcacttgaacctgggaggcagaggttgcagtgagccaagaacatgccattgcactccagcctaggtgacaagaatgaaactccatctcaaaaaaaaaaaaaaaaaaagaaaggaatccacagagatacaaataaacaaacaaataaaagaagggagaacttccttacagtagaaggaatacatgccatttcattgtcagagttctcaacacaaagacacacacaaaattctcacttacaaaggggaaaaatagtgacctgaaggtagagaaactgggtagacaccaacttgatgaagtgaccagattagcatcaccagtgatgatgagacgtccgacggccttccttgtcataccctgatgggagcacaccaccatatcaacgattttcctacaaagaatgtgtgagtcaacatagacagaccagggtgtgggacattcttggcatgaaaggcctgcactctttaaaactataaaggttataagatagacagaaaaatatggaagacctttgataaataaatgtaacttgatcctgaattggatgttgggccagaaagagaaaagaggcattgttgaagcagcttgcaaaatttgaattgagtatgtggcttagatggtagtgacgtatggtagtaatgtcaatttcctaatttgtatggtatttgatggttttggggagagtgtccacattttaggggaatatacactggagtatttggagtaagtgatgagacattgtgccacagcttgctctcaaatgggtcagaaaaagactaatggcatgcatatatgcatatgatttaatatagaatatgtaacaatatatccatattacatatttatatagtatctatattaatatattatatactaatgtattctatgtttctattgttctgtgtatgtatatttagaaaagaagaatgagatggaacaaatgtgggaaaatgtttatttagatagagatggagcaaaagataaaatgctggtgaggcgcagtggctcacgcctgtaatcctagcactttggaaggtcaaggcaggtggatcacttgaggtcaggagttcgagactagcctggccaacatggtgaaaacctatctctactaaaaatataaaaattagcctggtgtggtggcgcaaacctgtaatcccggctactgaggaggctgaggcaggagaatcaagtgaacctgagaggtggaggttgcaatgagcccagatcacgccactgcactccagcctgtgcgacagtgagactccatctgaaaaaaaaagaaagctaacacagcagtctcagaaaaggtgatacagttctttgtgttattcttggaacttctctgcaagtttgacattatttcaaaataagtgattttaaaagaatatctgtgtatttatatagtggtataagtaacaaacactttcatttttagtggaatatgtagtatttcatatggaagatatttccatttttcaatactctctaggaattctggaacttggaaggaagggggtgagttatatagccctttttagcccctgtaaaaatgttatataaccagaaaatgtcaaaaagaaagagttatctattctctgtccaaattcccaaattctacttttagattagccactgaaataatcgattagctttactaacgtaatggaaacccagtaaatccatagtcattcctcataaaagtagaatctgcattcccctggatcaaaggtagggaccctctgtgcaataattaatttcaaataattttaaaaagggtttgctctataaaaaaatagcattccatttttacccaaagcagtatagtcttctttacagtccctgacttgcgttttatctcaatttgctatttttttctgtacagaaaattttctctaaatcattatatccctagacacacacacacacacacacacacacacacgcacacacagttttactcagcacttttactttacaaaggtgtctgtgatcatttttttcacttctttatctgacaaagatctgacattctccccttctttttttgggaaaattgagggtgaggacttgcaatttacctggtagcaagttattgaacaaccgagactagaatttagtcttttcactctacaacacaaagatctagcctaggttagtacatttgtgggttattcttcctttaaaatacttgataccagccacacttattgagattgtactctgcctctgtaagtctttaggagaagaatttaggcctacccatgtaaatacccatttgcaaagcatctctttgcattgcaaagatatactaatagaatattgaattctttgcaattgtatttttgcttgccggttgtaacagggttttagaaggttgacattcacaaaacaaagacttcttttaccaccagagtaaaaatgctcacattcaaatataactagaaaatgaacaataatttatagagaaatctctgaaagttttgctagtgtaagacaattttgattaaagtataacaatgttgttactagctatcatagatgttaacacatgatattatacattccatctagttgctataatgcatgtaccctcaacactgtggtagttttattttattttttctcacaatgttttcataagctaacatgcatttatttaatttaattttatttattaaatacctgtgtagaacttactatgtgcctggccctattataagtagtttatgaataattaattcatttcatcctcataaaactccctgaggtcattactattaccatcctccagttcacagatgaggtctaaagaagattaagcaacgtgtccaaggaatacaccactggtaaactgtagaactagaattccagcccaagcagttcaactccaaatatgtgttcataaccaatgtgtcatgctgtgccaagcctcagattcacagttgttggataattatttgtggattaaatgaacaaattactctcttgtctcttaggctgatttgaaagcattaagcaaattacccaattgttctgtaccttattttttcactttgtaaaacagaattgataatatttgccatccatttctcttccaaacaacaggaagaatggagagcatttactttacctacctgctgtatgtttttatgtctttaagactggatctgcagtgggtctagagtaggctaacagcttataccttaaacaggcaacaaaaccacaattcagtataattaagttgctttccatctgaatgagtgtgaagtagaggggcaaaagtttgagaacttcaacttccttacacatgagctttattcccatttaactctgaactgttctgtctttttttcagctgaatcagaatttgtttgtgtaaaataatagttaaatgaaatgttatctagggcttagattatatgatctaataaaaatatcaagttatagatcttctaaatgaaaatgctttcctcttacagcactgcatctctaatatttaaaaattatcaggacctagttagggataacactggaagtttctgtgccaagggtccttactccatctctgtctatccactgtctttattttgtccctgcgctttccattaggttctttattggctgtagacatggcatgaaaagaaattcaaaacaagacccactaatgttttgttttgttttttttagaaacaggatcttgctctcttgcccaggctggagtgcagtgatacagacatggctcattgcagcctccaactcctgaagacccactactgatagcagcaagggcagatagctggtccaagcactcttgtgtgcttttgagcaaatcatctgtcctttctcaatcttaatctcctcttctgaaaaatgaggctaataacaaaggctgcactgtctacctccagagctgtcaggagggtcagagaaattagtgaaactgctttgtaaactgtcctctaccattatgaagacgttaatactaaaggtcagtttcgaaaaattttccaaatatagacatttgcttttgcattatatccacatgcaaaattatccatttacattcttggcctggagctccaagtggaatcagttcagaaaagaaacagaatttgacttaatcctcaaaaaaggtggtatttcagatgctcaatgaatgtctggagactaaactcctggtgaatgagaaaaagaatatgacagacctgaagtcagatgaccacaggcctacacagatgtgtctgagatgagaacagtctttgctaaggtctacagaggtcattctcagtgcctttgctaaggtctacagaggtcattctcagtgccttgccttgtagggagatgaccttaggactccatccatgacagctgtaacagtatactgaagaatatattgaagaccagtgaattgcgtgggctctcaggacataaagatgaaatgtaccaaagaccctgtgttgttattaaagagtattgacagttttgcaaggtccaaaaagtggacagagaagaaaatttagttaacaggttaaccaaatactgactgcaaaggaatctagcaaggatccctaacattttctcttctgttcagaaactttggaagccaattcagataccctttcaaaatctgacatgtgtgtggctaaagttgtacaaaacagtgggtaatgagtgttgtcagaagtggcctgtcctatgccctatttaactttgatcacttccatgataacaaaatgcacaccttgccctaaccatctggcacaatccagccctgcttaccagggaaacttggcaagccagagttttcagggtggaaaggaaacctattatctctactagaaaaaaaaaatctcaaagcgcttgacctactgatgtcagcatcacctttacatgccaggaacaaattattacagaagaccatacctagaacacccagctggaagttaatgaatcagggaggaagactaatgacacggcacggtacattcctccgaggcagggaccgcgtctattctccttcgggtgggagtggaagtgctctgcgcacagtgggcacgctgctgataaggctgtctggtcaggtgaggacacaggtctccaaggaaagccctgccttctcctagggtgtggatggggaaagtgggagtaggagttcacctgcagcaccgagtgcatagaagctctgccgctattgaaatcccttttaaggctgaggggcagatctgaaaggggtgagcaagacagtactgtgtatgtgacgagtcctgggtgaggaacgggaccctctccctcattcccaacgccacctctccctggagtatgaggttccacagcccaggcaataaagggaagtagcccacacacctcaacccggggccacagttggaggtggggagatctaagaaacactccacggatgagtttctgaagagggaagtggaccgggaacagcgcatttcctgcttcgcctgtgcaaatcccaggcggggccaagcgggaacggggacacggtctaagagtcgcccgctgccagggaggggttggggggcagcctcgaggggacaccgcggaaccagggagggatgcgcatggagggagtgggagaaggcgtccaagtaaaatgcatgctccggtcatcgggggtaacgcgcgtccccaaatcccctctcgctgtcgccctttttttcagtcctcacggggagaggccggcgcagcagtggagcaccgcaggggctggatcggacccgcactgcagcatctgcagggctccgacctggtgcgggcctccaaggcagggggcgcgcggcggcacagccggtggccgcgattttccgggccactccttccccccttacactcccctcccgcccgcgaccttcgacctccatcctggacccacggggtactggcccggggacaaggaggagacgttaaaggtatcaaggggcgcggcaccgccgcctagacggcgccgggacgcgaggtgcgaatcggcggcgtccggctgcgctgccctacctgggaggtgcgggaccctcggccgcgctccaccgccgcgcgccacctcgtgctggcctccgggaggcagccgcccgcgcacgatttataaatgcaaaggccttattgttgttctttgttcagggataccattgtctagtcatccacgggcagcctggagttttcccagggtttgcggcgcgcactcccctcccccgcccccacagacttgctctccagcgccaacccggatctgcctaggtgcccacgggtccttcccgatcgacttgagtgtccttcctccagcccctgctttcccagcatcgaaaacacaaaagcctgccggaaatcacccagcctttgcctggtcactcaggggcccacggataagcgtggctctgattcctccaggtcagccccacggttcgccacctacccgagttaatttctgcgcccgctgaccaaaggccccaactggcaacgggcacagcttcttggtgcgctagtcgcttccttgcccagcctttagagcctcgggtccggcccaaggacccggggacgtgagcgcaattagtagccaggagccctgcgaccctggaccgtgcagtgctaacgcacccgaacggctatgcgagcggtgtactcggctcttacttgtgaaagttgtttcccccaaccccctgcgtaaatctcttgtgttgagaaaagcaaggcttgcaggaagccactccggatgtttgctgctttacatgtggcatctgtggctggctctgataacgtcccggggcaccacgtattaaagtgaagagactgaaatagaaggctccacacaccgcgcgcgggtcagcgacgtcgccgccctccacactgccccccgaaatataagacaagcgaatgatcagaagaaatgagatctaactaggtcacagtatgtaaaagggactagtcttggaaagccaccacaattcctcccctgtaaatttgtaaactgtgaatttatgatctcagggagggtgttataagaagtagggggaggggcgtcaaaatctgaagctcctactccaacctatgattgtgtactttcacctgatttctcttaccagaccaagatcagtccccaagaacaagggcaaataaaaatagggaaacccggccgggcgcggtggctcacgacggtaatcccagcactttgggagaccaaggcgggcggatcacctgaggtcaggagtttgagaccagcctgaccaatatgatgaaaccccgtctctactaaaaatacaaaaattagctaggcgtggtggcatgcgtctgtaatcccagctactcgggaggctgagacaggagaatcgcttgaatcggggaggcggaggttgcagcgagccgagatcgcgccattgcactccagcctgggcaacaagagggaaactctgtctcaataaatgaataagtaaataaatcaataaaatatggaaaccccacgttttcttccccatcattttctccaccttcttggctcccaagcgcacctctcccaataatgagctgggtgaggaagagcatgaggatgaagaaagtgtacagggctaaatctgtatatgtacattttttggactcacacctggattgtatttcctgtagtgttttttaaggaattagtcaaacagactagacagataaaaatgaattctggaccagatattgttttttaattttcaatgtttattctaggaaaactccttagctcataaaagatttagtgttaagagaaaattctgctttgagagctttgaaaaatatttattattatccagaaaagttagaaaagatctcaaaaaaaaaaaaaaaaaaaacagcaaaaaacaaggtactacggggttaatttgtagattgctctctctcctcctatagttttgttgcttatttaatcatttgcaatgtgcttttgctttatactgaagcccatttttttttcagaaaaaataaagctttaaaagtacatcatcatttaaatttgtctaaaatcaaccgctttcaaaactaccaactagaagtaacacctctctatgatttctttatgcagatttaattttttttcttgtttgaatcttagagacccaggaactagaaacactttcttaacttgtcccctagccaaggcttcacagatacttgcagaattaaagataagttggcttaaaacaattgtgtaagagttcttttgagaaaaagcaatgccagagaaactgaaggccaggagtttgcaaaagttttgtatttttatggatgccactaataagcaagactggacagacggtcttgttgttgtagtatcacactcaaagcagcagcattttacttctcagattccaggtgtaagctctacttttttatcacgccttcataataaagaaaatctgttctggagattcgtatattgatttctttgcaaagttatctctaattatgcaggaatggctgttagttgccctcaaaaaccaacacaaatacacaaacacaacagcctggcttagtgattattaagagctgcaagtctgaaggcggactgctgggtgtgaattccaccttctcaacgctgtagtctccagcaagttccttaacttctctgcctccgtttcctttcctgtaagatagagtctacctcagggttaatatgaggatatgcttctttgctaatgctggagggcgctaggaatagcagtggcaggctgtgtcatttctcagtgttgtataacggcttgttttaaaagtcccactgaaaactttttttttttccagatcgaaacacaagtttaatagtcattcagatttcattccagtctaaagaaacttatagaaatctaattatctgccagaataaccgctttaaactgactgtaagaaccacagttactttgcagctaaaacagattgttctcttcccccaaacaaactcggacatttagacaaatattgctgctgtctttacattttagaaatcagtattaaggctcacctgttactgaacacatacgagaaacagttttgttatgcgtatcttatatacatcatgtatacattttcgtactttcacatgatgtgtataataagatacacataaaaactggttggcttgtcatgagtaaatgctttattctttagagtgaaggaatattggatacagaacgtcgttccatatttaatcttgctttagaaaattaggatttatcttggacacagcattttgaatataacacaggcaagttgagtcctgggggaaaaattgtatttttaaatttattatcaacggtgtctttcgcatttgagaaaacacatttgaagatgcccatgcagttccttggaagtaaactaggtcacccaccactgaaacaccctcggcttctgcaaaaagatgtgctttaaagagaatagaatggacgctcggtatgttcatctaaacgaccttgggcaagtacgtcgattccaaggtacaatcagccctcccagacggcttttcgagtctccctaaccccggtgggagaggacgcggcgccagagcccagctccggctagttttcccgggggcaggtgtagccttgggcgcggggccgggggaggggcaaggggcgggcgtggggttggactgggacgtgggactcggaccacggcctgggcgtgggcctaacgacgcgggaccggcccgccctcgccgctccattggccacatctgtgcagaaaaggccccgcggcccaggggcgcccgcagtgtcactaggccggctgggggccctgggtacgctgtagaccagaccgcgacaggccagaacacgggcggcggcttcgggccgggagacccgcgcagccctcggggcaaatctcagtgcctcactccccaccccctcccccgggtcgggggaggcggcgcgtccggcggagggttgaggggagcggggcaggcctggagcgcc

SEQ ID NO: 39 - DNA, 72991 bp, Artificial sequence
  Sox17 GFP reporter BAC (RP11-47H10) downsteam region
caggtccctgatccgccccagcctgcaggccagaagcagtgttacacacttcctggaggagctaaggaaatcctcagactcctgggtttttgttgttgctgttgttgttttttaaaaggtgtgttggcatataatttatggtaatttattttgtctgccacttgaacagtttgggggggtgaggtttcatttaaaatttgttcagagatttgtttcccatagttggattgtcaaaaccctatttccaagttcaagttaactagctttgaatgtgtcccaaaacagcttcctccatttcctgaaagtttattgatcaaagaaatgttgtcctgggtgtgttttttcaatcttctaaaaaataaaatctggaatcctgcttttttgctctactagtacctctgtcacactagtcttatcaaaaaccagttcttaagatcaatgttaagtttattagttaatgtaaatttctcatcctcgaaaagggtgaacataaatgcctttaaggagtatatctaaaaataaacattaggatatctaagtttgatgtaattgtttcaggaaggaaaaaagaaaagcattctggaatgagcctacttcaagtaatcttagtttctaaaactaacagttaatattttcaattccagtatatcactttaagtagaaggggatgtccaagtaattttggttttctaactgttgaatcataagcttgacctgcccccagaggctttttggatgtttttatctgtgttttgccatctctttacactcctcgacattcagtttaccttaatcttcacatttttacaccttgggaagtggcaagcatcgctgggtttaagataaaggagtcacaaaaactaatcaaaataaaatttgcattatgacaacttttaatacactttagcattttatttgattggttttttttttttttgcttttagatttaatacatatacggacgattgcacagacttaggggagaatccatgaatggtttgtgtgtagtgtccctatctatcaccattactttatcaagaagaaacagttacagggttgtgagtaaaagatggggatcagcccctgtaatctgccatactaatcgctgtggcacgtctcaccacatttgagattgagacataaatggaaacaggtgacttataatgggcatttcctgtgccagatgtttgttcaatgccattctaaacagtgtgagcctcaacaaacctgcaggtttaggtgctatttttcctattttgtaagaaaaggaggcaccaggccttcccctgccatgtatatgaaggcttgtattacaagttcttttgacatatttctcacctgttttcctctgggccagtatgtattcatgggcactgggagaatttacattctgttgatgagaaaccatataattatccttagcagcaagtgctatagaaaaaggaaaggcttggaggatagcttccagcatttacatgggagagatgtctgagctgaaatgattggctggattctcttgaaaaagggcatggaatatgttttttagaagggattcctggaatgtgaaggatagacagttttagtgaggaaaggtaagtttattctgtcaggcataacaggctgcctttaaaaaggttaaattctttctcttagctcagatgggttgtttctgcttccagcctgagctccttctgcagggtgtcccaagagttcccagtagataaagtggacagaagggctaccagcccaagttcagggctgtgctcagattacacttggcattttcatcatagtcagcccaagaagactcagttttacccttggctgccatctcttaacgatattaagataagtacagaaaagaaaaagaaaaagagttcttaggggaaagatctaaagtcctgtaaattacatctttaactactcactaggcgcaggtggaaaagcagtaagagctaaaattgttaagttaatgttcatgcatttacatggatggagggattggtgttcacaaataattttttttgggtaagaagcatcaagccaattccttctctttcctcaagcacacagatcaagtgactgcaggtagcagctagtgattttttttaattcctaattttagtttttatgggtacatagtaggggtatatatttatggggtacatgagatgttttgatacagatatgcaatgtgtaataatcacattatgtaaaatggggtatttattccctgcagcatttatcctttgtgttacaatccaatgatactcttagttattttaaaatgtacaattaaattaatattggctatagtcactctgttgtgctatcaaatactaggtcttattccttctatgtttttttttttttggtagttttaaattaccaaaacatttggtatccttaaaccctttctcattttaaagtacagggatgtgggccctggtggcaaaattagaaatagagctttggggtccattacagaccattatagttttaaagtgaacgacagaatgtaaaacttctgcctaggtcgaacgactctatgtcatcaccaagtgaacagacctccccccaccaccaggtatgacatcgccaaatgcataaatcccctctgtgacattaccaagtgcctggatacccccatgacatcaccaaatacgcagacctctgtttcctcaagtagattcagatgaagtgaccacaggtaccagctagtgaatttttgagacaaaatattaaatctgtctcaagtttttactgttttattttggagacaaatacacataaaggatacattgcttttctacccatgtctaatttggtactttagaattacattaggaggtaagaatccagctcttttatgagctaagatagccagacttgatgccagtacagaatgtgcatgcctttgagacatccggagcaataaggaagaggttattttttcccccatgagaatactgactacatctctattaaagctaccaggtgggtctgataaattacagataaacttgtaaatgacttacacaagcagctaagagataatattgcaatgaaacaatttacttattattcttatcagtagattattgcctctttagtttgaatcacgctgcagaagatatcagcttgaatttgtactgatattaggaaaagcacatacaagccaaaggaattcagataaaatggaaagggtgcaatgaaccaaaagacatcatctcagcctaacattttaaaatgtcccatttcattttgtttttaatactgtgcctgtcacataataaatgttcaacattcccttcctcctcctgttcctctttgatttgttttgacaatagtggacagggagaagtattttacatccattatttcagcacaaatttatttttcctgcttacaaggtgcttccttctgggtctacaatattcatctgaagaaaaatggcactgatgttcctacccagtccccatctggagtaggctcaagttcctccacagggtgggctcctaatggagagagtatttctttaggtcctctggcctgggatccagcagcatctcagtttttcaccataacacctatccctaccctccttctaatgagaaggtggctgtgtgctttctctggaattaccaagcagctttatgggaataattcagtttgcaccatcctccatatacaaacactgaaccctcaccactgatatttttcccaggttggttcaagacactggaaactacaatgtcttagtgcagcacttagtacacgcaagtgctaagtaagttgttgtgataatcatgatgttctttaatgtaaaaatttctctgtagctaagattcaagaaaccatttggctaaatattttaaaaatctcttcttgctgaagaaattttagctttgacaatctttttttccacttgaatcgaagtcttaaaccttttgccaaagttgacttcctaacaagtattccccaaattgatgttgctccaaaagatgatcttgtgaggatactctctgtgtgcaggttcagataacaaaaaaaataaacatcagtagctgtgctgtggatcccagttctgtaagtcagtgccttcccataagcctgataacttgttaggcaagaaaaagaactgtggtgcgtgtgaagttaaacccagcagttttctgctcttggttaaggactgtctcattttcagtattacctgacgttaccggttgctcagaaaactgactgaataacttgctggaagcaacttgctgggaagccccaaggaaactcaagagttcctgctttgcctctcttttctattagaggcagtcacctggtgactattattcctttctcttgaataatgtgtttgaacacaaaaatttaaccccagactgtaaactactggagcaaggattagagaatagctctatgaataaagctagcagtgtctgtcctccgtaagaagaaaaatctctgcagtttgaatcagaggttcacctggcttggaaacttagctctgtgagtttggagacatcaccgaccatttctgcactccagccagcttatctgtaaaaagcaggggtgacggtaaaacattttgccaaagttgactctggataacggcgaaagcttcactgaactgttgtagggattagatgagattacgctgaagggagtgcttcagtgccacagaaagtgatctctctccctctctccggcttcctatcttttgattttatgtatctctctctatctcagctgacttggggaatttaatttcattcttccattgggaaagaaaaaacaacaggaactcgccttccccgggtgctttccttagtggaatgagaattttacagccctataagatggtctgtgtttgctggagacacagcatctgtgttttactttgtgctttggacagcttagtctctttgattataaaatgagaaaaaaataattgtcagttggagaactttgtatagaatgtcttaatacacaagaactcccatcctgcatgaaaatcttaagatctttataaaagggacagttaattgggacatactgaatgcgatatcaagtttgccaacatttatctttctgttagcccctcctcccaccagtatggtttctgaagtcctgaatcgatttccataccgtttactttttgagaactgaacagggtctgaattcttgaggaggaataagcagagtgtaatggggaaaaaggcaaattaagaaaagattctggcttccagtagttccaggtaatactgaaacgcgatccgcaggcttttaaatccctcagtcctcagaagttatttctgtgaactgatggatatggacggactgatagaagaaaattagtagacaccagcaaaatggaaggagcaattttatagctgccccctatatagtggatttttctgctttttaaaataaatatttgtttggacgtttgaatacaatagtaaggatcagaggtgcacacatgcgcaccaagaatattgacctgaaaaagcttactgagataacaggaaggaaaaatagaaaataaaaatttaggtttgtagtttcaataacgagactgtggatatagaaaacattattgttttattcatttaaaaataattttaaaaatgtaaatgatgcacacgcttacaacaactcaaacaacattgcagacgggcttgtaatataaacagagttgtcagaagtttccatctctccccagccccagtgccacaggtcagaatcaattccttttttcttccccctactgggcattacctacattaataattctgcttgtctagtggttaattaattaatgtacctgcatggctaattttaggcttatgagttttagacatttactttctgctacgacagctaagaatttcctgcccgctcttcctcggaatatagttacatccttatttccacttctgttaattgtcttttaaagtccaggactacatacccttttctagttccatcgcgaaggcgggaagtctcgattcctcactgggaaaggtgaggacatggatgcctccacccttccctgaagcactcctctcctcttctgcggaggtggatttttaaaaacagattggggttggggtgggggagggacagcacgcagaatattgatgcaaacgtcatatgaaaaaaaatacatataatatatatgtatgtatacctgcaaagtgctgttacatatacgtgtgtatattaacagcattatgaatcccagacaattggggccgcttaccgccgtggctgtgactttaaattcactcacttcttacatccactaggaaaagaggatttgtttccctaaagcctataaaaggggaaaggcttaggcgcagtggcagccccgttccccgcaccctcctgccctcgggtcccgggcgggctgcgggagttcctcctgcgcgggcgtctgaggcgctagaggtcaccggagcgcgctcccctcgccagggacctacactcttcccgctgctacattaggccgcattaacaaggatctggattcactttaatttaaaaggtaaaagatcttaggtctgatgggggagtgcggcgaggagagctcggaccgcgacgtcgcgcgcccgcttcgaggagttttgagctcttagcttggtgccggggcccgcccggcgctagatgaagtgctcgtttactcggcctaagccacggtgactcgaaggtgagaatgcaacttcgcggtgcaccggctcaggggcctgcctgccgcgccaaggcttcggaagttctcagcgggaccgctgggacaggctttcctctgagggaagaggaggggatttgtgcctctgcacgttctttcctgtggaggggaaaatcaaaccctgtagccgtccgctgccgggtagggatcgggcgatgctcggcgcccgagttctccgccgttgaggtggagcccggcggcgggagcttagattctctgtgggccacatggtctcagaagaggccccgcggcccgggggcgcccgcagtgtcgctggaccggcggcagcgctggccacgccgtgggctgggactggcccggaacgcgggtggcggttcggcctcggagacccgcgcagccgtcggagcatctccgtgcctcgctcaccaccttcttttcctccgcgtccggcggagggtttcggcgcgcggggcaggcctggagcgccgtgagcaggccggatgcgggatacgccagtgactaccagagccagacccggagcgcgctgccggcggtgacggctaggctgggcccctgtccttgggccgagttgccgagctccctcggggacttgaaggtgaagggcgaggcgccggccggggccgcgggccgagccaagggcgagtctcgcatccggcgccttccaggtggggcgaaggtcgagcgccagaggctggcgagggacccccgcccagcttgacgcccagctgcgcccgacgccgggggaggcggagcgcggggaacccgggcgccgggaaccccggacgtgggagggctgggcttctgcgcggggagacgccgggcttggcgaacatcctcaagaaccggtcggtggctctacctccgaaaactctttcgtgtttagcgattctcatatttagtgtttccctttagggagacttgaccggcaattgcagactcgtcttgggagctggagatgacattaaataaaaagttcaaaaccaaattgttaattatctccaggtataaacgataacacaaaattttgcagtcttgggagaaaggttttaatgtgccgcctaattaggccaggttctgcaaaaacgaaacagctctattccaagttaaaaagtatgcccctattccaagttaaaagaaaaaaaagttgtattccttgttcatttattgagtaaggaattgagagatgggtgctgagttattacagattctaactgctcgccacacatggagctagaaatacatttaacagcctttcaggaaaacgcctaaagctttagaatttcaagctagccaggttgcaatctagagctctagtttgttgctgaagtttgggagaggatggcctctacctgtgcacacatcgagttaattttccagagtcttttgaagttaatagggagcggcttttctgtttgtttattttttgacagggtatccttctgtcgcccaagctggagtgcagtggtgcatcgcagctcactgcaacctggacctcctgggcccaagcgatcctcctgcctctgtctcccaaagtgctgggattataggcatgtgccaccgcgcctggcctgttttttgcttttaagagaaggaataacatggccagagtttgtttgtttattttttgagatgacgtctagctctgtcgcccaggctggagtgcagtggcgcgatctcggctcattgcaacctctgcctcccgggttcaagcgattctcctgtcccagcctcccaagcagctgggattactggcgcgtgccaccactcctggctaattgtcttattttttagtagagacgtggtttcgctatgttggccagtctggtcttgaactcctgacttcaagtgatccacccgccttggcctcccaaagtgttggaattacaggcgttacccaccgcgccccgcctgttttttgcttttaagagaaggaataaaatggcccgagtttattttaatcaaaccagtgtaaaaccctttctattctgcattatagctttatttaaaacttatttcatagaaatgtaagcagcatatgaaaacagtttccctgctccagtcccaacttcagatattcagatatgtgtcctgtgttcccttgaacacattttctcttttcttttctttctttcctttatttcttttctttttctttctttctttctttctttttctttctttcttttttctctttctttctctctctttctttctttctttctctttctttctttctttcctctctttctcgctttctttttttctttttttgagatggagtctggctctgtcaccacgctggagtgcagtggtgcgatctccgctcactgcaacctccgtctcctgggttcaagcagttctacctcagcctcccgagtagctcggattacaggcgtccgccaccaggcccagctattttttgcatttttagtagagacgggatttcactacgttggccacgatggtctggaactcctgacctcaggcgatctgcccaactcggcctcccaaaattctgggattacaggcgtgagccaccgcgcccagccgcacacattttctatttacagtcatacagaggagtttctccccccaagcccccattgggatcgcattttcctactattctgaaacttgctttttcagtttagagtacacatttggcggtcttgtattcctagaagatggacttcgatttaccggttgatggtcttctccactcttccgtggggtcagccccacttgtcccgtctccagtccaatgtcagtttgtgacttaatcttttacatcgtgtacagtctgagccctcagaccccctcacacatgcacaaattgagtttatgcacagaacagatagtacctgtacttaaatgtagactcactggggagcacgtttcactccataagaaaaggggtaaaaattgtgcacaccataattgcaatattttacaagaccggtgctttctttatctcaggggtgctggcagagagaggtgcatagaaaactctgggtgggttatttcctcctggagcattgcccctccgttgcctgcttacctgggcaagtgctggtctgcgtggatggcttattggcacttccgggaccctcatgtcgtaaggctgagacctaagaagctgattctgtccaggaggtgagatctgccccgataatcgtaggctgatggggtcgctgctctggcgtcatagttaatgttaacttccactcacactgtgttcgtctgggtgataaaagtgtgtggggcgcctctttgcaggcttcctgtcctcttgggagatgtctgcgctttgtgagtttgggaaacaactgggtacccagcgaggtgggcgcaggaggaggagctgccttcctccgggaggcggcgcagcgcggggatcttgcgggaccaggccagagaccaggaccgtcccccaaccgttcgcggccgcgtagccctgggcggcctgggcctgcccttccccgcgcagggctttccctcctgccggtcgctgccccgcacatggctctggtcgtactcccgctccactgccaccactgcccacgccctgcgtccccgtttgaccgcgtggagccggaccccgccttcctcgccccgcgctgccccaggcctgccccgcaccagcagctaagcgcaggtctctactgcaagcccgcagccccctcatcgctgggcctactggcgacccccggcgccatgcgcgtgaactgtgggcgacgggctcgcccttggcgggcggcgcgcgcggtttccagatgcagccgccgcgccggggcagctgacgccgcctccaaagacgcgccctgctggacggcgctgaccccacgcagccagcggagtctcctgggaacagcccaggcgccggtgccgacttcaacctctctgctcaggcctcttgagttgcgttaccagcttaccatgtattactaagactgacagaatataggaaatattcctgtctttctcagaaggaactttccagtaaagacagcgtttaatactgttaacgtctcaaaggaggcagtgaaaaatgtgctcagcttaagcatatgcaaagtcagtctatttccattttctacttatgcacattatattttgcattaaagtttgatcattttaaaagtggaaaattaatgggcagtggcagaaacagcttttttcccccaaaagtaatcttcttccaactagttttaaacattttactaacaattattgagtatcttctacattttaagtcattattttaaagttcttggttattgacatgttgtaaatttgaaaaataaagtttttcttaaaaaattgtgtgtgtatgtagattttatattctgcaaaattaaatgaagtgtgtgtgtgtgttattcagggccccgcaggaaacagctaacatacttaaagagtgcccgaagaaagatcatgagtggtctatacatgtgaatccatctcgggactggaagcatccagggccccaggcgctcaaagctgcactcatcaggcctgactgggatgatggcaaagcagtccctggagcccacgatgactgtggctttaggagttctgccagccaggagctctgaccttgaagctaatgctgattgtggcccagaaagatgggactaggaaataaatcccggagaaaatcctgttgcccacctggtttgctggccaaacctgacccccaaaccagaggacaggaggccagtggacgcaggaacccggagagctgggggagagggcatatgctgggggacatccaggtggaaagggccaggctttcctttaagcagctccatgggaggccgtttagcagagcaccgtcatattatgggtgcggagcgtcagggatgggaggagggaatcttagctgctgttcttctcattctcaagaactttatggcccaggtggggacccaaccaaaaatgagtaacaatacaacattgccgggtggaacgttccttccctactttctctggttgacattacttcttagaaaggttgggtgacaccctcttaggagcttgtgttttgtcccttaaatgttagaggtttgaaatactagtttctgaggaggcttttcaaaggttggggatacattagtacctgcagaatgagctaataaaatggattaatacatgccattctccatgataaatgtagagtacgtatcttgctatttttcatactacttacttaagactttgaatgagcttggctattttccgaccaaaaattagctatggttttcaaaagagctttgtaatgtttgagtgcttttccctggaatcagggatgtggatgtagggtgaatgatttctgtagaggatttctaaaatcggtttttcaggaagcatctttgtgatcaaaggtgcaattcaactccctggattcatgttaaataaattttgaaatgaaataccataggccggatgcaatggctcatgcctgtaatcccagcactttgggaggccagtctgaccaacatggaaaaactccgtctctactaaaaacacaaagtcagctgggcgtggtggcgcatgcctgtaatcccagctacttgggaggctgaggcaagagaatcgcttgaatctgggaggcggaggttgcggtgagccgagatagcgccattgtactccagcctgggcaacaagattgaaattccatctcaaaaaaagagaaatactgtaatacccacatgaccagcactgtattgctgtttaagaactggtgaccagcactgtattgcactttaagaattggggacagagctccctgtttggcctctcagatgggatgcgaccatggcagttgttgctgtctccccagaagaactttggtttttctttggagaacttgccctttcagcatcgtcagtcatgaggtctgggtggaggtcactcgggtgagcccggcatgtctcaagcttgttggcattacccatccccctacccccccagttatccagttaaaggacagacgtgactcagaaggcgggtggatcgcctgaggtcaggagttcgagaccagcctgaccaacatggagaaacctcgtctctactaaaaatacaaaaattagctgggtatggtggtgggtgcctgtaatcccagctacttgggaggctgaggcaggagaatcgcttgaacccaagaggtggaggttgcggtgagctgagattgtgccattgcactccagcctgaggaacagagcgagactccatcacaaaataaataaataaataaatgaacaaacaagagagtgactggaagcagccctccttggacacagtgggggtgacggtccataaccaatgcagccattttcatgagagttgggccaggaggttaccggtggagaacggacacaaagccaagcaaggacacagagaacctggatcccaggtgacaatatcaaggctcccagggagtgagctgtacctctgactacttcagttatgtgagcaaattcagtttatttactatgagttcattttcttttcacttgaaacaaagggattcataacagataaccagggtacagggcaggctggagcagtgattgctaattccactggctggcacaaggaaataccaaatatggagtctctttggaccgccggcatttgcattgcctgagatcatccagaaatgccgaatctcagaccatcgctgcacttcttctttagattggtccagaacagtacttctcaaatgaatgtgcatgcagatctccttgggatcttgctaaaaatgaagttccaagattctgcacttctagcaagttcccaagctaggctgatggatcatactcagagagcaaagccctggtctacacttacttcatagggaccattcttttttttttttttttttttcccccgagacggagtttcgctcttgctacccaggctggagtgcaatggtgcggtctcggctcaccacaacctccacctcccaggttcacgctattctcctgcctcagcctcctgagtagctgggattacaggtgcacgctgccaccacgcctagctaattttgtatttttagtagagatgaggtttctccatgttggtcaggctagtgttgaactcccaacctcaggtgatccgcccgcctcggcctcccaaagtgctgggactacaggcgtgagccaccgcgcccggccttagggaccattcttaacctaaaacacttgaagttcaggaacggacactgaagattcatttcagaaaagtcactagatgagaatcttgggtcatttctcctctgctccttacctcggcacagcctgtcctcctgactcaccaggatcctctttcttttctccaaagtcttatcaatgatctagttagatcgagactgacatgagctgacaacacatacaccctgttggcaggcggcaagcagcccccgcttcctcatgcatttccactggcctcactgccaaattcattattgctcatcatttcaagaatctgtctctggtttgcttgtctctcttactagattagagtcaggctcttgctgtaacacaacatactgaattagatactgagtttctaccttctataaacaaatgattctcaaagcaggttgcacactgcaatcagtggaagctttaaaaaaagactgaggcttggtctggccccttgagattctgacttaattggttttgcctgcagtcagggtgtttcagttttaaaatctctcgaagtgctgctaattgctgccataagtagatgaacatattgatatcacagagctacctgagaagtcagttacttatttaggtatttatttcatcaaatatttattgaacatctattatatgccagacactatacgttgtcttcaaagataagacacatacattccctgtcctaaaggagcctgtcatcctgtagaagggaaaggtgtatagacaaataattgtaatggtgtgttcaatgcaatgaaaagtataaaaactatcctttggcaaaaggcagagtggtggattccatgtaaaggggcatgggataaaggtaactatggctgacagtaactgagcattactatggaagaggaaggcctccagagagtgctgatgtgtgtgtgaggccttgaaggaggagagaacccaatgaagaaggtgagtgggagatgggatggggaaggtttttctgggttgaggttgggggatttggggatgagatggtggaggagctgagggggctcccttctgttttctttgtaaaatcagagtggggtgaaaacctgagagggcacagtgctgggtgttgggaggggcaggggcattggcaggggtgggcctgagaaaagcagtgagctctgttctgcaacattgaaggccctgataaaggtgagttcatagatcagcatccctcttcaggctcttgtgagcagaagctcccatgtaaacagagatgagactataggattcatccgaagctgtgctttcagcagcaggggtgaaggcagacaagagggccagagagtgttggtgagactggggttcgagagttccaatttccatatggaggaagtgagatctgaagagagcttgggaaaaagggagggagaagctgggatgacaggagaaagtatcagaggggaatttcagagacaagtaggtcagggtgaccaaaatgtgcaggatggactgctgagggggtgactgtcactggagttgtggagctctgggacgtggatgctgaaaccccccatggtggggaggggaagactgtgatcctctctgtacatggttcatgagatgcccaccagtgggtccacccagaggggaaggcaagtctagtgggagtggatttgaagaaatcattcaggagggggaggtaaaagagaacatagggacatggcactgaaatgcaaaacagagcaatggagaaacaggaaaatactgaggaaaaaggacagaggttcctagtgataaaaggaagccttgcacatccctctgaaagctggattttttttttttttttttttttagtttaggggtaaaagacctagagttctgaaactttgctagaggcaacagtggaactgttgctaccagctcaaggccaacctagacagcatctcttatcaactctgtaattgatagcaggctttacagataagtgatttcaacaatgcactcctgctgagaacttccagttagaattaattgatcttgatcactgggtgctaaacttcaaaaatcattattaaaaaatattctgcccaacagctccatattgacaccttgaggcaaagccccattcatctggcatcaattacagttctgctcagcctggagggatgcctgacttcccacacttgacattcctctcccctcccccagaccctagaaccttcccttatcctattactgagcattagggccaggttctctatctgacagcacaaggacaacacccaatgtcaagaggagcactatctgacccaagatataatggaacttcagaaggtggctggctttcccagaatttcccactagaggagggggatgcacctggggtgctggaaacatgcgtgcaggggtcctcctggagcctcctcctccagagaagtccagtgatctccaaaaacagggcacacagaccctgcaagatgcgccccctacttagagagagacagagccgcccgaagaccttcgaggacagaacccgagttcaccagtcaatgaacgccgggagcatcctcagaccctctgcagccaatgctggtgtgaaggtggagtcagttctttcttggaagtttattaccagcggcggctgcgacgtccatgtttgcaaaggaagggaggccttcctcttcccaagtggatcctacatcccgctccactcactccactcaggagaatcaaaaaagaggaagatagggctttctgccttccttttcccagcttttctttctgggctgtctcactcgggcttttgctgaaccatacaccccagaaccatccaagagcacaatggctctgtgctgtgggggagtctccaggtgcggttatatatagtgtgggccagcacacccactcccgttactcatgcagtttggccctggttgaatgcatgaacaatctcttccaggcactccctgttttcacttcccgctgcccacagggcccctcctctgtctgacccttgggggtcaacatcctttctagctaatccaccccacttcctccctcaggccgggctggaggctgttttttaacttcaggggttcctggagaagagcttcctctgccccttcacgatcacatcaaacacactggattcagggtcttgagatttgaagatttgaaagcagaaagatcagtgtgagtccaaactgtgggaaggaacatgatgaaagaggctggacttgaaatatccaccagcgaaggtgggcaaagggccgcctcaaacagggagaaatgggagcacctcgcattctgggttctctggacagcagcctgagcagctggagcaggggcgcaggggtgtctgaggggctctggcgagagttcgtgcaagcagcatactcaggcagggtgggcgctgcacaggtgatggagctggacacctcattttgagagccccctagctgggtctgtgacctggggccagccccaaccactcggaaggtctgtttcctccctgtaaaatgcaggtaattatattaaataactaactgcagagtcactgtaaggattggaaatatttgcacagtgcctgcctgaatgatggtattgggaggagacctgtgtacctgagttcctctgacctgatatttccacgggagctggggggcagctgatgaggaagaagcttctgccccaccagcgcaattctgtaccgagcaatgcagcctgagcctccgagtgaccaccctcctgagcagtcataattcactgggatagaaacatgaaacagttttttctcgaagtatggctttaaccatgctctcttaaatctccctgtcttgctctttaatgatcccttgggaagattttattactttttacttttatttgttaaaatctaactgtatttatttgaaaactaagaatgcaaaaagtcaattcgctgtaaaacctcaaacatagtttaaatcttatcccttttattcccttccctaaaggtttaaactgggaccctatctaccagccatggaagaggagggacaccctgccttacagatatcccttctcccctccctctctaaggcaggcttctgctgtgtgcgtgttagactggggtgtggaggaaggagagggaaagggacaagggtcattttacttacctggtagccgctgctgtgcttatctctggtgcttctctgcaggtcatttactggactaagatcccttatgtggcagggtccaactcatgggccacatgggatgctttagaaggtgctgggggccaccatactgccttcttcctgggagatgggctgcggctggccacttccacttccacctgcccatcctgggcggcaagcccacagctctgtgctcaggcgccctcacctggaaggcagttttctctgtggtgcactggcaagatgactagggcctgatcactttgcatggtgcccactctacaccaggaaaatccatgcactctggaaggtagtgagatggcccctactgcccctctcccagccctgccgcttcccctcaaattcttttttctttcaaatttgattcttagacatcaaatcagaaaccaaagttcaactctcctttattgcatttcctgaaacatctgtcttcctttttttttttttttttgagatggagtcttgctctgttgcccaggctggagtgcagtggcacaatctcggctcactgttaactttgcctcccaggttcaagtgattctcctgccttagcctcctgagtagctgggactacaggagcgcactaccacacccagctaatttttgtatttgtagtagagacaggcttcactgtcttggccaggctggtctctaactcctgagctcaagtgatccaaccacctttgcctcccaaggtgctgggattatagatgtaagccaccatgcccagcctgtcttccttttcagaaattatttaacctacaattatttattatgtaatttataagacattcaaggactaggtgtggtggctcacacctgtaatcccaacactttgggaagccaagatgggagaatcacctgaggtcaggagttcgagaccagcttggccaacatagtgaaacccctgtctccactaaagatatgaaaattagtctgtaatcccagctatttgagatgctgaggctggagaatcgcttgaacctaggaggcagaggttgcagtgagcagagatcgtgccactgcactccagcctgggcaacacagcaagactccgtctcaaaaaaaagacattcaaaattacacagtgtaatagcataccacccatcgtaagaaacaaacatcttctacagttggtcctttgtattcctttgtataatactacatccgaactgtgtttgtagtgattctttatttgcatgtgaaagaaacccaactctgactggactgataaaaagaaaggaagtattgattatgtaattaagccacagaaagggcaggtagacttttttcttcttttcaatttttttttgttttgttttgaacctttaatgataatatatatgcatactgttgggctatagaacaccatgtttggtttgtctttgggtcaagggttggggatgcgcatggcagcactagtgaacagggtctacatcaacaaagatacacgtggtcataaagcaagaaactggtgcgtggcgtggtcaactttcatttcctcatcactcagtagcatgttggggtccccacggctgatgtgggacagatgtccagactctgcgcattgcaaggtgtcctctaacacatccagctcgagcagcatgtggtgcatctcccttggaaatttctcataatgctcatacccctgaatcagccctttggaaacctcgagcaggtccagagtcttggctgcttccaggagtgctgcccactccaccatgggtagcatacacaagtgttgaactttgtagggttgatgtggacctcagtgtagtggggaggtggaaggggaagccacagggccccatcccctgcacatgtgagctcagctgattgtggggtgagcagtttcaagtcatcccattagctcttgccaggccagaagtggaacggtcctcttttctcttctgagcttctgttggcctgttggtttcattcctttcggctgtggatctccaatatactggatctattgggacagctctttccagcctcattgctagatagggcgtgtgccctccaccagctccagacagaaaaatgcaggggaagtcatatgcctatcgttgaatcaattattgtgtgtagggggactgggtattgggttaggctgagcctggttttttagagttaggtattttatttttagaaaaattgagagagaatgcttggtactacttagtatccactgtatagatccactcaattctttaaaatgctgcattgtattctgcttcagggctgtgctgttatttggccaatctctattaatggatattaaaggtgtctccatatggaatcaatctaggttcccatcaatgatgggttggatgaagaaaatgtggaacatgcacaccatagaatactatgcagccataaaaaagaacaaaatcatgtcctttatagcaacatggatgcagctggaggccattgtcctaagcagattaacacagaaacagaaagccaaatgtcacatgtccttacttataagtggaagctaaactttgggtatacatgggcataaagatgggaacaatagaccctggggactccaaaatggagaagggaggggagcaagggctgaaaagcttcctaatgggtactgtgttcactattcaggcgatgggttcaacagaagcccaaaccccagcgtcacacaatataccctcgtaacaaacctgcatgtgtaccctctgaatctaaaataaaaaaaaaatttaaataagaacttaaatggactggatgtggtggctcaccctgtaatcccggcactttgggaggctgaggcaggaggatcacttgaagccaggagtttgagaccagcctggccaacatggtgaaaccccatttctactaaaaatgcaaaaattaaccaggcttggtggcacatgcctgtcattccagctactcaggaagctgaagcaggagcatcacttgaacccgggaggcggaggttgcagtcagcagagatcaccccactgggtgacggagcaagactctgtatccaaaaaaggaaaaaagaaaagaaaataaattgtctctatttttttcctgatatgaacaatgctttccataacattcttttatttttgtaagcatgcgtccatattttttataagacaaatttccagaggtggaattgctgcctaatggtatgcgggtggatcacgaggtcaggagatcgagaccatcatggttaacatggtgaaacctcgtccctactaaaaatccaaaaaaaaaaaaaaaaaaaaaaaaagggaaagaaaattagccaagcgtggtggcgggcgcctatagtcccagctacttgggagcctgaggcagaagaatggcgtggacccgggaggcggagcttgcagtgagccgagattgcgccactgcactccagcctgggcgacagagcgagactgtcttaaaaaagaaataaaattgatattgccagattactttctagttgcactctaccagtagttcacaacagtgttggcttttccatactcccaccaacatcaacgtactggttaatttgtgctgtgtaacaagcttctgaaaacttagtggtttgaaaccaacaaccacttatttgcccaccattccattgatcagcaatttaggcagggcccagatgggatggctcacctatgttgaccatagtgccccagttttacagtcagctggaggtcagtgacctcgctcacatgtctggcagttggctggctgttaggtggagtgatggagacaactaggtcatttgtatttgtcagtcagcatgttgttggtggccaatggattcccaagaactggaagttgcaagttccattgcatcagtacttttcaagcctgcatttgggtaacatttgctaataaccctttggccaaagcaagccacttggtcaagctgggatccataagatggaaaataagctatacctcttcatgggacaaactgctaaatattgtgatcatttttgtaatctatcatagccaggttatatcattttgttaatcttggtcaatatgactggtaaaaaatgaaataatcttttcttaaattttactattatgattgatcattttttcccaatttgtgtccatcatttaaatttgttatataacttgagtgtctgtatttttgtttggggttttgttttgttttccactaaattgaaacaccatttttgacatatattaactttctcatatgtacttggatttgatttcttctgcatcctctatattttttctgtaccttatttgttaattcctgaaaatattttcaatatttctttttttttttttttttttttcagagaacagggtcttgttaagttggccaggctggccttgagctcctgggctcaagcaatcctcttgcctcagccttatgggtagctgggatcacaggtgctgccaccatgcctggctcctatttactattcttattttaaaatttctttttctggccaggcatggtggctcatgcctgtaatcccagcactttgggaggccaaggtgggtggatcacctgaggtcaggggtttcagaccagcctggccaacgtggtgaaatcctgtctctaccaaaaatacaaaaattaactgggcgtagtggcagacacctggtcacagctacttgggaggctgaggcaggagagttgcttgaacctgggaggtggaggttgcagtgagctgagattgcaccactgcactccagcctgggagacagagcaagactctgtacccctctccctaaatttatttttctattaattaacttttattattctatttaaagttaaaatcatacttatccagtttgaaaagaattggaatttaaattggaatgatagtacatttgtagcttactttaggtaaaatatatatttttacgattcattcccatctcatatttcctagcctggtctagagattcaatgcaatccctattagaatgccaattgctttttcttgcagaaaagacagtttgatcctaaaattcatatagaaatacaagggtcctcaaatagccaacacaatcttgaaaaaaaaagttggaggatttctatttcctgagttcaaaacttaatacaaagccaccgtctgatacttacaactcaacaataaaaggacaaataactcagtttaaaaatgggcaaagattttgaatagactattttttatactgtctttgtctggtttttggatcagggtaatattagtttcataaaatgaattgggaagtcttttctattttttggaggagattgtgtagaattggtgttacttccttttggattgtttgagagaattttcctgtgaagccatctgtgcctggagatttcctttttgggaggtttttaaattatagattcaatttcttcaacagtcataagattattcaaataatctcttttatattgaatggtattttgtgattttcaagtaagtggtctatttgttctaagttagtaaatttatgattatagaattgttcatagtattcacttactatcctgttgatatctgcagtgtctgcagtgatattctgtttcattcctgatatagtaattggtatcttctctctttctttgtcagtcttgctagaagtttgtaacttttatagagtttttcaaggacccagtttttgcttcattggttttctctattatttttctggtttcaattttattgatttcttgtttttccctgcccccaccacctttccttccttccttccttccttccttccttccttccttccttccttccttccttccttccttccttccttttttccttcctttttcttgctctgtcacccaggctggagtgcagtggcacaatcatggctcattgcaaccttgatctcctgggctcaagggattctcccacctcagcctcccaagtagctaggactacaggcaaatacctaaaaaaaaaaatcattctaccataaagactcacgcacacaaatgttcattatgcactattcacaatagcaaatacctggaatcaacttaaatgcccatcagtgacagattggataaagaaaacttggtacatatacaacagggaatgctatgcagccataaaaaagaatgagatcatgtgtttttgtaggaacatgaatggagctggaggctattatcctcagcaaactaatgtggggacagaaaacaaaatactgcatattctcacttaaaagctaaataatgagaattcacgaacacaaagaaagaaacaacagacactgaggtttccttcagggtggagggtgaaaggtgggagaggagcagaaaagataactatagggcttaatacctgtgtgatgaaataatctgtacaacaaacccctgtgacatgagtttacctgtgtaacaaacctgcacatgtacccctgaacctaaaatgaaaaaaattagcttgtgactttgctagctcacttattagttctaatagccttattggtagattatttgagattttctttgtagacccatatgtcatttgtgaataaagacagttttaattcatctttccacatttatatgccccctttttttcctcacgttactgagctggtgagggctttctgtacagtctcaaaaaggagaaacacccaagagtcttccttctttttctggtgacatgactcgttggtaagtcatctcccaagaggatgaaagtacatttttaattactagactctgcctccatgacactcacctttggaggcaatcaaaccaccttagtttgagaagggagtagagtgaactttggtagtgtgagaactgaaaaagtgagtgactcaacacttgtagtggctcatctcccagaatgaatgcccagtgattatgggtccctgatggacttaaacatgtctttggggaagctgggctcagagaagaatggacattcattgaactgagaggatagggctcttaggctacaacatggcaaatatggtgagaaagtctttgcatcatgtgtggctctgaggaaatggaggcatacaggggcaacatctaacttcagaagtcctggccaaccagtgctgggagatgggcctttgctttggacagagggaagactgtttgatggcagtcctgggtggcagagatatggcaatgccagtggcaatggtttgagagacaccagggctgttggagtcttggatccacttggcagtgaatgtttgagggatctttgtttggactgcatgtgactgaaattcttgaatgatccagaagaggataagagagagcctctaggagggtgaaaatgtacttcctgctagtcacacatttgggagttcaaatcagttttaattcaattgtgggaaatgaaataaataaaaagcagaatcattaaatgttttgagaaggaaacgatggacatgtcaagtgcatggtgtgccactgtatactggtgtgtactattctcacaggtcaagggaagaaaaggtgtgcacaagcatggaggctggagcaggtaaagcccatactggaaggacaagttcattggcctgttcagagtggaggagaacccaaggctcttgggccagggtggggggaacttgaacaatgcttctgcaaagaacttttcctacaatgagttaaaaacaattccaagatctggaaatatttccacttctttttcttatcagactaaaatccattttagtaggtatttcttgaagttattaagggaatagacttattgtttaaagagagggtggctgctccatttaccagggagaacctatttaagaacccacagtcttgggctctttccaaggcattgtaaatttactttacagtgtctgatttactttaaagcttcttgttattgcagtttaaaacaaaatttatcctgcacacatcctgtttaaaacagaattttctcctctgttaggcagagataaagaatgcaagaacgtgtgcttttatagcattgattgcaccttgatattaggtgaaaatgggccctgatgctttaaattatcaggttgatggctgaagggaaaccaaatcaatatgcattttaaaatgtaatttcattatttcttaatttagttagggtgatagttctaacaaatctaaatggaagaaaaattcattttgtctccttttcctcttgctccttcactttcttcacctttgtgttcctctttagaagtgtgacatgtacacatttttatatatagcattatggtactcctccaacatttagatcctattttcttttggaagacaacagtatgctccccaggctgcgtgacatgctggtggatcgcacctgtccctgtctggcacagaatcactagtagctagagcagctctcccttgctgagcagcccggggtaactgggaccttcttgtgcagcacttttatttccttttgccaactcacagcggatttgcctcttgcataagtgagcaaagcccccagaagtgttgtatgtgctaccccatgtcatgcaaagatggaggtagcaggctccatgcactgtgcatgcctttctgtctttgatagggctcaggtatttggcccacatctttatagtttcaaagactgccagtggaacaggagtcatgcttttcagcttatgacctctgaaagaaacacatctcatatatgcttgctttggagattcagctagttgacaatggttgatattgacaaaaaagtcaaaaatctacaagaataatattttactgctagtctcaaggaattttgacacagataggccttgactatggcccactgaagtgtcatgagaactaggtttgcttgctttttaggtaatcccctgtcatttctggataatctcgaagaaaatgccaatttcttgctgaggatgagcagccttcttggtctgaaaatagtgcttctgcctcagggcaacttccttcacgtgccctcacagatgcccccagtgctttatgctgccttctcctaagctcatcagcatcctgcccttatctgggaatcctctgtgactttgacctgggaaggtccttccactgccctgggcatcacatccactggtcatcatatccactggacatcacacacactggtcagttgctagggaaggttctggttgtagacctcggaactggccttgttttatggtaactctgtgacttcaggatagagactacgtgtcccatattggttccctttaaaacagtcaaccagaattgtgtcacttgctgtttcaaaacttgtgtttcttgtagaacctaggcctcagttgtggtttgaatgcttctatattcagatgacttttcgggcaaaaagattggcacttcattgatgactggtcaattcttcctagctagaccaccagtcctgctcatcgtctaggctctctttgactcaattcccccatcaattgtcaatcaagctctcttcttcccctcttctctatctatctctctaccccagctttggtgttctacaatatttaaatgttctaatttacagtttttgtgacactttggttccatgtaacagaaaatccaactgtaatttgcttaggtaaccatgatctttttaactcacacgactaaaatgtttacaagtaagacatatttcaagcatggctggatctagggactcaacaatattctcagaaccaaatttttctcctttcctttttataaattttgcctctggttccttggaggtgaatccatttttagataccacatggaggcaagatgactggagaagctctaatatccacatggcaagaggtacctacatggcgtggtccccattccattaatggcatcttaagttggctgcttcttgtgcaaaacccagtctctgttgggtaaatactgtcagttcaagatttcctccttggttttctccccaggggctctggaagtcatggtgcatgggggcggggaagtggcttctttcttggtgtcttcatgggcttccatccctgctcagtcttctgatgaaacatttgcttccccttctgctctccaagtaggtatctgttgtttttgtcccaacttcaaggtgtcctcattcagctacttccatctttctgtggcacaagaatttttggtcaccctgctgtttcctgtggggactgcctgagcctttaaaaaaaaaaaaacactggctaggggcagtggctcatgcctgtaattccagaattttgggaggccgaggcaggcagatcacctgaggtcaggagttccagaccagcctggccaacatggcaaaaccctgtctctactaaaaatacaaaaattagctgggcatggagggcacacctgtaatcccagctactcaggaggctgaggcaggagaatcacttgaacccagaaggcggaggttgcagtgagccaggattgtgcactgcactccagcctgggtgagaagaaacaaactgcgtctcaaaaaaagaaaaaaacaacaacaaaaaaaacctaaacatacttgctatcatttctagcctaacacttcaaatataaattgagtctcagattagcttactcacatatttccagccctgtgttggtgtttctaactccttctcacaagggttttgacaaggttgagcaggggccaaggagtaagctttgatcataagtattgaaaaccttctcctttctctagctggttagatttttaaaaaaatcacctattgcttaaaaaaagagctgcattcctttctgcgccctctctaactctgtaaagcatattcgttctgtgcttgagtctcctaggctttgctcttgctggtcacaggcaaatatctggaattttaatacacacagcaaacagcaacagttacaaaacattttctttcttaagtttctctgaatccatggctttcaagactgttctctgtgttttaaacttgaaagagtactgtgagagatggagaaaccaagaattggaccctccattgactcagaggctcctgctgagatgttaggaagaacaaacactgggaaatggggcagggtgggaaagggtgcggtggaggacgtgtatttgtttaagtggtccaaattttaacttatttctattatgcctaacagctcttgtatcctgaaatcatatataataaaatgctgtaatgaccatcacaggatgatcttacaaaggacataactagtagagtttaggagcattggtggaaaggagggaggaaatatacatattctcccaacatctcaggttggatcagggtgtagtgagtgttctgtctgggatgtgatatgctgagatgacaatgacagtatttgtgaagctcaagcttcatggtgttagttctgaacaggaagaaggaaggaggtgctacagcagtggttccagactctgggtaaatcaccctgggggtacttaacaaaaatacactgggcctcctgagccagaatctctggggttggtgataagcttccagggttttttcttttttttttgagacagagcctcactggcgcaagcttggctcactgcaacctccagctcccaggttcaggtgattatcctgcctcagcctcccgaacagctggaattacaggcatgcgctaccacacccgggtaatttttgtatttttattagacacggggtttcaccatgttggccaggctggcctcaaactcctgacctcaagtgatccaccagccttggcctcccaaagtgctgagattattggtgtgagccactgcgcctggccatagggaattttattgtagccagcctagtacaagtcaagtatgtttggggaacactgtgttagatcagggaagaatcaacaaaatataaaatggcagcatgatcccctggtagcctggttttaagagacttcattgtcaagtgctctgacatgaatagtgctagacaagaaagaatactgagctgaaagaattttaatgatttatatgtggaggagaagatgttttctttgtaaagttgtcaaagctaccatatttggaactctttagaaatggttggccgataagagaccctgatgtgcaaaacaaaccattggggaaagatgctaaactgtttttcttctattgattgaacctaattaaaatgatgtcttaacattaagctatattccacttgtcaagctatgaataattttatctgcctttctctcttctaaccaggctaacattaagagaggccagtattgaaggctgcatcattaaaaatcctgtccaggtaggagaagtctctggagaaagccctatacatcataagactgctctgtttctgtgtagcaggatagaacaaggaaagccttgtcttcattatttcccacggattttaggacatcttttgcagctgcattcagatactcacgaagtaagcctttgattaggaaggcggagaaacagagatgcttaaatggaaccgggcaaactaaagtgagcacatagcttagtttgtattccctttccttttgttctctctgatagtgtttattctttcttatctgaaagcattttattgtctacttaaaaaatcttaggtataaatttatagagcttggattttaggatttatataatctctgctttgctgaacattcaggtgcttttaacaactgaaatctttcaagttgtatgccaggtttttgtgtatgtaaggttttctatggaagaagattcaaatatttccttagattttcaaaggagtctttggcttcaagatgataaagaactaagcagaagtcttgatgctaagtcaacagttctctttgggaatttgacagtgctaatcggtagtttctatagattacaagatgccccacacctgaacaatagaaaaaaatctaaggtcatcaaatgagacccttgaggggcggtcctccttgcatctggtctgagggctgtagcaactggttcctttctcttgataatgcttttcttgtttgttttgaaatgtgggttgctagagagattaactgaactaggaggggttctcagagatgtggcagtgcagagagggctcatgacttagataactctttagcaaagtgctgtactgggccaaacttgacatcacctggtgcagtcttgtgcaggaggcatgcacctgagctctgatgaacaatcctctgtaaaactctattcttcttgctttgggtcttcttgcaaccccagggagcctgctcagagagtctgtcatggtcatggcataataattgattttaaactgggcacagtagtgtgcgcctatagtcccagctatttaggaggccaaggtgagaggattgcttgagcccaggagtttgagtccagcctgggcagcatatcgagatcttatgtctaaaacaacaaaaaaaattaactttataaaaaaactatatattttatcctctgtggctaaaaatttattcagaataccccctctatcttactccttaatatatttgaatgtcaatagctatttcaagaggaagagagggcaaaagtaaacattcttgaacattaatatatctgaagctttcctgtagtaacattccatccacagacaagtctgtaaagtaaggccatgccagtttatagatgagaaaaatgagcgctcctctagcaattctgcctcagcaatggtttctctaatcctttccactctgctgtcttctctgacctaaagcaaacccatttcttaggatgaccttcttccttttaagtgaatgaacaatttctgtcctcttcatggccagctataaagaaaaaacttgccttgactttctgtcttcagactctcatttcctttctctcctcatcattgcttctgaaacaccccagaaactcctacttgtcaacttatcctaaattccagagaactgatgtgagttggaaaggaacggtgggttcgagaagattgcagaaggctgggaacaattaaaaggatggaagtggcagccagggtacaaactgggtcaaaccaagaggggcccgtccctgtgagagggtcaaggtttcacagaagcacaggtgagtgcagaggtgcaagctgtgagttgttgcaagaaaagcaaatgagcatgtgtagaaggcaaatgcactggaaacgttgtctctgttgaatgtgcttatgatcagtgagagcctgcatggctcttggaatgctggaaacagttcccctgacagctgcctggtagtttttgttattcaaattgcacatcaaattgttctttgactggtctcatggattttattcctacacaggtgcaggctaatatgcagccacagactcgaagggaccctgcatgcaatttctggagctctttctctcacatcatcctttctgccactctgctcacaaattctagttgcctcagtctcccaaactccaacctctgtttcctgagctcagcagaactgctgcactatgcttgcagtctcctttcacaagtctttatagtcttatacactagctgatatattgtgtattatttgtttattttctgatattgtacagctatagtaggtcctcaatgtgttaaattaatacacgaatgcatcaacagaagggttcggttagttgctgtttttactattttatttcagtttagttttatttcattttactattttatttattttattgagacaagatctcactctgtcacccaggctggagcgcagtggcaccatcaaggctcactgcaccttcaacctcccaagctcagcctcctgagtagctaggaccacagatgtgccaccatgcccagctaactttttatattatttgaagagatgggatttcaccatgttgcccaggctggtctcaaactcctgggctccagtgagcctccctccttggcctgacaaagtgctggtattataggtgtgagcccccactcctggctttcagctggtttttattcaggttgtttggaggaggttgagtatggtgcaacctcagatgaagactccaaattctctttccctcaccctcttttctgggacccacagtccacccacatactattgatcttctgaatgccaaaccagactaattatcgtcttccttctattcccaagtctgccttccttagatattccttgtctggaaaaataatactatatacatgttttactttattcatggtaaattacctgctgtcctgaacttactctttcaaccacaacattaattgaaaattttttgcatctcctatgtgccagccactgtcctaggagctgggctaataaaagcactgccctctaagagcttacatttcagacagggagacacgcaggcatgcaggtactactacactgtaataaatcacaacagaggcagaaaacaagatgctcggagacttaacaggaaggtaaggtctccttgtttcgcccatgtctctgactctccccaaccactatctctagacttcgagaagtcccattcattctctgttattcagcacatatatatatctcttgggcatagttcaaggtccctggctttatgttgctccagtgtgtttatacagctaccataacacttactgcttgtaaggctaggatcatggttttttgtgcctctgtagtcaaatcaaaagcatagctcctagcacatcataggtgccgaaagaatcaagaggccaatgtgacatgccattttccttatgcagggcccaaatctcatgcccctgtatagatattttgtagggtttggtgacaggagtactggtggtggttatatactgtacggtatcactagagcatgggattttttttccataggttattggggtacaggtggtattcggttacaagagtaagttctttagtggtgctttgtgagattttggtgcacccatcaccagagcagtatacactgcaccctatttgtagtattttatcttttgcccccctctcatccttccccccaagtccccaaagtccatcgtgtcattcttatgtctttgagtcctcatagcttagctcccacatatcagtgagaatatacgatgtttggttttccattcctgagttgcttcacctagaataatagtctccagtctgggcacgatggctcacgcctgtaatcccagcactttggaaggtcaaggtgggtggatcacctgaggtcaggagttcaagaccagtctggccaacatggtgaaatcccatctctactaaaaatacaaaaaaaaccaaacaaacccaaacaacaacaacaacaaaaaaattagctgggtgcggtggtacatgcctgtaatcccagctactcaggaagctgaggtaggagaatcacttgaacctaggaggcagaggttgcagtgagtcaaaattgtgccactgtactccagcctgggcaacctagtgagactgtgtctcaaaaaaaagaaaagaaaagaaaaaagaataataatcttcagtctcatccaggtcactggaaatgccattagttcatttctttttatggctgagtagtattccatcatatatatatacacatatgcgtatatatatacacacatatgtgtgtatatatatacatgtatatatatacacacatatgtgtgtatatatatacgtatatatacacacgtatgtatatatacgtatatacatatatacatacatatatatacatacatatgtgtgtatatatatacgtatatatacttacatatgtgtgtatacatatacgtatatatacacacacatatgtgtgtatatatatacatgtatatatatacacacatatgtgtgtgtatatatatacatgtatatatacagatatatatatacatgcatatgtgtatgtgtgtatatatatacacatatgtgtacatatgtgtatatatgtatatatctcacagtttctttatccactcgttgattgatgggtatttaggttgtttccatgattttgcaattgcaaattgtgctgctataaacatgagtgtgcaatgacttcttttcttctaggtagatacccaatagtgggattgctggatccagtggtagttctacttttagtcctttaaggaatctccacactgttttccataatggctgtactagtttacattcccatcagcagtgtaaaagtgttccctgatagctgcatctatgccaacatctactgttttttgattttttgattatggccattcttgcaggggtaaggtggtattgcattgtggttttgatttgcgtttccctggtcattcatgatattgagcatttttcatatgcttgttggccatttgtatatcttcttttgaaaattgtctattcatgtccttagcccactttttgatgggattgtttgtttgtttttcttactgatttgtttgagttcattgcagattctggatattagtcctttgtcagatgtataaattatgaagatttttctcccagtctgtgggttgtctgtttattctgctgactgttccttttgccgtgcaaaggttcgttagtttaattaagtcccaactatttatctttgtttttattgcatttgcttttgggttcttggtcatgaaatccttgcctaagccaatgtctacagggtttttccaatgttatcttctagaatttttatagtttcaggccttagatttaagtctttgatccatcttgaattgatttttgtttaagatgagagatgagaatccagtttcattctccttcatgtgattagccaattatcccagcaccatttgttgaatggggtgtcctttcccccactttatgtttctgtttgctttgtcgaagatcggttggttgcattgcaagtatttgggtttatttctgtgttctcttttctgttccattggtctaggtgcctattttttataccagtaccatgctgttttggtgactatggccttatagtatagtttgaagtcgagtaatgtgatgtctccagaattgttctttttgcttagtcttgctttggctatgtggggtcttttttggttccatatgaattttagaattgttttttctaattctgtgaagaatgttggtggtattttgatagagattgcattgaatttgtagattgcttttcgcagtatggtcattttcacaatattgattctacccatccatgagcatgggatgtgtttccatttgtttgtgtcatctatgatttctttcagcagtgttttgtagttttccttgtagaggtctttcacctccttggttaggtatattactaagtatttaaattatttttgcagctattctaaaagggattgagttcttgatttgattctcagcttggttgctgttggtgtatagcaaggctactgatttgtgtacattaattttatatcctgaaactttgctgaattcatttaccagttctgggagctttttggatgagtctttagggttttctaggtatacgatcatatcatcagtaaacaacaaaagtttgacttcctctttaccaatttggatgcccttgatttttttcttttgtctcattgctctggctgggacttccggtactatgttagatagaagtggtgagagtgggcgtccttgtcttatgccagttctcagggagaatgctttcaacttttcccgtttcagtataacgttggctgtgggtttgtcatagattgcttttattacattgaggtatgtctcttgtatgccgattttgctgagagttttaataataaagggaagctgtattttgtcgaatgctttttcttcatctattgagatgactgtgtgtttttgtttttaattctgtttatgttgtgtatcacattttttgacttgcagatgttaaaccattcctgcacccctcggatgaaacccacttgatcatggcggactacctttttgatgtgctgttggatttggttagcaagtattttgttgaggatttttgcatctatattctacaaggatattggtctgtcgttttcttttttgattatgtctttccttggttttggtattagggtgatattggcttcatagaatgatttagggaggagtccctcttcattccatggaatagtgtcaataggatttgtaacaattcttctttgaatgtctgatagaattcagctatgaattcgtctggtcctggactctttttttgttggcaatttttaaattaccatttcaatcttattgcttcttatcggtctgtttagagtttctatatcttcctggtttaatctaggagggttgtatatttccaggaatttatccatctcctctacgttttctagtttgtgtggggaaaggtgttcgtagtagccttgaataaacttttgtacttctgtgttatcaatagtaatagttctcatttcatttctaattgagcttatttggatcttctctcttcttttctcgaaaattgtctattttcttggttaatctcgctaatgttctatcaattttatttatctttcaaagaaccaaccttttgtttcatttatcttttgtaatttttttggtttcagtttcacttaattctgctctgatcttttttatttatttttcttcttctgggtttgggtttggtttgttcttgtttgttcagttctgtgaggtgtgaccttagattgtttatttgtgctctttcagattttttgacataggtatttaatgctatgaactttcctcttagcaccgcttttgctgaatcccagaggttttgataggttgtgtcgctattatcagtcagtccaaataatttttaaattttcaccttgatttcattgttgacccaacaataattcaggagcaggttatttaatttgcatgtatttgcatggttttgacggctccttttggagttaatttccagttttattccactgtggtctgagagaatactcaatataatttcggttttcttaaatttactgacatttgttttgtgccttatcatatggtctttcttggagaattttccatgtggtgatgggtagtagcagatctttttgtaaatgtcctttataaaaggttaaaaatgttcccttgtaaccccagtttgcagataatttatatcaggaatggatgataatttttgccaaagttttaaattttcagtatctgttgagatggccagtttttaaaagtttgatattattatgaattaatttatttgcaaatcaacattagttgattttcaaatgttaagccagccttgtctaactaggctaaaccatacttggtcatgatgtcatttaatatgttgttgaattcaatttgctaaaattttgtttggaatatttgcattcatgttcataggggatattggtctgtagttttacttttgtgtaaaatctttttctgattttggtattagggcaatactagcttcatataatatgcagtgaaaaattcactcttctttcatttttggaggaatttgtgtagaatttgtataattcctccttaaattttttggtagaattcaccagtgaagctatttggttctgtagtttttttgtgggaaggttttaaaagtataatttcaatttctattaaacatttagggctttgcaggcaatttatttcttcttgagtgagctttgctaatttgtgtctttcaagaaatttatcaattttatctaaattgtcaaatgtatcagcataaagtagtttctaatgttttattatctttttagtagaacctgtagtatcacccctctcatttctggtattggtaatttgtgtcttctttttctttctaatcagtttggctagatgtttatcaattatattgatcttaaagaaccagcttttgatttcattgtttttttctactgtttttctatttttctattttacagctttttacttattttttgttatttattttcgtgagcttactttaggtttcattttctcttctctttctagtttcttaaggtaaaggctaaaattgagttgggaactatcttcttttctaatataagcattaagtgctataaattttcttctaagtactgatttaatggtcttttgacaaattctgatgggatatatttttattcagttaaaatactcataaatttttgttttgagcatttagtaccataaattttcttctaagtactgatttaatggtcttttgacaaattatgatataatatattgttatttttattcagttaaaatactcataaagttttgttttgatttttttggttcatgggatatttagaaatgtattatataatttccaaatatttggagaatattccaaaggtctttctgtcattgacagaggggcattcaaatctctgactacaactgggaatttatctatttctccttgatgttactgtagtgcctgctaatccatggttttactttctgtggtttcatttatccactatatagtacaataagatattgagaaagacagagagagagagagagagagagggtatactcacaaaactcttattacagaatgttgttataattgttctattttattattagttattgttaatctcttactgtgcttcatttacaaattaaactttatcgtaggtatatatacacaggaaaaatcatactacatatagtttggtactatctgtggttttaggcatccgctagggttcttagaatgtgttctccatggataaagagggactactgtctatcagtttggttgcatttgtttgtttgtttgttttgagatggggtctcactctgtcacccaggctagagtgcagtggcgtgatcttggctcactgcaacctctgcctcctgggctcaagcagttctcctgcctcagcctcctatgtacctgggacttcaggtgtgcaccaccatgcttggctaactttttgtagagacaagctttcgccatgttgcctaggctggtctcaaattcctggactcaaggaatctgcccaccttggcctcccaaagtactgggattacaggtgtaagccaccttgcccagcctgtatatatcatctatttttgattcatctattttgaagcaatctgttaatacatgcatattcatttagaatttttatgtacccttgatgaataaattctttattattatgaaatgacattcttcagtcctcataatattttttcctctgaaatctactttttctgatattcatataagccttttcagatttatttttattattgttagcatgatatctacatttccatcttttcattttttaacctgtttgtatttaaagtgtatatataaactcactttatatttatatatttataaatatatatacactttatatatatttataaacataaagtgtatatatatttttatatacactttatatatatttataaacttataaagtgtatatatatttttatatacactttatatataaatatatatacacatatatttatatatatgtgtatatataaatatatatattatatatatataaaatatatatatttgtatatataaaaatatatattgtatatataaaatatatatatttgtatatataaatatatataatttgtatatataaaatatatatatttatgtatatataaatatatatttgtatatatatttatatatatataaagtgtatatatatacactttatatttaaagtgtgttttctataggcagcatatagttgggcctggctttcatattcaatctgacaacctctgtgttttaattagtgtatttattcaatttacatttaatgggattatggtaaggttaggtatggctgtaacatcttcttatttgttttcagtttgctttatttattattctttttctttctccttttttcctgttttttttgttttagttaatttgtttctatgattcagttttttctccttgtgggttcttagttataactcattgttctagtatgtaatggttgctttattgtttatggtatacatctttaattatcacaaactaccttcaagtgatatatcacttcatgtatagtatactttcatttctctgcgcttggtctttatggtgttgttgtcatgtactttacttttatgtgttataaacccaataatacattgttatttctgtttaaacaagcacatatcttttaaggagacttaagtaataagaaaaaatttcttatatatttactcatgtagatatatttttggtggtcttcattcctttgtgtagatccagatttccatctggtatcatttttcttctgcccaaggatgttatttggcatttcttgtagtgcagacatttcttctggtggtggtaaattattctagcttttatatgtctaaaaatgtctccacttcaccttcatttataaaaaatattttttgctgggtactgaatactgagtgacagtcacctgccccccagtacttcaatgatgctgctccaatgtctcttgcttgcctgcaatctttggtgaaaaatctgatgtcagccttatctttgtttctctggatgtaatacgggtatattttctggctgtcagatttttctctttgtcattgttttttagtaacttatgctgtaatttggggtagttattttcatgtttatttttcttggtgttcattgagcttagatctgtaggtttatagcttcactaagtttggaaatttttcagccattatttctaaaaatatatttttcagtctttcttcttcagggactccagttactcatgtattaggccactgaaactatcccacatatcacttatgctttttcattttttggaattttattttctgcgtgttttattttgggtagttttcattgccacacttttaatttcactgatctcgcctttcttctacaatgtccaatctgcctttttcttcctccagtctatttttcacctcagacattatagttttcatatctagaagtttaggttaagccacggtggctcacgcctataatcccagcactttgggaggccgaggcaggtggatcacctgaggccaggagtttgataccagccgggccaacatggcaaaaccatgtctctactaaaaatacaaaaattggtcgggcgtggtggcgggcacctgtaatcccagctacacaggaggctgaggcaggagaatcacttgaacccgagaggcagaggttgcagtgagccgagatctcaccattgcactccagccttggacgacaagagtgaaactccgtctcaaaaaaaaaaagaagtttaattttaattttcatctttgtaatattcttgggccaggcacagtggctcatgcctgtaatttcagcattttgtgaggctgaagtgggaggattgtttgaggtcaggagttcaagatcagcctgaaaaacatagcaagaccctgtctctacaaaaatttttaaaaactaggtgggcatagtggtatgtgcctgtagtattagctactctggaggctaacagagaagagtcacttgagcccaggagtttgaggtaacagtgagctatgatcaggccagtgcactccagcctgggtgacagagtgagacactatttctaatatataattagatatctgtaatatctaatatatatatatatttataaacaaataatgtatatatatttcctcaatatttctacttaacttcagaggttaaacaatatggaaaacaattctaataatggctttaacatctactttgttaattctaattttatcagttctggattggttttgattgattaataaatgtcttcatttgggtcatattttcttgcctctttgaatgcctggtaatcttttattggatgccagacttgtaaattttgccttgttggtgctgggtgttttcgtatttctatacagcttgaactttgttctgtgatgtggttatgttccttaaaaacagtttgatccttttgggtcttacttttatgatgtgttaggtcagtccagtgcaatattcagtttacccttgtataaccgaggtaagacctctactcaatactctgtgaattatgattttgtttttactctggctagtgggaacacacactgttcctcatcctatgtgagcatgctgttccttcagatacttttgggtgagtttttccataacctcaactatttttcttagatgaatccgttgatctgcattctactgaaaaatccagatggaccatgtcactggcaactctcttttctcttgtcctctgtcctgtgaatttttgctgccttggtctctgtggaatcaaggacatggaacaggatggagaacttagagaagctgttggattccctgagtcctctttcttgtcacttatagccatactagtacattctttttttctccccagagacagggtctcactgtgtgcccaggctggagtgcaatgtcatgatcgtaactcactgcaacctcaaaatctcgggctcaagtgatcctcctgcctcagcctcctaacgtactggcatgaaccaccatgctcagccactagtacattcttataagagttttgttgccttgtttgcaatagcaaaaagacctttaaataatttatatagaaatcattagaatacactataatagattattgtacaactattacaagtaatgtgctgatatggaaaattctatattaaatgaaaaaagtaaagtattttatacttattatatacaattgtttgtattgttaattaaaaatcatctgtgtatgtgtatgtatatgtatatgcatatatgtgtgtataaatttgcatagacacaagaaatttaacagttatcttagcagacatccagtgttttgtgtgtgcagtttgtcttttcattgtttgaattttcttttggatatttttgttccacagtcatgtcatctgtgagtaatgatagttttatattttcttctctaatcctcatgccttttatttctttcacattgttgataacagtgtcttgttcccaatctcaaagggaaaatcttcagcatttgacctagaagtctggtgctttctgtagaattgttgtttatataaatacctttctcatattaagttagtttcattctatagtttttattttaattttaaaattgtttaagattttaaataattataaatgtaaatttgtaaatattagatattttaaattttaaattatgtaatttgttgattagattgacattagatttaattgggatctttttctgaatattttgaagtgatttgcatttttttcaccttttgtcctgtaaatgtagttattatactgattgatttaaattaactttgcattcctgggataaatctaattggtttgtccacgatgagataccatctcacgtcagtcagaacggtgattattaaaaagccaagaaacaacagatgcaggtgaggtcgtggagaaacaggaacacgtttacacagttggtgtgaatgtaaattagttcaaccattgtggaagacagcatggcgattcctcaaggatctagaaccagaaatatcacttgacccagcaatcccattactggatatatacccaaaggaatataaatcattctactatgaagacacatgcacatgtatgtttattgcagcactatttacaatagtaaagtcatggacccaacccaaatgcccatcaatgatagactggataaagaaaatgtagtacatatacaccacggagtactatgcagccataaaagggaatgagtcatgtcctttgcagggacttggatgctgctggaaaccatcatcctcagcaaactaacatgggaacagaaaaccaaacaccacatgttctcactcgtaagtgggagctgaacaatgagaccacatggacacagggaggggaacaacgcacactgggaccgtggggggtttgggggcgaggggagggaacttagaggacaggtcaataggtgcagcaaaccaccatgacacacgtagacctatgtaacaaacctacacgtcctgcacatgtgtcccggaacttaaagtaaaataaaatcaaagaaaaagaaaagaaaaaaagaaaaaaagaaaagaaaagcatatacatagcttgaaaaaaaaaaaaaaggaaagaaaatgtaatcccagcatttttggaggctaaggcgggcggatcacctaaggtcaggagttcgagaccagccttgccaacatggtgaaaccctgtctctactaaaaatacaaaaattagccaggcatggtggcaggtgcctgtaatcccagctacttgggaggctgaggcaggagaattgcttgaacccgggaggtggaggttgcagtgagctgagattgcaccattgcactccagcctggacaacaagagtgagactctgtctcaaaaagaaagaaagaaagaaagaaaagtaacatacttaaaaaaaaaagtcttaaaagttctccatcaggaactaggaatactaaaatatatttttattagttacaaacttagtaagatattaaaataagagggatagcattgaaagttgagagaaaagttgggtgtattttaatgccgtgctgtcctgaaatgtcagaactatgtactagcccttcctgtaagggtaagagtcctagcaaagaattcagagtaaggtttttgtttgtttgtttgtttgttttaccaaactgttccaatatagtcctagaatgctgtaaaagccatgttaaattaaaccaaaattgataaagttaaaaaaaaacaccaattggtttatgatatatatatatatatatatattgatagattctgtttgctaatatcttgcttaggatttttcatctgtgttcaggagtagattggtctgcactttccttttttatagtgtccttgtcagatttagaatcaaggttgttagcttctttttctattatctcaaaaggattgtgtgaaattgttatttttattttcagcctgtttcaatctactgttaatccatatgatgagttcttagtttcagttactgcatttttaagtcctagaatttttgcttgatacttttaaaacagtttctaattatctgataacattttctatcttgtttcttattttcaaataattagcatagtgattttaaagtctccaatctagagaatgttttcagtagtttttgttacttttttttttttttcttgagacaggatcctctgtatgttgcccaggctggtccaacttcaggcattgagataatttgaacctaagttccttcagtgtctataggccttccagtttaccctcattccagaggtgattcctttaaattcaaactcagtgcacagtaggagtgaggggcattcactaaggcctgatgggacctggattctaaaacttttccctctagacccatgagtccttcaaaactgcagctcagctcttcagcttctcagtctttctttctggaattggcaacattccctagggcagaaatgtcccagcgcaggactcaattccctggtcctccaactttcttggtttctgtcttggaaattcttcactattttagcactctgttgccttcaagtagaattgctatttccctcttaactagtttgcgcttactagaaatggacacagtaactaccttctttccaaaaccgggacttcaaatagaaagttctgctgttggtgaccagaagcttggccgccctgcctctgctgtccagggggaagcaggtggagagaggggccctccatgcctgttctttccgggaggcaggcctcttctaggtgaacatccttatatttgcttagctgacagtgggtatttctttaaatgggctgtttggttataggagacaattagattaaaaaaaattctgaaagctgctgcttgccaaattttattgatgatgagtgagctttgcagaaaatttccaaaataggttcattgttcaagtcacctgcctttctgcttttgaatcctcaactcacacctgagcagtggtccaccaagtctgagccccccaagcctgaggcctgacagaggcagagtggatgggataagagggtgagcgcggaggtcagcacttctgaggttcattcctgctctcagatgtgatgcttctgggtaacaggagccaggccgggagtcatgtctgctgggatttaaccatgctctgccattcactggctgtgccagaaagagaaaaagcatctaatctcattttaaaaacaagggattaagagattattagctgattccagatgtggctgctcattcaaagtacccaaagaggttgtgaaaaatacagatgcttgagtcataccccacactgtctctaccccaggacctgagctgctgaataaaacctggaatatatatgtgtgtgtgtgtgtgtgtgtgtgtgtgtgtgtgtgtgtgtgtgtgtgcctgcatatgagtggcataaaataatcattcattattattaccattatcgcctgtcacagttccaggggttgacggggcctagtgaggcagggcctgctctgggtctatcatgcagggcagtagcagaagactgaggctggagtcattctgaaagcatccacttactttctttcttgctttctttctgttttttgttttgttttgttttgtttctgtttttattttttttatttttttgagatggagttttgttcttgttgtccaggctagagtgcaatggcacgatctttgctcactgcaacctccacctcccaggttcaagcatttctcctgcctcagcctcccaagtagctaagattacaggcgtgcaccaccatgcctggctaatttttttgtatttttagtagaaatgggttttcaccatgtaggtcaggctggccttgaactcctgacctcaagtgatccacccacctcaacctcccaaagtgctgggattacaggtgtgatgaaggcattcactttcgagtgtctgagctgtgggtcagaatacctgcacttagcttctcccggtggcagggacagaatctacatttttaacaagcccccaagatgattatcagttggctaggcagtggtctctgacaacattttaggaattactggacaacatgaaacttttagtcccttaaagttgtacagttccagaattcaagtttttcttttgaagtaaaaaataacttctgttttaagagaatacaggtgtttctcaaagcaaaatgtcaagaccacttttcagacataggattatcagaaattctaacaaaaagctggtagaatactgcccaatagaactctgtttattcagttggatgtgctttaatcgagttctcactctgtgcaagttactgtttgggaaggtgtagacttgtattatttttatggctactaacaaagattacacataatccagagtagcagtacatttaaggtgagtctacatttccttgagactcaaactcctgctgttgtttgtggaaaatgagtatctggggcaaaagaggaagtgagagcccttaaagagagcagaccttcctgcgaagctgcccgctgtgcttggcttggggacagccttgtatattgggccaaaaatgtttgcctccaatattgtagggtagggtgcatgtgactgccacactggcttcttggtgttcatcaccagacaaacgtctgttttcctgccatgatgctaaccatgtttagcatttgtgtccacttggtatgataactggctagacattttgctcctttctcaaaaacaattttaactagttcataattaatatgccacaagacaaactatggttcagcattgggtcttctgggtgtttcaggcattaaaaagaaaatttatttcggggaatcatactagtcaattgttacttttcatcattacagtttccagaggtttattggtggcagatgttgcactcttttttaaaaaagaaaaactaaaaaacaaatggacatctccccgatggattcttagtgaaatgagtctttaaaaagagaaaccaggggctttctcatagtaagcagaaatagaccaacttaggttttaggccaagtgatgaataacgatatggggggacatcatgtaaacaaactactctgtcttttaatgattcttatttcctaatttaaaactgcaacaatatccaggaattctcactttctggtgaagagtgagaaatctttatgggctctcatgattcagttgaaagcaagaggaaatgtgcctcagacattttccttgaacattctccttctgggcaggaagtggaagtgggcagtgttcactgaagacgtggccgtcagatgggaggaaaagctgatggtgtgacaaaatatctacctccccttcttggtgtgtttccttcttccctagtatttctttgctttttttttttttttatatacaacagaaatttatttctcacagttcccacagaccttgaagtccacagtgaaggcagattgagtgtctggtgagggcttgcttatggctcctgagtgggaccttcttgttatgtcctcgcgtggaaaaggaacactctggttgcttcggacacttgtaagggctctaatgccattctttttttctttttcttttccctcttctgtgttggattttctgtttattattattattattattatactttaagttctagggtacatgtgcacaacgtgcaggtttgttacatatgtatacatgtgccatgttggtgctttcctggtatttctaacttagaaactaaaccaaagctcagtgacatgtaagtattgggagaaagccaatcagatgattactgaaagtgattagggagtaaacctgtgtgcacagagctaaactgagcccttcttactgagaggggagcatcaggaactgccttcctttgcgacgatgaaaggctgtcccatctataggagaaaaggttagagaagagtcaagctttgttgtttagttattgggtgcctttagataaatctcaatttctccacagaaatttctgtaatactaaagtgtcaaaatttgctggaaaattttttaaatgttcaaaaaaatattgtacaaatctaagacagtggtgctaaaacaatactagttaaaaatggactttattttatttggtaagaatgcccatatttacaaataactccgtataaatccaggtctctgaaagcaatacagtctctgagaggagctcgatttgagtgttatatgtgtatatctttgcattcttgagtctgtgttttttcataaatttcattttcttttactgttaaaatataactactaattaaataaataattattatttactaatgtgcaagcactatacagttctttgtatggtgcataaaaaatgataaaacactgtctcagtcctcacagaatttacactgctcacattatcttgaaaatatgcattttgagatcagactgatttgtggattttatacgtgtgcttcctgagatcattgggtgatgaacaaaattgatcatggcctgagtatcaacaagattttcaatgtaacagccttcatcagataacataatgtgtttcttagaaaggaagttcaaaaggaccaattctgttagattgctgaccttgacctcctgtggccaaaaatcctgtttccctatgttttgaaaggaaacacgtttgagaaaagctccccatcccagatttggtgattttccttaaaggctgtttggagagacaacaatggaattctgggagagatctgacatcagcaggttcatctgatctctctcaggagagagaagtgtttgtttactctgctcagagtgctatattcctatgcatgtgctattattagagtcctttgaagtagaagagtcatatgtcatagacctctttgtaattaaaaactgtaaggctgtttttctgatatgtatgtagagtagatggagaaggagaaacacttgtttgttgaaaatgaattctgaggaatttgggagcagagctttgcaagtttgggttttctgtacaatgtcacatttatttatcttaccttttcaaatgtttttggagagatggtactaaagagaaaaacatgattggacctttgcatctggacctcaagaaatttataggaaattgagtggtatccagaaactgtgctgggccgaagttaattgggagtaatacttgccctgagtacatacattgtgaatatcaaatgaaataagtcatatgaaatagcttccagaccatagctattgaaaactgaaacatttgttatttatttggctcagcataacttaaaattcaaaatttaagaaaatcacaatttaaaaaaatgatatgcaatttaattattgttactctatagcaatataccctagagttttttacatgtgtatctaattttttaagtggctgcatagtatcctcttgtatgaaagtaaaatacatattctgtgttgatagacatttaaataattttctgtttaactattttgaaaaagccacagtgggtacccaagttacacatacttttatacattctcaagcatttcttattgatggtaaaatgtgtgaaaagagaagaaacgcacaaaagatgatatgctgttgaagatgtggactaattatgtttatatttattaaggaatgaaattttgcatgaggcaattaagacaatagagtgtaagagtaaagccatttaaaaattgtaaaaaacgggccgggcacggtggctcacgcctgtaatcccagcactttgggaggctgaggtgggtggatcacttgaggtcaggagtttgagaccaacctggcaacatggtgaaaccgcatctctccaaaaaacaaaaattagctgggcgtggtggcacgtgcctgtaatcccagctactcaggaggctgaggcaggagaatcacttgaactcgggagtcggaggttacagtgaaccgagatcgcaccattacacttcagcctgggcaacagagtgagacttcgtctcaaaaacaacaacaacaacagcaacaacaaattgtaaaaaacaagccgtcttggctcctgcctccaggaagatgcaatagatatacttttctctattcctcttgctaactacagctaaaaactgtgggcattacacaaaaagtaaatatcagaagactttaaaagatgagaaacaaaaaggactggctagggatcatgggacctgggtttttgtgttgcctcaggtattctagattgggtattcgagaaacgtaatgtggaaatgccaaaggatttagactaaaaaagcccaaaggtgaatctgtttcccaaatgaccaagaaaagtgtacttgctatggtttaaatgatggcatctcctgcaaaatttatactgcaacttaattttcagttcaacaatattaagaggtatggtctttgggaggtgactaagtcatgaaggcttttccctcgtgaatgagattagcacccttatcaaagggctgtaggttgaaagaagtgctctcttgccctttctgtcccttccagcatgtgaagacacagtgtttctctcctccagagaatgcagctacaagatgctatcttggaagcagagagcagccgttaccaaacactaaataccaatgccttaatcttggacttcccagcttccataaccaaaataaataaatatctattgtttataaattacctggcctgtgatattttgttatagcaggacagactaagacaccaatctaatgagacaacttttagataatatctgctctattccatcaaaatatcacagaagctgacaatatcccaaatttggcaagagacataaacctgtagattcaaggagctgcggaaaccacaataggataaactcaaatatttctgtgtcaagacacttcataaccaaacttctaaaaaccaaagaccaagaaaaaagccttgaaagcagcaagcgagagattacttgtaacaattcaagtgatagtggagttttcatcagagacagtggaggctgaagacaaagtggcacatttttcaagtgcctaaagaaaagaacaattaacccagaattctatattcagagaaaatatcttccaggaatgaagggaaaatcaagaccttcttagtgagtcaggctgaatagttactctcctccaaatgctcatgccctaatccatagaatttgagaacatatcaccttccatggcaaaaggacttttcagatgtgatttggttcaagatcttgaggtggagaagttattctggactatctgggtgggtccaatgtaatcacagggtcattataagaggaaggcaggaaggtcagtgtcagagaaaagaaaatgatgatagaaacagaggggaggtagagagtggagagagagagtttgtgacagatttgaagatgctacctgttggctttgaagaagaaagggccacaagacaaagaatgtagaaaaggaaagaaacagatcctccctagaacctccagaaggaactagaactgctgacaccttaactttagtccagtgagactcattttggacttctgacctatataacggtgagataatacatttgtcttgttttaagctacttagtttgtggtaatttcttacagtaacaacaggaaactaatatactcagataaagaaaaactaagagaggtatgttaccagcagacatgccttaaagaaatggttaaagagattctcgaaatagaaaagaaattacatttaaaaaaagaatcttggaacattgggtataaagaaagaacatggcaagcaaaaatagaggtacatgcaataggttttccttctcttgacttttctaaattatgtttgacagttgaagcaaaaatacaacaccatctaagtggttctcaatgtatgcatagggaatatttaagaaaattatattataaatggaagagagtaaaaaatgtaacagtagataaagtttctgccttcatctgaactgctaaattgtcaacacccattgtattgtatacatataatggaatacctagagtaaccacttaaaaagctatacaaagcaatacgccccaaacacatagagaaatcaagtcagaattctttaaaatcttcaaataatacacaggatagcaagaagaagatataaactgaaaaataagcaggaaacagaaaatgaaataacatatttcagccttaacatatcaatatttgcaaggaactgtccacaagaaactaatttcaaatataataataaaaggaggttgaacgtaaaaggatggtatgacatttcattttataggtcagcttgactgggtcagatggtgtctggatatttggccaatcaatattctgggtgtgtctgtgagggtgtttctggatgagattcacctttgaatcagtagactgagtaaaatagatttactctaccttccctaatgtgggtgggccttatccaatcatttaaagaccccaatagaacaaaaaggctgtgtaagagggaacgccttctccctgactgagctgggacattggtccttctggcctttatctttaggttgaaacattgggtctcaagcctaatggctttcagactggagcttacacccttagctctcctggttttcaggcctgtagacttggactggaagtatatatcagctctcctgggtcttcagcttgctagctgaagatctttcaggacaatgtagaacttgttagcctccattattgcatatctttctatatctatatctatatctatatcatctatatctatatctaaatagatctatctcctagatatatagatataccacctgttagttgtgtttctctggagaactctgactaatataaatgggaaaatattaatatatactatgtaaacaattgaaagtgcaaataattgatagaacacttgatagaaaatcagcaaggatacaggagaacttagtaacattatcatccaacagaatttagtggacttttacaaattattccacacaataagagcaaaatacccatccttttttcaactgcccatgggctatttaccagtatagaccatacgctggggataaaataagcttcaataaatttttaaaaatggaaattattcagagtatattctctgacttacaaaggtttcaaactagaaatcaatattggaaatataataggaaaaatctccaaacacttggaaactgaacaagacatttgtaaataattcataggtcaaagagaaagtttcaagggaaatttaacaaatatattaaactgaattaaaatgaaaatacacatataaaactctgtgggacacaactaaagcaatactaggaaataacttcatagcattaacacttacattagaaaaccagaaaaatctcaaatcaataatctaagctcccatctcaaaaacctagaaaaagaagagtacaaacccaaagtaaggagaaggcatgaagctataaatgttaaatagaaaattaataaaattaaaattgaaaacagaaaattaatggagaaaggcaatggaaaaaaaagttggtcctttgcaaagatcaataatactgggaaaagtctatcatgacaaagagaagacacaacttactaatatcaggaatgagacaggagatagcactatcaactttgcagacatcaacagagttaacaaatcaagactatgaatacctgtacatacataaatttgacaacaagactgtgtgtggtgttggcagagggatagacataatgatcaatagatcattctcaatagagatacacccatccaatttatgagaggtgcaaaagccattcagtgaaggaaagaacacttttcaataaatgctgctggtgtaactggttatccataggcaaaaaaaaaatgaacctcaatttcaacttcattccttaaacaaaaataagctaaaatgaattatggatttaatgtaaaatctatgaatcaaatatagataaaatgtaaaggtgtaaaactgacaagttaacataagagaatatctttgggatctaatgcttgtgaagagttcttggacatgatactgaaggcataaatcataaaagaaaaatcaataagttggactttattaaagttaaaaaccttagctctgcaaaagaccctgttaagaggatgaggaacaacctacagggtgggagaaagtatttcacaccacatataaaataaaggattcataactagaatttataaataaacctcaaaactgaacagtaaaaaacaatctgattagaaaacgggtcaaagatcttgagacatttcatcaaagatatacagagattgcaaataagcacatggtgttcagcattactagctatcaaggatattactacacatctattagaatgcctaaaatttaaaaaaatagtgaaattatcaaatcctggcaaaggtgtataaaaacttcctctctcacacatggctggtgggagtgaaaaatggtactaaccactagaaaataacatggtagtattggtattattattatttttaaactagacatacactacctcatgacccagcaattccacggctgtgtatctatcccagagaaatgaaaatgtgtgttcacacaaaaacctgtatgcaattattgatagtggctttgctggtaatagccaaaaactagaatccaccaaaatatccctcattaggtacatgggaccggatgtgatggctcaatcctataatcccagcactgtgggagggtaaggcgagaggatagcttgagcccagtagttcaagaccagcctgggggagacctcatctctaaacaaacaaacaaatgtaaggtaaattgttaaacaaactggtgtatccataccacataataactacccaggaataaaaagaatgacctgttgatgcatgaatcaagttggatggatctcaagggcattacgctgactgaataaagccagtctctacagatcacgtactgtgtgattgtatttatatatcattatggaaatgacaaaaccatagacatagaaaacagattcatggttgccaggagttaggggtggtggagtggggcggaatgtgggcgtaactaaacggggtagtgtggggaaaatctttgcattgatgtacttattatgtctctttattgtggtagtggttacccaaatcaaaatatgtagatgtgtttctttgggaactaggaacagaaatgggctagatactcagaatggcaaggagaattttttaggaatcttatctattttttttctcatcaaagatattaatttgaccaacaagtatttattaaatgccagttaccgaaatagctgatggaatacagagataattaaaatatgttctttgccttcaaatggctgacaatctagtacatgtgtaatctccggtgcaatgtgatagatggatattaacaaaactattgttggagggctcaggtgggtctcctgatgccagtgagaccccacccctagctgatgtgagaaagaattcagggacgagtcagaatgaagtgcagggcaagaagcctccattgctaagtgaaagcacacccttacagaagaagtgtgtgtgtgctcgtgagaatgacttgtgcacaatggagtttgggtttctaatttatgggtgtttaactaatgggtggaataatcattaggtattctggaaaaggaggggattgcagggagctgcctggttatcatcccctttctcccttgtttgggtttgtctggaagagtcatgaacatgtcaccctgactggcgttttggccattttctcccttattttgggttttctgttatcctgtgatttctttgcctagttcctgtttttgctgttgtttgggtttttccatcctcctgcgaccacccagtgctattcctatctcaaaaactggcgagaatgaggcattgaaaaggtgttgctatttctgatctgggaggaacctgcagagcctgctgctgtgaggatgaggaagttgtctcagtttggcacaaatgcctccatcctcttatctgttgtccaccactgatttatcacgtccctttctctgtgcacatggtcttgacctcagaatccttctgaaacacattctaggcagccagtaccaagcaagcagagtggcttcttgacatagaagaaaagtttcagttgagtaatcttagattgtaataatcactccccctacgagctttaaggttaacactcagggtgagcaatctccaaattaacagccttcaacatgtggtctgtgtttttttcatgtttgtgattctatttagatgtaaggtgtttaaaacattttaaattttattggttgtaaatatcatgaactattttatggataacaataaaattgtatgacatacagaccttctcacgatttctaaatgtggaattacacataggcaaccacaagctgtcatgagagttttttaaccatcttggtactctcacttcagtgatgctttaaacacacaggactcctttgcatgcagctcactccttgttctcaagtcctgcaggattcccagccttcatggcctccttacaagtctcagccctgctccagtctccaagaccaatcctgatttctgccgaaggcatttaggcaactttagcatatgctgagcctcagtatctggtcacctgcagcttttatctgagattttacaaccaagcttctacttagatcctatttgaaattgaaactcagaattagatattgctattaaagagttaatatttgtatcctccaaaatccgtatgttgaaacctgatccctaatgtgatgatatttagaggtagagctttgaaaggtggttacatcatgagggtgaggtcctcatgaaagggattagtgcccttatgaaagaggtcccagggaaatctctttcccttttttgtcaggacacagagaaaagcaaacaaaaagacagcagtgtatgaagcagtttcccaccagacactgaacctactgatgccttgatcttggactttccagcctccaggatgatgagaaataaatttctgctgtttataagccatcccatctatggtattctgttagcagcctgaacagattaagtcaagtataccgggcctggcccctaaatctctttttataagctttaagtaaactaggaatacaagaaaatgacattggaagaaaagaaacacatttatcagttgtagatgacatgacaatatacctaaaaatataataaattcaacaggacaggtgaggtacctcacgtctgtaatcccagcactttgggaggccgagtcaggcaggtcacttgagctgagaagtttgagaccagcctggccaacatggcaaaaccctgtctctactaaaaatacaaaaattagccggatgcgatgacaagtgcctgtagtcccagctacttgggaggctgaggcaggagaatcacttgaacttgggaggtgcagattgttgtaagctgagatcaaagccactgcactccagcctgggcgacagagcgggactccgtctcaacaataacaacaaccacaacaacaacaaatttacagactgttagactattaaatttttaaaaatggctttatataagatggaatacagaaaaaagtattactttcttttactagcattgaacaattagaaattaaaatgggaaaaatcacattcaagataatgtcaaattagtttgtaaagcatctaagaataacttaataagagcactatatatatttttattaaaggacataaaataggactaaaataaatgagacatagtaataattcctcacgggaggaagactaaatgacatacagatgctgttccttcccaagtaaatttacaaagataatgcaaatctgattaggatcccagtgaattgttttgggaaatagacaagttggttttaaaatttgtttgtaacaatgaagttagcatttgaaaagaagaatcagaaggggaaatttgctccctaagataacacataattacttagataaaaatggttgggtaatggtatagagatagagaaatagatcagtggtacataagacagaatgtagaaacagacacattgatatatgtgggtttatgtagtgaatcttataattttatgttgcctgaacatgcattttgaacatttaactttctcttatcagtagcagagttagtctgtcttgacagtctccagttttatgctccccccactcccacacccagttgctcagtgttgttgattcagctatctgccttatataactgcctcctggtaaccccctccctatgggacagctggatacaacttacctgactggccctgctgatccccatatcctacatggacagtgcagatgtgctacagtgaccacctctcagtcacggtgtgacctggaatttgtgcctgctgctttgaacctactaactaaaactcctcttgggaaatctgtttgaataatgtcctggactccaataaagggactggcccacggatccctctcccaacacactccctgacctgtgtgtgtgtgtgtgtgtatgcaatgtgtgtgtgtgtggcctccaggcatgctgtgcaccccatgaacctgtaagtagtcaaatatttatttccatcttatatctcatctatctaatcattgaaggagtggtctccatccaaaaaaaaaagagaagattctaagtaaaaacagtttaatattacgataatgacagtattttgaaaaaacaaacttactctcacattgcatgatgtaaatataaattgtaggtgaattaaacttctaaatgtagagaaaaaacattgctaggttaactatgctgcaatatcaaaaatatcttaagatcacagtagcttaacataggaaagtttctttttttttcttttttttgagactgagtctcactcttatcacctaggctggagtgcaggggcatgatctctgctcactgcaacctccgcctcctgtgttcaagcaattcttctgcctcagcctcctgtgtagctgggattacaggcacgtgccaccatgctcagctaattattgtatttttagtagagacagtgttttgctatgttggccaggctggtcttgaacttctgacctctggtgatctgtctgcctcgccctcccaaagtgttgggattacaagcatgagccaccacacccagccaggaaactttcttgattatgtgaagtctgaagtgagcctggagattcttccaaggaagcttccttccatgtggtgactcagggattaaggctgcttccattttgttcccacaaaatttgaaccatttggtttcaaggtgtactgctgaaatggaagagaaatctgaaggttcacacaggggtcttcacgatcggggtgaaaatgacatagaactgtctatgtcacctctgctaacatctcattggctagaatgagtcacatccatgtaacttaattccgaaaaaggttggaatatggtaacatacatggatattaagtcagcattaaatatctcaatcgtaaaaagtataattatcaagaatagatatacatttttataaacttggggttgaggaagcttccttaggattatttagaaaagaaaaagcaataaaggaaaaactaaatttaacaatagaaaagcttaaaataattaaacagtgaaggatgccaaaaacaaagttaaaaggcaagcaacagattgagagaatatatttgccacacatacgaattacaaatgttaaaatttctaaagtgcagagtttctataaagaaaaaataggccaggtgtggtggcttacacctgtattcccagcactttgggaggctgaggcaggaagattgcttgagctcaagagtttgagaccagactggacaacatagtgaaacctttgtctctacaagaaataaaaaaaatcagtcaggcatggtgatgtgtgcctgtagttccagctactcagtggggcagaagtgggaggatcacttaagcctgacgggttgacattgcaaggaactgtgattgtgccactgcactccagtctgggtgacagagtaagaccctgtctcaaaaaaaaaaaaaaaatatatatatatatatttatatagatggtcagtgatataaataatatatatattatatgaggcagtccattgtagtattgtggtaatggcataaaattgaacacaatttaattttcaataagagtctgactaaatcacttacagtatggctatacaacagaatatcacgtagtcattaaaaaagaacaatgtggatctctatacactgacatgaacaaatattcttgatgtataagtgaaaaaaatgagatgtagatcactacggacaatggtgattgtaatttgggaaaaaaattaatgatatataaataaatagataaataatataaaacaataaaagtattaaaatatgacaaaatagggaaggatatggataaaactttacattgttaatcgctaaaaagtaggaaggcattcactttgtaattcatagaattttcttttttttggctcaatcttttaatataaaaaattcactgctgtatacaaaaatgtgaaagtgtgacaatgacaactatgaaatcctgtgaatgaaagtcccctcaaatgcactctgtggtgcacatgcggccgcccacaaaaactctggcgtggaaacaaactcatgcaaaccagtgctgccaagaagcgccaacacgtgtgttctccattccaccaatcacagaccaatatctactccaaacatccagtaacaaaaaatgtggcatcttcccaggaacagcaaggcagacttcttactcacgatggaccagcacaaataaacccagcaaaaagagcacttcatacttatgtttaggatagtcattcatgaggctcgtcccaattccaatataaggaacaaatcccctggctctccccacgacatcttttttctctagccaatgttgatcttgtttatagaggcctctgtcatcaaccgcattattatctcctttggtcaaaaacttgatatgcccattttgcttttcatgaatcttcaagactcggtgaactataggaatctttcttccttctatccttagaacagcgatttctcccactcgtatgggatcttcaactcgatttgttagaaagagaagatatcctctatgaaatgcaggttccatgctgccactgagcaacacaattggactttcacttccagttattaccattaaccccttccagatcatgagtgctgatgagacaatcattccaaaatttaggacttgataatagagccgccacttgttcatccactgcacatcatccaaaaagactagagacagtatggtggggatggcgagcaggacaccggcaagggagagggtgcgaggaccagcgggcagaacgactggcctgtaattcagagttttctaagtgataacttttgtctttttgtgttctgggcatggtttaaatagaaaaccttcaataatattcactcattcatttatttatctacccatctatccaaccatccatccatcgttccatccattcattctatcatacctaagaaacattgattaaaagtctatttgtaggcattgtgtttgccatgcacattcaagtcacatttagtttggcacagcttggaataagaagaaaaatgcccatgtgttttttcctttttcttctagttgactattttaaaaccaatcaacaaaacgtaaagagtctggccctgggcttcttgcacacaacatctgttttggcttccctggcctctggcctttgtctgccctgtagatgacagattagtcggggacatccttcatagtaggaaatggaggtcaataaaatttgcaccaggcttttcaatttagtatcatcccagtcaggacatcccaaaataaaatttgttttaaaaatagatctaggaggagaaaaaagattgaaaacaaacaatcctcttatgtcactaattctgtgagaaaacctgattgaaaaacaaatcagtttcttgttcaggtgcaatgattttgcgggtagaaaaaaagcagaacaaaaatagtgtaaagagtccagtgtgataaaggatactatagagcaaaacaggaagttgtttaatggaagggagtaattgacctcagagcctgagacgtgaatagatccttggatgcagaggtttttgcatttgtaaagtgttgtatcgatgctttattgaccagatttgaattgtacaccatggattctttctttttttgagacagagtcttgctctgtcgcctaggctgaagtgcaacagcgcgatctcggctcattgcaacctccgcctcctgggttcaagcgattctcttacctcagcctcccgagtagctgggattacaggcatgtgccaccacacctggctaattttgtatttttagtagagatgggatttttccatgttggtcaggctagtctagaactcccgacctcaggtgatccacccatcttggcctcccaaagtgctgggattataggcttgagccaccgcgcctggctggacattgtaaattcttactctgataattcaagcaaaatttcttgaattaaagaggagtatgagggaggctgttgtgaggtaggtttaatttttatcttcattctgatcttacaggggaggaaatgaatgctcaaagagattctgtgattagtttgtgatagagccagtaaatagaagaacccatctcaaaccaggtgtaccaaccccagacactggcagaacgctctctttatgtaagacctcaaaatcttactggttggtgtctgctgacttgtttttctctgttatcttgcctgtctgcagtgacaaattcagtgcagctctaactcatgtggacagggaggaaatgattctaggattgaggacttaagggtgtctggaagagaagagaattgttttgttttgttttgttttgttagttgttgttttcctcagacaggaccttgtcaacgctttcaaatatgtaggctgtttgctgtttcctttatgttggtccctgagaaggatctgcccttctaccctgtttccctggggggtgtggacagagcctttgtctttggggaagggggtcatcttgggaaaaggagaacagggcatcctgaggacctgctccgtctaaggagagaaagccgaacagatggcagctgccacgcagagggcactttgtaggaactctggctggagcaggcttcctgcgctccaatgccaaatccttcccttccaaggcaatgcagaggaacctgatgatgtggcttggggccagtgggcttgtggccaaagagcactaaatcaaagcaaagaagaggtgacaccttaaaagcaaaagacatttcatgtttgtttgttttggaaggcagaaagaaataagttgtaattgcaaaagagtagaagatataaaacaacatggctgtaaaatattttaatgttatttgtttgtaaaaggcttttctttaatgaatatgctctattcttattaagcaactttcccatttcactaaatgaggatggtgagtttgtaatttctggttttacctgaaaaccggtgacctggtgttagggaggctcttatccctttaaaataaacataatgcactagtttgtaatctctgcaggtatattaaaatgtttgcagtgataaacatttctagctttaaaacttttatctcttatccgaattcaagatctatgtctttaatgaactctttcaactggacattcaaacatggaaaatgtttctagattctcatctcccataatcagctgagaatggctgtgaattcccagaggaagacctgcggaagacagggctgagcttctggaggcaatattatgggagcatagatcttggggtacgtttcctcagaacccaggggactcctaggcactcactcatttatcatgatcatacgtttaatcttttttacttatgtttcaggaatataagaaaatgtatgttttaaaagcatgaacactcatacttactgaatacaatgcctgactaagaaacaaggctttataccttattaataaggagaaaatgccaagctaccaaagcatacattggaaagcaatatgacagagtagaaataatgctagctttattgttcctttacatttattagtaacctttaatgagcttctgtttgtgtcaggaactgaagttgcagagatgaaactctgaaattacaggtgcccatcaccatgcccagctaatttttgtgtttttagtagagacggggtttcgccatgttggccaggctgttctcgaactcctggtttcacgtgatccacccaccttggcctcccaaagtgctgggattacaggagtaatgcagatgatgaaagataccctttcctgactcagatgtgatgagagacttgtaagacacacacacacacacacacacacatacacacacaccctatactatacttcaggaagtgctgtggcagatgaaagctctgggaactaagagatcagcagtaaagggaatctaacccaaagtgggagcagggttaagccagacaactccggaaagaaggatgcagcaggcaggaggaacagcatctgctaaactctgtggtggggcagagcacttgcacacaggcagctgccatgaatatgattggctggtgtaggctgtgctgttggtggtggagaggaattgtggggggcctgggtatccacaccaaagagctgaggctttcagcaggggacccaaaagttcacatctgtttactcagagactaaggtggagatttttgcctggaggggtctgaggagcacattagaagctatgcaaacctgtcgaaattgtgtgcaatatgttaggagtatgtgagggtgggtaggtgtgtgtgatgtgtgcgttttcccctgggaaggtttggttatgttcttccatcttaaaatgtgtcataactctcagaaagggtgaggagctcaactaggacagaagagggtgatcagattggatggttattgcaatacttcagatgactaataatgaagtcttgggctgataaagttgtcctcgggatggatgggccaggacaatttcagagaaaataaagatatggtgctgacaggatgtgttatctgattagatctgcagggggaaggggagagggaggaagctgcccagtgcaaggcctcttgaattgtgacctgcccatgagctacctggggctcctgctcgagtgtagattctgactagaaggcctggggaggacccagagattccacatggctaacaagttctctggtgatgtccatgccatgccattggtgctgagtagcattttaagtcacaaaagtggaggtagcatactctaggtccaattctcaaccttggctgtcgacgctttctctgtttaatgattatggggcttggcattgtgagcatggtaggtggttggacagcatcactgacctctggccatgagatgacagtagcactcttgggagtgctgaggagacaaacaaccaaaaacttctccaggtattaccaaatatgcaagggcgggagtgggggcgaggcactgatctagaggttaaccactctggcttcacgttaaaatcatctgaggagttttaggagctatcagtgcctggcctcgcccagactgattatattctaatctctgcttgggggttggggagggtgcccacccagctttcgggaagtccagtgtgcaaccatctccgtggttgatggggcagcccggctgataaaacccaggactacacctgaacgcaggaagaggagcagtgtgggtggggaggtggcctgaggagtgaagataagacttcagatttacatgttgatacgagggaaatgcctggggctcatttagatggagatgctcactttgattttcttggttagtgacaagctctgtggcctcgtatctatgaaatatattttcaggtttttattttactcgtcaattctgatagtatctactctatgaatagagcagattgatgaaaaggtaaaataaatgaatggatgtgaaagaaagtaatagctgtcttacactattgcacacacacatgctcaagagttcttcagaattttatttgaaaaatcgtattttgaaagttttggaaaacacagaacaacattctataatatcagggcaagaactgatttctagaaaaaagaacaacaaacaaaaagcacaaatcataattgatgcattcaagtaaattaaaaagcaccatcaggaaagttaaaagacaaagactgaatgaaggtatttgcatagcatataattgacaaagctttagcataaagaatatgcaataaacccctaaaaatcagttacagaaagttgaacaacccaagagaaaatagacataagatatcaataagaaagctacagaagaggaaacagaaatagccaatatacataatactacaagatgctcaacctccacaatgatccggcaaatggcagctggagctgcaatgtatactatttcttacctaccagataggcaaaattttacaagtctgatacaatgaaatgttgctgaaatggcaaggaagaggaaactcatgctgctggtagggatacaaattagtactacgattctgtgagcaatttggcaatattaaaaattaaaatgtctaataacctgtgacaccgtaattccattcgtaggtaagttgtttacgtgcagagatgattgctgcagcattatttccaaaagtgaaaaattgtaaatgccctaaaggtctatcagtaagagaatggctaaataaattacattccttttaacataatggaatttgtgtatttttatgaatataaataaattagagctgtagatattaacatagataaatatcaaaggtgactgaaaaaatggtaagttacagaagctgtaattagtgtatcctgtttatttaaaatgtaaaaaatacaaaacaagactatattttatttacattggcatacattcttactttaaaaagaatcaagtgcatgcacggcaatgttgaaaaccaaattcaggatattggttctttgtaggggagagagaaatgagattggggagagtgacacagggtggagaagttaaatagtttgccctggtgtcaatagcttagagaacaggagagcctggattatacctcagcctccggccccagaacctgaactcttatgctctgtggttcatcctgaatttaaactctatctccatattgaaaaaaagtttcctggatgagctgttgtgctcaatctgctcatgataatttaattggagaaattattggttattgataaataatcttaaattttgtgattcaatcttaaaatatttctagcacagcatttcagtactagcaagtatcatagtataattgtgtgactacctgtattaccttttttaaacctacatttgatgtataatacattgactaaaataaaattcctcatcattgaaagtcaaagattcagtacaataatgattttttataaatcagctttctattcctttttaaatctgttttctactctcaaaagttctaaattttctactaaaaaaattctagtttgataagattttgtgaactttataaaaacatctctttatactgagaaggaaggagtccataaatcttgagtttgagcccatgatatggttgtttggctcctagaagtgtctgaaataggacccaacatgtacacggagctttcctaatttaaaagttccttcatgtacatgctcaatctttgtcttcgagctcagattgctgtaaccaagtcccatggacccagtgacttacaaacaggaatttatttctcatagttctggaggctggaagtccacaatcaggatgccagcacggttgagttctggtgagggcctcttccaagttgtagagtgctgacttcctgtgtatcctcacgtggcagaaagacagccagcaatctctttggcttcttttcataggggcactaatctcagtcacgagggtcccagcctcatgactttatcacctcccacaggtcccacctccaaacatcatcacattgggattacagtttcagcatatggatttttggggggacacagacattcagtccattgtacccttgaacccaaggattctgtggggtgggtagatgctatttgttacactcatcaatttgcaattgataccaaagagcagtagtttaagtgatttgctctgagacccagtgaccctgtggggattggagccagaattgcaatgtaaagcccttggtgttatcacttgtgtttggttcacttggacctgctcgttatcatgcacagaaccattgctcactgatttgacccctttctcttcactggagcagctctccagaccaccatggccttccctgcacatcctccttctgtccagagcagcaacaattcttggctcagttcatcacttcccccttgaaatgctctctggcttctgggacctcctctcttgctctttctcagtcactttgcaatctccacacttctaaatattggaggtctcaggactatgaagttctcttgtatctacatgcatttgttattttttaaaatttaaaatatcataaagacatacataaatcaacagagaagtaaactctaggaaagaccttggcttttgatctatgtacctgatcactactcttagagtgagaattaaactattttcagagaacagttattggctgatttttattacactttggatgatgttaataccagaagtgtcagtataagagctaggcttacacagcaaaggcttcggaaaaccatttcccccccatcctcaagttatgaggcagattaggagctagaaggataatgggcagtgttcatagcaatgggaatttagcaattttatcggcaaattaagaggaggagagatggtgagtattaaatgtggccatttcaaaatccttgggatactgtgttaaccctcaagagaagcagcagataaggaaccagaaatacatttggcaccgagaggctggggacacatagccaacaaaacaggtgaagttggaagagacatgatgaagtagtgaagtaaatttattgtatatcagttgatgatatgtgctaagaaaaagaaataattagtgggatagagagtgatggtgtgaaagtgccattttttacataatgctcagggaagtgctaaagataatatttgactaaaggcttgattgaaaagaggtcaagctagctttggagtttctagtaggcagtttgagatgtacaatgattggtaaggggtgggatgtgagctggagtccagattcaggacttgttggcacatagcgggtattgaaaaccatggggcaagatgaggtcatctagtcaatgtttaatggccatgaaaagagcaaggcccccaagagatgtgggatatctcaaaggaagtgtaccaaagctgactgggatggatggtctaagcagggaggtggataacccaggtggggtgatatggtttggctgtgtccccacccaaatctcatcttgagttataactcccacaattcccacatgtcgtgggaggaactggtgggaggtaattgaatcatgggggtgggtctttcctgtgctgatcttgtgatggtgaataagtctcatgagatctgatggttttataaaggggagtttctctgcacaagctctctcttttgcctgctgccatgtcagaagtccctttgcccttccttcatcttctgccatgtttgtgagacctgcccaaccatgtggaactgtgagtcaattaaacctctttttcttcccagtctcaggtatgtctttagtttccacagtgtgaaaacagactaatacatgggttgtcatggaatgcaaaataaaagtctttcaagaaagggggtgggtgttagtatgtcttttgctgctatgaagtcaagtaaagaaaggattgtgaagttgctattatggtagatcctcttcaaagatggccccaccaattccttcttctccgtatgatacacatgcctatggggtgatagctgaagctggatctagaggaaaaaggaatttttttctttttaaagataggaaattctagagcatatttgaaacaagacagaaggagaaatagatgatataggttgtaaatggaattccgaagtgaaaaagcataaggcctttgataggacatttcattgctagcagtagaatggggtgcacagtatgggaaaagaagcaagtggattgttctttggtggatggaagatgaagggcctcctagtgatagttcctagcttcttcgaaaggcaatgctaacatctgatggggccaggggtgtgtatttttatgagaggtttgagccaagaggaacaaacaaaagggagaaaaaaaaaccctctgcccctcctattttgttttcactatatgagctgcccaggttcataaactattagtgactatttttatattaagcacaaaatattagaatttaagtcagaattgaattttttcttacaatttcactaaactacgttttaaagtttacttctctgtttgtaagacccatttatcttcaaattttatgttcaatataaacatgtaaatgtaatttattaagaaattattaaatggaaatacttatcatttatgtttagtaattagaatctgtctttaccactcttttttaggaagaaaagtgaaaaccatcttgataggttttagaatgagattttcatgagagccaatgcaatgtccatgcttgtttatgacatatttgaagtgcttaaaggaaatatccatggattatcaggattttaaaaagtcatttgtgttgtcaaactctctaatgcacaatattggagtgccaccacaaagtcagctaaaatatgctaaaggtaattaaatatgtcttagagttgttttttctcttttggggggtttgagttttagagctttgtttgattgtttgtaagggttag

SEQ ID NO: 40 - DNA, 148666 bp, Homo sapiens
ttgccaaataatattccatagtatgaaggtatcacattttatttatttattcatccattaatggctatttgggttgtttccactttttggctattatgaataatgctattaatatttctgtacaagtttttgtgtgaacacgtgcttcaattctttggggcatatacctaggagaggaattgctgggtcatataggaactctatgtttaaccttttgaggagctgctagagtgttttccaaagcagctgcatcattttatattcccactagcagtgtgtgaggattctggcttgtctatatcctcaccaacacctattattatcgactctagccatcctagtgggtgtgaaggggtatctcatgatgactttgatttgcatttccataatgactaatagtactgagtatctcttcacgtgcttgttggctagctgtatatctttcttggagaaatgtctgttcagatcctttgtccattttttaaatagaattacttgtctttttatttatatatattttttgatacggagttttgctctttttgcccagactggagtgcaatggcatgatctcagctcactgcaacctccacctcccaggttcaagcaattttcctcccttaccctcccaagtagctgggattacaggcatgcaccaccacgcccagctaattttgtatttttagtagagatggggtctctctatgttggtcaggctggtctggagctcccaacctcaggtgatctgcccacctcagcctcccaaagtgctgggattacaggtgtgagccaccacgccaggcctattatctttttatttttgaggtacaagaattcttaatgtattctagatatatgtcacttatcagatatatgatttgtaaatattttctctcattctgtgggctatattttcaattttttgatagtgctctttgctttatataagcttctaaggttactcttaaattaatacatttttagcattatccaagtagaaacatggaacatgaatacatcaatttgaaccattttcaacctctgcatagtacttaatactatgactatttagaattaatttattgattcattattctgtcagtggaaacttgggcttgtgccagtatttggctgtggcaaacaatgccaccatgagcattcttatccatgtctcttggggcacatttccaagtgtctgttgggcaaatacaaggcataccttagagatagtgtgggtttggttcgagaccactgcaataaagccaatagtacaataaagagagtcacataaatttttggattaccttgtgcatataaaagtcgtatttacaccatactgtagtttattaagtgtgtaataacattaggtctaaaaaaaaatgtatagaccttaacttcaaaatacttctttttttttttttgagacagggtcacctagtgacagacagactctgtcacctaggctggagtgcagtggtgcgatttgggatcattgcaacctctgtctttcggcttcaagtgattcttctgcctcagcctcctgagtactgggattataggcatgcaccaccatgcttggctagtttttgtgtttagaagagatgggtttttgccatgttggccaggctggtttcaaactcctggcttcaagtgatccaccagccttggccctccaaagtgctgggattacaggtgtgtgccgtggcgcctggcctaaaatactttatttctaaaaaatgttaacaatcatctgagccttcaacaagtcttaatctttttgctggtggaaggtcttgccttgaggttgatggctgctgactgatcagaatggtggttgctgaaggttgaggtggctgtggcaatttcttaaaataagacaataatgaaatttgccgcatcgactgactcttcctttcatgagagatttctctgaaacatgcaatactgtttggtagcattttaccaatagtagaacttctttcaaaattggagtcaatccgccaaaccctgccactgctttctcaactaggtttatgtaatattgtaaatactttgttgtcattttaataatgctcatagcatcttcatcaggagcagattccatctcaagaaaccactttctttggtcatccataagaagcaactcctcatccattaaaattttatcatgagattgcagcagttcaatcacatcttcaggattcactttaaatttcagttctcttgcaatttctaccatcagcagttatttcctcctctgaagtcttgaaaccctcaaagtcatccatgagggttgtagtaaaattctttcaaactccggttaatgttgatagtttgaccttctcccatgaatcataaatgttttaatggcatctagaatgctgaatcctttccagaaggttttcaatttactttgcccagatacatcagaagaatcactacctatggcagctatagatttaggaaatgtatttcttaaataataagacttgaaagttgaaattactccttgatccatgggctaccgaatggatattgtgttggcaggcaggaaaataacattaatctccttgtacatctccatcagagctcttgggtgaccaggtgcattgtcaatgaacagtaatattttgaaggaagtattttcttccgagaagtaggtctcagcagtaggcttgcaatattcagtatgccatgctgtaaacagctgtgctgtcatccaggctttgttgttccacctatgaagcacaggcagagaagatttagcggaccctaggattttggaatgtaaaatgagcattggcttcaacttgaagtcaccagctgccttaacccttaatgagagccagcctgtcctttgaagtcaggcattgatgtctcctgtctagctatgaaaatcctagatggcatcttcttccaataaaaggcttttttgtctacactgaaaatctgttgtttggtgtagctaccttcatcaatgatctttcctagatcttctggataacctgctgcagcttctccatcagtatgtgctgcttcactttgcacttttatgttacagagatggcttctgttcttaaatttcatgaagcaaactctgctagctttcaacttttcctctgcagcttcctcatctctcttagtattcaaggaattaaagagagctagggctttgctcttgagatgagggtttggattcagggaatgttgtagctggtttgatcttctatccaggccactaaaattttcttcatatgagcaataagtctgtttcactttcttatcattcatgtgttcactggagtagcatttttttttttttttgagatggagtctcactctgtcgctcaggctggagtgcagtggcgcgattgtagtagcactttttttttttttttgagacagagtctctctctgttgcccaggctggagtacaatggtgcaatctcggctcaccgcaacctccacctcccaggttcaagcaattctcctgcctcagcctcctgagtagctgggactacaggcacgcaccaccacgcccagctaatttttgcatttttagtagagatggggtttcaccatgttggtcaggctggtcttgaactcctgacctcgtgatctgcctgcctcagcctcccaaagtgctgggattacaggcgtgagccaccgcaccgggcctggagtaacacttttaatttccttcaataacatttcctttgcattcacaacttggctaactgcgcaatgcaagaagaccggcttttggcatttcttggcttttgacatgccttcctcactaagattcttaatttctagcttttgattgcagtgagagacatgcaactcttcctttcgcttgaacatgtagaagtcattgtagggttattaataggcctaatttcaatatcattgtgtctcagggaatgaggacgcccaaggaaagggaaagagataggggaatagatggtctgtggagcagtcagaacacacacacatttattaattaagtttgctgtcttatgtgggtgtggcttgtggtgcctcaaaacaatgacaacagtaaggtcaaagattcctgatcacagatcaccataacagtgataacaccataaaaacaaagaaaaagtttgaaatcttgtgtgaattaccaaaatgtgacacagagacacagagtgagcatatgctgttggacaaatggtgccaaaacccttgcttgatgcagggttgccacaaacattcaatatgttacaaatgcagcatctgtgaagcacaataaagcaaagcatagtaaaatgaggtgtgcctgtatctagaatacctggacttagagaatgtaggtcttcaggcttatttgatatggttacagtttttcttttttctttttttcctttttgtaccagcagtgtattggagatctcagtgtgggacgtctttgctaatacttggtattgtttgacatttaaattgtagctattcagatgggcatgaattggttctgattgctgtttttaagatgtggcctgactgtcaagccttcagagaacaggtaagctgctgggcctgttttgttatttgtaaagcagagtcatgaaattgtggccataatatgctcttgtgtattcagagttctggagacccacatagaaagagaacaatatgaagaactttatgagatacttgtatggttcctctgtacagtagtagttggctgtattacatcattgatgatttttattatactaagtatggaaaatattttaaaatctgtaatgtaaacttttcgcaactgaatagtataaagttctagaaatttattagtgtaagccatttgcaaattctttagcccctggaagtcctgtaaaagcaggatcattcccatttccattctttgtctccacccttcatttagtcttgctgttaataatgccaattccttcagcattttctcatatagttccactcaactctttaatcttgtaaaagttattgttttttttttgatactgcatacataatgcatgcaaactttgcataactttcaaaattaactcctcttccaagatgaagattaaataactgagaccactatggtgtttcttgtttgacatttttagcagagtggaatgttaccagatagcccgtttctagatttctcatcaaagttatacttaaatcaatatgttagtatttaggtaagaaagaaacttttcatggtaaatgaaggtttttctctcagactagagtctcatttggaagaagactaaggagaagcttcaatttgaattgtgaatagaccatgttgtgcattgtgaaatatgactagaacatgtttttcagtggagtttctcacatgggtgttgatctgttgcttttaatatttgtaggtagatcctgcagagtaaaacaagcaaacaataatctactaataagtgagaagctttctttttttttttcttgagacagagtctcactctgtcacccgggctggagtgcagtggcatgatctcggctcactgcaacctcccacttctgggttcaagcaattctcctgcctcagcctcccgagtggttgggattacaggcgcccaccaccaagcccagctaatttttgtatttttagtacagacggggtttcatcatgttgtccaggctggtctcgaactcctgacctccagtagtccacccgccctggcctcccaaagttctggtatcacaggcgtgagccaccatgcctggctaaagtgaggagatttctacacggagagctttataaatgttgtgtcacttaatttacacaatgtgtttttttctaaaggtattttaacaaaatggttctcttacggaacgtttatgtgccactgtgttcagtttgcacatacattcattatatcattttctgctgaccagggtgtcactagacactacctcactcatcctggctttagctattttccagaatcttccacagatggtgatattaatttaggctctgaaaataaactaaatattatagtctttggatatttccctccagtaagttttcaaaagccaagaaagttcaagagtttgattaaaaatagttggccttcttggctatcaattgaagcattctccttcagagggaaaggtaaagtcaggaaatcctgagatgttctgtctaaatcctactttactgaagtgataaaagattaaaggtcagcttcaaagttatttttattgaaaactgggcagacttcagtttgcaccagattttcttggcccgactctttctttttctttttctttttttttgtgagacagagtcttgctctgtcgcccaggctagagtgcagtggcgtgatctcggctcattgcagcctgtgcctcccaggttccagtgattctcctgactcagactcctgggtagctgggattataggcacatgccaccatgcccagctaatttttgtatttttagtacagacggagtttcactatgttggccaggctggtcttgaactcctgaccttaggtgatccacctgcctcagcctcccaaagtgctggaattacagacatgagccattctgggtgaagcttgggactatctctgcagctggtgggaccttgcctatggaagtgcctcaaacgaagggatgtcgggtgcagagaggagaggttctgaccctgttcccaagcccgtgatcatccagtggtagcacaggctttgtatcaacatgactgtggatgtggtgttggccagacgtggaaacaacaccctgcatgggagcagatttgagttgatgaagaatgaaaatgtcccacttcacaggcactgcaggtgtctgacttctctgctggtggcatctgcctcttatgtggttatgaaattaaggagaaacctggattaggtctgctcagcagtttagctttgccacatattagctgcatgtcatttaacttctctgtgcgtcagtaccctcatctgtaaattggggatactaatagaacggtcccatagagctactgggaggattaaatgagattaaacatataaagtgcaggaatagtgcctggaaaagggaagatgctcagtaaatgttagataggatgattactgtactattagtaatatgtccaataaagtcaggggaaaataagttaatccttaatgaagccaaagagttgtctgaataaacctttagcagttttagagatcaatcatgtgcattcagtcatgtgcattcaattagaatcaatgtaggtcttctcaatgcatatacaaattgaacttaaaggagaagttggccaggcacagtgactcacacctgtaatcccagcactttgggaggccgaggcgggaggatcacttgaggccaggagttcaagaccagcctggccaacatggcaaaaccccatatctactaaaaatgcaaaaaaaaaaaaaaaattagccagatgtggtggcgcatgcctgtagacccagctactcagaaggctgaggcaggagaatcgcttgaatccgggagggggaggttgcagtcagcagagattgtgccactgcactccagcctgggccacagagccagactctgtccaggtctaaccctggggttttctcatgaagagcagagtgtaggaagcctggtgagacctgagtcttatccctagagagaacacctgtcagccgagaccatttgggaagcaggaaaaataaagagaagcacaaacagccacagactaatttcaggaaatagtagtaagggagagtcgctgagcttgtcaaaccttggtttgagtttggaggtgagatgaaaaagcaggaacgacccctcagtccttcataagagagacaccatactccaaaagtttccagagtgtgatgtttaaaactgggatttggttagttttttttttttttaacttttaatgtagaaaattgtacaagtcacaaatacgcaggttaatttttttaattgtgataaattatacataacacaaaatttattattttaatcattttgggggcacagttcagtggtatcaagtacattcacattgctgtgcaaacaccaccattcatctcaaaacgttttcatcttcccaggctgaagcttcattctcattaaacacagatcccccactcccctgtcccctggcccaggccctggcaatccccattgtaccttctgtctctacggattcgactactctgggtacctcatgtaatagaatcatacagatttggtcctgctgtgatgaactcatttcacttagtgtaatgccctcaaggtacagcttggtgaattttataaacttgaaccacctatgtaaccagtgctctgacagagaaacacggcattgctagccacacagacctccctgtgcccacctctggtgagtcccctctacccttgcaggaccccgagggcaaccttgtcctttgtctatgcagagaaggaggcagaagggggaagactaaggtttctgcctcttacctccccagtagggaagctgcacattttatctgtttcacacattaggctttagtgtctctgccaaagaaaatttggaaactttgacttgggcaatgtttatatttcactcccagattgtacagataaatgccttgttttatttagtctgcctttgttcaactaactcccatttttgcaactctgtttaggcagcctcttctgggggaagccttcaaccctgtgcatcccacaatctggagacactgttggctgactgtgacttaccaccagacaaatgcccaccagaggacagtctccttggcatctgtgtaacctcaaagcccagcacggtgtccaacactcagtggtttctacaatgcatgtttaactgagcagagctgaactagtgctcccagggaactgactgatggaagtctgtcttaaaagctgagctctataattttgcagctgtttgcccttggagacgtcatttaacttctctgtctgggactctggcaatataaggaaagtgccataatattaatctgaacaagtgcccaggcaactcttaagtttaacagcagtatcatatcgccatttagtgtgcacacttcattctcttatatacctgagagagattattttaaaatctctcatgttaatcaaaccacatttcctgatctagataaaaaaggtttcagagtttaattacacaaaaagtaggtaatgttgcatgaagatttacaaagaagccaagattttttttttctttttaaagtatgactaggtaataatagatataagcatatttttctcattcctaatacatgttttatttggatggtgtgctgtgatatttgaggatttgggacacactcttttagtgtaggttgcaagaaaactgtgaaacacagacgccaacagtaggtgaagtcagaagatcttctgtgttaatttctgaaatgtctagcagtgggccattctttgacggtagcctgatatctgataaagataacattctgccactggccatgtgaggagcaattcccagccaggggaaggactccaagtccccaaatctttcttaaaattttagattgagaattgacagaaaacatataaactcagataaataggcaaaggtattgaacagactattcataactgtacttatgaccacaataaaaatagaagcaatataaatttgggtaaaataattagatatgtatttggggcctatgaaatcacaaactacatctaaaatttaattagaatgataggtgatttttgttttcttatttgcatttgtcacattttaaaaaatactgcataggtattacttttataaccacccaatagtatttgagaatatgctctaaaacaaatgagcccagttcattttattcatgttcaggaagctaaagtcagccagtggaaacagtgcagtgaggtggctgtgactggttttatttgtacttgccacttactctgcagataccatggattggcaggcatagctcttattttatcagatagaagagaaatgggaaatgacacagaattcccacacatgggaagggggcattttttaattgagcagatactatatcctgtatgttatgctcagtactttacacctatatctcatgccatccttaaatgacacagagtggggccttccaactggaaagaatgctgcagtacgatggctgataagcagaaaacaacatacaacaaagcttggcattaaaattactttcagaagatatggtaaaactgctttttttgggtcttggattgttagtagagcctcaaagtttaataaccaagacccaggtgcctaatttgccccactgggtcctgtcactgactcactggatgaccttagtgaaatcgttttccatctgtgagtgtgtttccttgctgtgaagatgaaactaaaaataaatactgccttcatcatgggttatggtaaggactagctgagtaatgtttactaagaaattgcaactttttcaagcaaaagggggagaacaaaatgcctgtttcatcatataggaaacctgtttgggagttttgtgaccctaaagtgatataaataaaatagaggactttttttcaacctcctttgttagagtatgagacaaaactggctgaattccggtgttctttggtgctggctaagaacagcttggttgcccatgagcagcgtggtcagaggctggttcctggtggcagggtgcattctggagaaagcagtctcctccagcctgagctgtgctcccccacgggactgagtcactcaggccacccagtctctctctcccaaagcttccaaagctcactctcttccaggtgctaagtccaccatcaatttttctttgactagtctagttttgtaagtggcaggttttctgattttaaacagaaaaattctgcctcccttgcattattttttaaatataattttattcttctctttgatgtgagtgtccagttctcatagctaagaaggtccaggagtgcaactcagaagtgtagaaagaaaatgggcttcaaaggtaaggttttccctacttggtttccaactgtcttatgatggccttggacactaacctctttgagcttcagtctccaatgggaaatattaaccttatagggttgttgtaaggatcggagaccttttatttatttatgtttcatgtcatacaaaacacacattatgggcacgggcaccaagttccttacctcataatatggtggcaaaaaaagataagccctgccctgatagaacccgtgttgcagggggaagctaagtcctaagtatgaatctacaattcaggttctaacaggtgaacagtctatagcacagtgggcctctctgcgttgggtgctgatgagctcttcatttaccctccaaacatagaacaaaagaacacattgagggcttacgtggtctcatgttgctcccatttttcactacttgttcaaacaacagtgacagaacacctggttcccatgggcagggagttctgctgggcactaggaacactgagatcaaagggaccctgcgttgtcctgaaggggctgacagtcagagtaggggaggcagacacctaaacgggtgttacacttcagagcactgagcaccacagggctcttagagaatgctccaagctgggactaggaactgagtcctgaggatcaagggacatttgtgatgcagggtggcagtgatatggtggggaagaaggtggagttggtgcttcagacagagaggacagaggaaaaggctgtggggggacacagcatttttggtttctggcatgtcacagaacagttcaattcagtgtgaggagcttggagggagcaggggacaggcagttaagaggtgagaataaaaactggaagtgtgaaggggttggcctgtgcgtggtgctgaccttggaaaagggaagacaggtggaagactgggagtgagaggggctgggggcctggaggaggtgccaggaccagaaacagtcaggggtcagtgtcccaggaagggtggacaagacttagtgagtggctggtgtgggcattgcggggagaaggagacgctgaggacaggaccaatgtcccctgcagggaggatgtggtgacattaactaggggaggctgacagcgccacctttgatgccaaatcccacctccagctcttccctgtggctctgggaaaattgcttaattatctgtgtctcagactcttcacctataaatgaggatgacaataacagaacctcatagattggggctttattgtgtagattaagtaaaatgaccacatgtagatatcagaacagtgtctggcacatctgaagtcctcagtaaggactggttgttattctcggggaacacggggagacagagaatcttggaggagaaagattagggtggtccagttctgattacatgacaaaaagctgcctcaagactctgaggccattatggccatctttgtcaaaagaaggtgaactgccccgtggagtgttagctcggaagtctccagctgtggaaacccagagcaactcttgtgagatttcctatcaaccagaggcaggtggagctgtggaccctacatttatttcagggctggggcaagaaaaatgtgaatgaaagtgttaaacctagtcccttgggttgtttagtctgcaatgctggagaccacactggctcctggtgagactgtgaaatgggtgtagtttgttttggcctgcctcccaacttctctaatgtttctctaaagatctattcctcctaaatcttctttttaaagacttaatttttctagggcagttttaggctcacagcaaaattgagcagaaggcacagagatttcccatgttcccctgcccatcacccctgcagagccttccccatcgtcaacaccctgcacctgagtggtccatcagccacagccgaggaagccactcacccgttgttatcacccaggctccatgctgtacagtacggttcactatctcttcatggcaacaataaataacacagttttagttgatgatttttaaaggctatgcaccctactgggagcatagggtaactacccttgcctgacaaccaaggcatttcaaaaccagcctgctccatctcctgtctctcaccaaacaataaagctcccaatgctggaatgactgagggtctcaccaaggcctgcctggacactcaccactgtttgtgaaactttggaactgcattctttctcttcatcctcacatttgcttttattcttgacacatccgactctgtgacctcttagctccttgacccagtgaccttgctttccagtgggccatggcttccctttctcacggtgcagaatgtgagtctgaaccatgttatctcttgcagctgctccacctccagcatcacagattcaaacatcctcctcgctgcccgcaaaccctgccctgcagcttcctgctcgagtattccctgtacagcctcctttacttctgggtgaccttccctgacccccactttttccctattcacggcctgccactgttaacttgtctgacatccatgctggattctgtcccatcatgtcaactgtgccctctttctgttgcacgtgctggcaaacttgaaatctgatgaacccactaccttcactacactcactgtctggtctctctcaggtagctgaggactgagaaacaccccagccaggcaggttggggtcactataaattcacagtcaccaaccacacatggtgctctgtttggctggccatctcattatacctgtctgacttgcttactgtcctgccctccgaaaaagcttttcaaacactatctccttctgcctcaaatgtatcacctccccctcaatgactttgcttcatatgtgacacaaagaaatgttaataccagccaagaccttcctcaacttccggccagcaaatctggaacacaagctgcatctgtcctggtttgcctcttctctcttctcgttacagtagagtagccattcctcttctaaaaaacactgatctcccatcctgctctggacattaaagtactgagaagtggttttgtgttcccagcaatatgggagtcattggtgaccttaataaaagccacattgaagtgaaatgagaaggaattagaaggtgaagacagaaacaagacagttacagacaactcatttaagcaatttcattatgaagggaggccattgctactatctccgaaaccttaagctatcagttattccttttgctctttcttcctctctgcccattcccttcagcccttaaacagacaaaggtctgagccctctaaacagtagcagaaactgcatacacaggaaacagaaaccctgctccagccttacatccctcacctattggcctattcattgctgcccttcatagtcagatttctcagtggagttgtcttgtaactttttttttcatcttctagtcctttcacatctcatttcaatattattttcttaaggtcaccaatgactttgagatgaccagaactgcccccactcccccgccgccaaaaaaaaaacaaaaaacaaaaaacaaaacacttttcagcctcctaaggtgcttttcacaggtggtccttgatggaagagtcttgcaggtttggggaagtgacttcccgaagaaggttacatcatcagttcaacaaatcaatggcacgtgcgcagactgcatactctggaggcactgggccctgtccagagaatgcacagcagcgtgagatccagctctgttctctaggccctgtggactggcctgtggggggcaatgatggtacgtggtgggtgccacacgcagcagcagccaccaaggaagatgggccccagagcacaaaggaaggagtggggagccgccttcgctggagtggttggaaaaggctttgcaggagaggtggtgcccaggctggagtttgagaagtgaaatgcaggggctgagaggctggggaagtgcactccaggcagtgaaatcaacaggtgcgacatgcagggagactcgtgtcacgtgggaccgtgaaagcccagggtggaagtgaggtgagtgtggggcgcggggtacggtgtggagatggcatatggagctggattcatggtgaaatctgaccaggaatgcctgggtgctcaaatcctggcctctggtctgtctctccaatcccaatgacatcagaatcactatatttagcctaagtatggtcctaggtgctagcaggtacagaataaatgaaaaatggttgaatgactattttagttcatgaaattctaccacattatttgtgctatttaagttaaaagtactaggagtagagttaggcacagagtacaagaggcagtgaaacataatggttagggcatcatctatgggactagatacctaagtactataaccttcccgaagaaggttacatcatcagttcagcaaaccaacggcacatgtgcagactgcatactctgctcagtagaccagatactggcttcaccacttactgtgattttggacaagttacttaatctctttgagccatctatacactgggaattccgagagtgcctaactcataaggttaaaagagtttataggtataaagcacttaacccaatgccttgtaacaattcataataattgtttgtaattaccattaataataaatcacaaacaggttgggtatggtggctcatgcctgtaatcccagcaatttgggagcctgaggtgggagaattgcttcagcctagaagtttgagaccagcctgagtaacattgcgagacctcatctctatcaacaattaaaaaagtagccaggcatggtggcgcacacatgtagtcccagctacttgggaggctgaggtgggaggatcacatgagcccaggacttcgaggctgcagtgagctatgatcatgccactgagctcatgccatgccatgtcacccagcctgggtgacagagtgagaccctgtctctaaataaataaataataatactataagccacaaacatttattactaaaatttaaattatgattatttattgaccattatgattgaatcctcctagagctccaattcttaatgccctctctcccacgccaattgcaatcttttcctgatgtatctttttttcatttgagattcagatcactcagcaagtgtatttgttagctggtagaacataagttacatgataagtacctgcaaggagaattggaacaatcattcattgacctaaacatgatgctattccaaagccgagatagcccttcttcctcatttaaagtgcaattggattattgatgtgtaaaccagtatatctgtctggaattacgttctacagggctaaagaaatgatgatctgacctaggtgtgcactctggaagattcccatgaaaatctctccatgttttttgtttattggcacgtcagcttttcagaggcactgttcagccaaagggcatgtgtttttatgttctgaaaaattgtattaaccaacagtgtaaaacaacagaaaccggttgcaaagctttcacttttaaagagtttccaagcaccctgcccttttcctaaaggactcttttcccttttatggatgagcaccaggctccaagacagtgtaaatagagtttcctgttccagggaagtgctggctcctgcaggagcccaggggtcctttgggaaaagttgataggaactatgagctgtatgtgccctgaggcttaggagccagctgagccaggagggagggaaacacatttaacagcccctttgtgcagacttcagtcccagaagcacttctgggaaaataagtccagtgccatacacacagtccttgcaaagaatggcagggaagctggccgggctggagagagccattcccagattagaggcctaaatctttgacctggccactttgaggaacccagagatgtctgtaattcccacaattcagggatcctgtgcttcagatgagtgaggtttcaagaagcagaagaaaaccgattagatgttaactttggcccaatggcaaatatttttcagtgtggttagtgtttatgcactgaggacatgaaaattaatatctattcttctctcttggattttatcatcttcctgtgtttttaaatgataataataaaaagcattatttttgtggttgagttgatgggccgttcactttgataattttcttttgacttttgtgtgctttagaatctcatcagtggtggcaaggaaacaaaccagaaaagtacaatgaatacttttggacttattcattatgatattatgacaattatattattttgatgatagttaacatttactgaacacttgctatgtgctcagcagtgagttaagtcaatagtctccatccgtaaacaatcttgcatgaacttacaaattgtcagctaaattaatacaaagtatgtaaacgtacaaccatgctattatgttgtgtacatttatagagcataaacaaaaataaaaactaaaggagtgacataaataaacataaatatcagttcttatattttcttcttgcataagagcagattgtctactactggagtctcggcacccctgtttgaagaccactctgcaaatactgtccaaactattattaattccttgcccaagaccatgggttatctttgtgtgtctaccctgtaaccttactgacttctgtagcttttccatcagcacttccaggaagccacactatcatattagtgtattcctatttctgctgcttcttaatctaaatattagatgcacgtatttaaacagtgtgtccaaattttttacagacttatcatctaagatccttaaaacagtttgagtcaaatttgtagctttatcttctgatcagacataagaatctcagaatgagatttcctcctctgaagcttctttcttaatccagaaatgaagtctaagtatcagtcttgttttgggtatgggtaagattaagctcacaaacacagataaaattaagaaaatggttccatttagaatagcagcaaaagaaaaataaaatatttaggaataataaaagtggtgcaaaacatgtactcaactacaaaacactgttgaaagaattttttttttttttttgagatggagtcttgctctgtcacccaggctggagtgcagtgacgtaatcttggctcactgtaacctctatctcccaggttcaagtgattctcctgcctcagcctcccacgtagctgggattatagatgtgcgcaaccatgcccggctaatttttgtatttttagtagagacggggtttcaccatcttggccaggctggtctcgaactcctgacctcaaacgatccacctgcctcagcctcccaaagtgctgggattacaggcatgagccaccacacccggcctgaaagaaattttaaaagttctaaataaatgaaaattcatcccatgttcatggattggaagagttaatagtgttaagatgggaatactcttcaaattgatctacacatttaactcaattcctatcaaagtcccagctgacttatttccagaaactcacaaactgatcctaaaattcatgtggaaattcaaagaacagagaacagccaaaacaatcttagaaagaagagcaaagttggaggactcatactttctaattcccaaacataatataaagcaacagtaatcaagacagtatggtggtggcataaggatagacatatagatcaacaaacagagttgagagttcagaaataagctctaacatttatagtcagttgattttcaacaagtgtaccaggacaattcaatgggaaaagaatagtattttcaataaatgatgttggggaaactggatatccacatgccaatgaatgatgttgggacattacaatcatgccatataaaaaaattcaaaagtggccaggtgtggtggctcacatctgtaatctcagccctttgggaggctgaggtgggtggatcacctcaggtcgggagtttgagaccagcctgaccaacatggtgaaaccctgtctccactaaaaatacaaaattagccaggcatagtggcgcatgcctgtaatcccagacactcgggaagttgtggcaggagaactgcttgatcccaggaggcagaggctgtggtgagccgacatcacaccattgcactccagcctgggcaacaagagaggaactccatcaaaaaaaaaaaaaaatcaaaattgatcaaagatttaagggtaagggctaaaattaaaaagcacttagaagaaaatataacattataatcttggaataagcaataattcttttttatggcactaaaagcataagcagccaataagaaaaacaaataaattgaacttcatcaaaattaaaatattttgtacttcaaaggatactattaagatagtttactctcttaataataaataataataattattatttttatttagatggagttttgctcttgctgcccaggctggagtgcaatggcccaatttcggctcaccacaacctctgcctcccaggttcaagtgattctcctgcctcagcctcccaagtagctgagattacaggcacatgccaccgtgcctggctaattttgtatttttagtagagatggggtttctccatgttggtgaggctggtcttgaactcctgatcccaggtgatccacccgccttgtcctcccaaagtgctgggattacaggcgtgagccactgcatccagcccaataattaataattattattaattaataagtatgtgagccaattcacagaatgggaagaaatttgggcaaatcatatataatgtatttgtatctagaatatataaagaactattacaattaattttttaaaaggcaactcaattaaaaaaaacccacaaataccacaattaaaaaataggcaaaggattagaatagacatttctctgaagaaaatatacaagtgactaatacacacatgaaaagatgcttaacatcactagtaatcaggaaatgcaaatcaaaacaaaaatgagataccaactcacatccattaggatggatatcataaaaacaaaacaaaataaaaaacactaaataaggctgggcacagtggctcttgcctgtaatcccagcactttgggaggccgaggtgggtggatcatctgagaatgggagttcgagaaaagcctggccgacatggagaaaccctgtctctactaaaaatacaaaattagctaggcatggtggcacgcacctgtaatcccagctactcaggaggctgaggcaggagaatcgctcgaacccaggaggtggaggttgcggtgagccgagattgtgccattgcactccagcctgggcaacaagagcgaaactgtctcaaaaaaaaaaaaaaaaaaaaaagaaaaaaagaaagaaaataaccagtataggcgaggatgtggaaaaattggaacctttacgcattgctggtagaaatgtaaaatgatacaaccattgtataaaatagtatgatacttattgaaaaaataaacatagaattaccatatgatccagcaattccacttctgagaatatacctaaaagaagggaaagcagggatccagacaaatatctatacatccatggctgcattatctacaatagccaaacagtggaaggaatccaagtatctgcccattgatgggtgaatcaataaataaaatgaaaaggggtatatacgtataatggaatgttctccagccttaaaaagaaatgaaagtctgacacattctacaacatggatgaaccttgaagatgtgaaataattcagttatgaaagggcaaatattatatacttccacttatatgaaagtagtcacattcatagagacaaaatagaaaggtggttgcctggggctcggtagagaaaataataaagaattattgcttaacgggtgcagagtttcagcttgagaagatgcaaaaattttggagatggatggtggtgatggttgcacatcatcaggaatgtaagtaatgccacagaactgtagacttaaagatgattaaaatagtaaattttatgttatgtatattttactacaataaaggaatatattaaaatataataaaaagcaaattacccaatttaaaaacaaaggatctgaatagacatatctccagagaagatatacaagtggcctatatgtacatgaaaaattgctcactgttattagtcatcaggaaatgaacatcaatactgtcacgagatacctctttacatgcaccaggatggctgtgatcaagaagacagataaatgttaacgaggatgtggagaaattggaaacttcataccctactggtgggaatgtaaaatggtgcagccattttatttatttatttagttagttagttagctagttaattattttagagacagagtctcactctgtcactcaggatagagtgcactggtgcaatcatagctcactccagccttgaactcctaggctcaagcaatcctcctgcctcagccttccaagtagctgggactacaggcaacaccaccatgccgggctgatttttattttttatagaaacaaggtctcactatgttgcccaggctggtcttgaattcttgggctcaagcaatcctcccaccttatcctcccaaagtgctgagatttcaggaatcagtaaccatgcccggcccatgcagccgttttagaaaagagtctggaagttcctcaaatggttacatatagagttaccacaagatccactagttccactcctaggcatattctcaagaacagtaaaaacacatatccacacaaacttgcacataagtgctcatagcagcactgtaacagacaaaatggaaacaacccaaatggtcaccaactgatgaataaataaataaaacgtggtatacaaacagtgggatatttgcaataaagagaagtaaaatactgatacacactgaaacacggaggaaactttgatagcattatggtaagggaaagaagccagtcagaaaggactacatattgtatttttatatgaaatgtctagaataagcaaatctatagagacagaaagccgagtagtggttgcctagggctgggagagttggggaaactggtgtgacatcagggtttctttgggggttaataaaaatattctaaaacagattgtgataatatgtatgcaactctgtgagtagactagagaccacggaactgtccactctaaatggatgaattgtgtggtgtgtggattttaaaatagttttagaagaaagtaagcacaaaatgtttaatatatatttgtgggatgactaaagtacaaagatataaatatttatagaataatttcagaaaaattaattattgactctcatacccctctcatatatgtgaatataaacatgaaattggggctattctccttgatgttaaaagttggcctttggtagaagagagatcagctatcttcctctgtggaaaaaaatgatgacataggatttcactattcttttccttctcttttttaaaaacaaatttattgagttatgatttacacaccatacaatccatccattttaagtatacaattcaatgattttttgcaaatgtatacagttgcccaaatatcactacaattcagtgatagaacatttcatcaccccaaaacgttccctggggcccatttgcagtcagctcttgctcctaccctatacccatttagctgctttccgtctctgtacttcctctcttccttttttttagttcatacaaatgttatacaatatgcagtattttatgtctggcttctttcacttagcttaatgtttatgagattcatccatgctgttgcatgaattaacaggtctttcattttattgctgagtaatatttgtttttgtttctgtttttgtttttttgagacagtttcgctcttgtcacctaggctggagtgcagtggcactatcttggctcactgcaacctctgcttcccgggttcaaatgattctcctgcctcagcctcccatgtagctgggattacaggtgcctgccaccacacctggctaatttttgtatttttattagagatggggtttcaacatgttggccaggctgttcttgaactcctgacctcaggtgatccacctgcctcgacctcccaaagtgctgggattacaggcatgagccaccatgcccagccattgctgagtaatatttcatgggatggatatacacatttcatttactgattctagtagatggacatttggtgtgttttggactattatgactgaagctgcaatgaacatttatgtacaagcctgggtggatgtatgtttctcatttcttctgggctgagtttctgcattatacaggtatgtgtgagtttaactttcaaagaaactgtcaactgtttcccaaagtggctgcaccactttgtattttcaccaggtgtgtatgaggattgcagtttctccacatccttgtcaacactttgcactatcggtctgtttacctttagccatccatcccagtagatggatgctgatctaatcttttttttttttttttttttgagacagggtctcattctgttgcccaggctggagtgcagtggcacagtcatcactcactgcagccttgacctcccaggttcaagtgatcctcccacctcagcctcctgagtaactgggaatacaggcgtgcaccaccatgctcggctttttttgtatttttgtagagacagggtcttgttatattgcacaagctggtctcgaactcctgggctcaagtgatctgcccacctcagccttccaaagtgctgggattacaagcatgagccactgcctgatctagacttttaaacccaaatataaattacttctggattttgctgttgaatgggaaatgctgagtctcagagagggccacaggatgtgttgggtgttgccacgttcccggagcaccttgtactgagtgtgctctgggtggaggaggggagggagagctggggactctccaacatctcttctcctattttcagggaaaaaaagaaagccaaccttgagaagaagggcagtaagacactccgtaatgaatttaagaagaagcactgtaatactttttcattaaaaagcaatggaggccggctgcgatgcctcacgcctgtaatcccagcactttgggagcccgaggcaggtggatcacctgaggtcaggagtttgagaccagcttgcccaacatggagaaaccccatctctactaaaaatacaaaaaattagatggctgtggtgataagtgcctgtaatcccagctactcgggaggctgaggcaggagaatcccttgaacccgggaggcagaagttgcagtgagccaagattgtgccactatactccagcccaggtgagagtgagactccatctcaaaaaaagaaaaaagcactggaaatagtttgtagccttaaattctagttgcagctaagtccctaaatagcccaataagcatttttatcactcttgggcctcaggtatcttatgtgcagagacagattttcaaatatcatacttaagcatccttctaattccatacttaagcaaccttctaattctacttagaaagttcaagaatgtggctgatgtttctaagataagaggcagcatatgcagtgatattagactgttgaaaatgaatgtattttatttttatcttactattgatattgtagtcagaagatgcaagctgatatcttgctgatatgattaggggaaagggcatttacatgagtttcctaaattctatcacttggtgacacatttgttagtagtctttactcatccacgtggcatatgctatcatctatagcagtataacctgtgatattatgaaaggaataaaaatgcttatttaaaatattttcttatctgtgagatgaagatggattgcgataagtgggccaggcgcgatggctcacacctgtaattccagcactttgggaggccaaggcaggtggatcatctgaagtcaggagttcgagaccagcctggacacatgctgaaaacctgtctctactaaaaatacaaaaattagccatgtgtagtggtgggtgtctgtaatctcagcaactcgggagactgaggcaggataatctcttgaacctgggaggtggaggttgcagtgagccgatatcgtgccactgcactccagcctgggtgacagagcaagaatctatctcaaaaaaaaaaaaaaaaaaaagatacctaagtgggctgcttaaattttgtaccaggagatcaccaagtcaatcctaagccaaaagaacaaagctggaggcatcatgctacctgacttcaaactatactacaaggctacagtaaccaaaacagcatggtactggtaccaaaacagagatatagatcaatgaaacagaacagagccctcagaaataacgccgcatacctacaactatctgatctttgacaaacctgagaaaaacaagcaatggggaaaggattccctatttaataaatggtgctgggaaaactggctagccatatgtagaaagctgaaactggatcccttctttacaccttatacaaaaattaattcaagatggattaaagacttaaatgttagacctaaaaccataaaaaccctagaagaaaacctaggcattaccattcaggacacaggcatgggcaaggacttcatgtctaaaacaccaaaagcaatggcaacaaaagccaaaattgacaaatgggatctaattaaactaaagagcttctgcacagcaaaagaaactaccatcagagtgaacaggcaacctacaaaatgggagaaaattttcgcaacctactcatctgacaaagggataatatccagaatctacaatgaactcaaacaaatttacaagaaaaaaacaaacaaccccatcaaaaagtgggtgaaggacatgaacagacacttctcaaaagaagacatttatgcagccaaaaaacacatgaaaaaatgctcaccatcactggccataagagaaatgcaaatcaaaagcacaatgagataccatctcacaccagttagaatggcaatcattaaaaagtcaggaaacaacaggtgctggagaggatgtggagaaataggaacacttttacactgttggtgggactgtaaactagttcaaccattgtggaaatcagtgtggcgattcctcagggatctagaactagaaataccatttgacccagccatcccattactgggtatatacccaaaggactataaatcatgctgctataaagacacacgcacacgtatgtttattgttgcactattcacaatagcaaagacttggaaccaacccaaatgtccaacaatgatagactggattaagaaaatgtggcacatatacaccatggaatactatgcagccataaaaaatgatgagttcatgtcctttgtagggacatggatgaaattggaaatcatcattctcagtaaactatcgcaaggacaaaaaaccaaacaccgcatgttctcactcataggtgggaattgaacaatgagaacacatggacacaggaaggggaatatcacactctggggactgttgtagggtcggggggggtaagggatagcattaggagatatacctaatgctaaatgacgagttaatgggtgcagcacaccagcatggcacatgtatacatatgtaactaaactgcacattgtgcacatgtaccctaaaacttaaagtatagtaataataaaataaaataaaaatttcgtaccaggagaaaggtcagtccacaattacctgtcggttagcaatatgctttatgaattgggtatggagcatctaaaatagaattttgttttagaaaatagttatttttcacaactgcatattatttgtgttggctataatagatttgttattttaaatggataaataacagtacttaaaagtgttcaattttaatttctaatatgcttactatcgatagatgtgacccacataaacaaaagcatttgggtttctctgtaatttttagggtataaagagttctcagggccaagaggcttgaggcctgctggtctacatccccatcatctggacttcctcatctcccacacatttctcagccctttgctaatattgctgcttcttcttctactgctttcctgaagctctttgtggtaagattacctataaatgccaaatttcaaaatccaattcacatttttgtttcttaccttgtttgaacatctttaagcctcttacactgttgtctacacccttcataaaaatgtttctcccctgatgttgggacactagcactggcaccatctcctcctgcctccccactctccaatcctctttggctttctccttgcccttatatgctggttgtttctcagggttccaacctagattttctcctgttactgatctacgtattttccttggtgtgtctcattcaaatcattggcttcagttgcttccaatataccaatgatttccaaatctgcatttctttcctgggcttcatatccttatttcaaatatgtattcctgccaaagaagcatctcaaaaagagcatgtccaactgaaactcatgagctttttcttcctgaactcacatttacttgcatgctgcgtaggtcaataatattattattcatttatttggaaacaacaaaaaagaaaatcaaaaacaatagcttaaaaattttgtaaagctgttttttactcctcctgctccttgccccctgcccgtgccatgtagtaaatctccaactccaattctagctccaaaatatcttgtatgtacttcttgtttttcctcctgtctctgttgctcacactatcttttccctgagtgatcgcaactgtcctattgatcagcctcctgcacaccttctccccacccctcgtcagggtgatctttccagcatgcatatggcattgtcacttctggcagtcaacattcttccatgcttcctcctcacctgcaggatgaaattcatgctccttaagcaggcaaaggcacaggagtccttcattatttgatcctatggagtttcccactgagtgtcttgccattcctagtttctaccctgtttcccagccgtgctttatgatgggaccgtgcctgtgctcaggtggttttctctgtccaggatgtccataccctccattctgtgtgccccctcttagaggtcatctcctctttgagagcttccttctctctcagcccccaggcatttatttgctttatctagcaaattcccaaatcagttagaatcaggccttatcatatctccctgtactgtagatacatttacatctctaattccccacaaggctgtgtctcctctgtgctccacacactgtccaagcccactgacaggtgtgcaaatggattagtcagaactaacggggaggtcagaacagggatcttttactttctctttgaagcagctgcagagattaatttcttttcattgttaaatcaagatagaaatattaaattgcttcatcacggaaaaaaacgggttcaaaataaaaaatttggggatgtagatgaaatgaattttccctcacagagcgatcaagattgttccctgcagtctcgtcgttggcttcttcccatggattagcaatgtgggccaagatttagagaaaataagatatgctggaatgaaggcatttgggggaaaaaaaggaaaaccaggtaggttacttggaaagaaaagtaccaaaggagatgagggagatagaacaagaaaaggaaaaaaagattgtgggaaagaatgcacagaaacagtactaaagaatagtccatttgctgccaataaggggctacagggaaaaagaaatacaggaatgagaggaaaccctgacaggatgcagcttcacaattcttttcagagctcaagctcaggcagacttcttgatattgtctctaaagtgtgtgttcaccctgacgctcatgtccatgtagtttctctctctgaggcattccagggtcaaaaggtcagagctccagcattagaataggaaactgtcttttctggacggagtgccatcttagaaataaacctagccaatgcttcaatcatttgatgaaatagctccaataattatgagtttggtttaagacattgatgagatgtttattgaccccaattgttatatttaatttcttctatcttgtatagtatataggattttaataaaatctatgccaaatcttaacattcttcaatatcaaaagtcataaataactcttactcaaaaccatataagagatctaggctatagctagcaattgcttcagttaaagagtgatacagctataaatttaatcctaattttaaaattgcagcaaaacataaggattgaatttacaaatccctcattttttgcaaagatttctccagaattggaacttttgtttgtttagtcataaactacatgttgaatgaaattatccaaaatttcataagagtgttatgtggtaacactttataagtaaaatatgctttcttatttaacctcctggtaatgtttgcctggtattgaaagacaacaccatatctaattattttaaagtcagcagagtattaaaaaaactaaatattttgcaaagatagaacttataataaccttcattttcatttattatttttttttgtgtgtgagaaatagtcccactgttgcccaggctggagtgcagtggcacagtcttggctcactgcaacctccacctcctgggttcaagcaattcttgtgtctcagcctcccaagtagctgagattacaggcgtgcaacaccatgcccggctaatttttgtatttttagtagagatggggattaccatgttggtcagactggtctccaactcctgacctcaagtgatccacccacctgagcctcccaaagttctgggattacaggcttgagccactgcgcccagctataaccttcacgttcaaagcactctcccatctattattaaggcctctgagaaaatctcctttttatatatattctcaagtcagaattattagtctccatctttcatcttagtcttcttcaaataccaaactctttactaagcagttagacacaagtagtttcaccagttctatcactcaaatacggtttcataagttctgcctagtgattgcccatcagaggggatatggatttgtgggcaggaaatagaatagaaacctaactctaactcttctgtgaaatgtagtgtttaggttaatattcttccttaactgccatctgcttttttttgtttgtttaacactttgtccaaatctctcaaaccttacaccgcagaatcatggagtgttcaagcctgaagggaatggagagattgggccagctcctcttggatgcatcctgaaatcgaggaccagtcagaggcagggagtcgcccactatcaatcccgatcactaggaggagggctgaagaagagtggaactcgggtttcccagctcaagcccctccccatcggggcacatcacaccacctcttcccatgccacttaaaacagcgtgctgctgcatcccccaaagtccggaacacatttcagattcatcagccaatccagtttaagagaattggtgttggctccccttgttagaacagacagaacagaccactcgagaatcttttgtatttgttgacaaatataaatagagataaaagagaggaaagaggggagatgaacttgaagctgtacggcttaacattgaagccatgtggcgtaagcagttaaacacagggaccccgtctcacactgcctggttccctcctccagctgtgttgtctgctaatgactgtgtggccgcgggccagctgcttggtctctctagcctcagcttagggtttctgtgatggctatatgagctcaaggatttacaaggagtcctgttacatggtgagcacacaggtgttaactgttagggaaagagctcctttttattcagaggagcccgacataacttcacaggacttgaaggtgtcttatatagtcactcatctgcaaagacatgtggtcttttcagcacttctttctctctctaatgtggttctactaagctacccacatttaagatcccagccaggtcactcgggtgctgctaaattgtgtaattcagtgtgaccctaagagacccatataggaatggagctatgatttttttgttgttgttgttgagacggagtttcactcgttgcccaggctggagtgcaatggcacgatctcggcacaccacaacctccacctcccaggttcaagtgattctcctgcctcagcctccctagtagctgggattatagtcacgtgccaccacaaccagctaattttgtattttcagtagagacagggtttctccatgttggtcaggctggtctcaaactcccgacctcaggtgatctgccgcctcggcctcccaaagtgctgggattacaggcgtgagccatcgcacctggccagctatgatttgttttagggctgtccagagccaactcatctaccccacacagactgtcttgagaggaagacacatctgctccctaaaagcctaggggtaggagtatctcattcccgtcagcgttccacacatcccttagctgaacccaagaggttgattccaaccttcatgtcaatttcagacagacggacccaaggtcaagaaggaaaacactgaaattatccaaggatcttcgctttctctccatcccctgggagaacatttcaggtttattagacagtttgtctgttaacattattcacttgaaacaaaaccctgggtgtgtgccttttggagaactatgtaaatcaacaaagctatacatagaacagagcgattcgctcagcagccaagttccccacagatagcaggtggacagatcacgccgaggaaaggaagcgcagcctttccttatttttctagcattctaggcttagcagtcaatgcacatcctctatgctgttgttggctattcaaataaatattgacaaaaggtgactaattattacaaggtgttagtttgtatgatcacactgtaagtaatggtggagctcatttctgaaacattagtattatgtgtatttattattttggtcttaattttagaggtaatttagaaatggcatatcaaaaagtaatcaaatatttaaattcatagctagcaaaactaaaatatcatttatgtatactttgaaaaactctacattaccactgtggtttaattcaactcagagacatttaaaagcggagatgaacaggcatttgtgccatgctaatatctttctcacattttcttaatgctgttgcaattacctacggaaacacagaaagccatgtcccatctgcccagcacacgtcgcctcctgtttttcgtttctttacagtgacattcagcacttctctggttttccagacagttttcagttctgaagtaaaagttgtttcttaatttcttctcaggttgtgtgagggagtatctcataaatcctaggctgacccctttttggagatcaaaaacaaaacaagattgctatgaagacctggggtgaaattaagcctccagggttgtggctgttgtagtgtttcccccttttctaactccctctcccaaacctctccttccaggatgcgccacacagagtcttgatgcaggcccagtgtcttgtctactgccaaccaggggccagcttttgcatttgctttgatggtctattccagaatctttttttctttactttttttttttaatttaagaggcagagttggccagccgcggtagctcacatcggtaatcctaacactttgggaggccgaggcaggtggatcacctgaggtcaggagttcgagaccagcctggccaacatggtgaaaccccatctctactaaaaatataaaatcagccaggcctggtggtgcatgcctgtgatcccagctactagggaggctgaggcaggagaatcacttgaactgaggaggcggaggttgcagtgagccgagatcgtgccattgcactccagcctgggcaacaagagcaaaactccatctcaaaaaaaaaaaaaaaagagtcttgctctgtcatgcaggctggagtacagtggtgcgatctcagatcacttcagcctcgatctcctggattcaagcaatcttcccacttcagcctcccgagtagctagggctacaggcgtgtgtctccaggcccagctaatttttaatttttttgtggagacacagtcttgctttgttgcgcagcagtccttttgccttggcctcccaaagtgttggggttataagcgctagccaccgtgcccatcttttcctgaatcttcaggtgaaaatctgaagggaggaagtagggcaggcttcagactagcttcagtggtgacttgctcttcagggtctttggtcagatgaacctttccatgcagtgatgctcggggacctatacttgaagtgaggcagagcattttctggctctttaagcagaactgataaggacatgacttataaggacatggcattcccgaagccaaagatgtcccagctgcaacctgtgtcccagctgcagtccacttggctgcctggcaaatccatcttccttcatggctggccctgtctccacctccttatgagagagccccgctgctggctgtggttatttttacagatagtccactttcttagggaagacaaaggtttcctgataacgttttgatttagcaagtggatgtattctcactctctgaacatcctgaagtgtgtgcctgtcactcaccctgcaagactctaccaccaggcttcatcatgagaaaagcccctcctggccctgagggagccctagagcagggcagggcagggtctcttattgtgtacccacacactagcgatgtcactgcctgtcacttgtgtacacaaccttcatcccacgtgacttacgagctctcgagagtgggacatatgtctcctttgccatcctatcttctggcttagcagggtcccattcaaaatgcatgtgtgcccagcaacagggccataccctcaggtcctttccccagcttccgactgggagctgcagctacctgctcattagctgcattcagacatcaaacaggtagtgttaaaatcactggattctcctcccctccccagagctgctcctgctccggcgtccctagtcaacagtcattattcacatgattacctgagccttagacctggagtcacacttagctcctccatctccccagacactcccccctccacaatacagcttccacctttaatcagttacctaagtcctgccagcttcttatcattcaaatttatcaactgctctttatttgccttgacactcccttcatttcagcaatggtaatatgtcacctgaattaatataacagctcccaaatcagtgttcttgtccccactgcaactgcccttcatcataagaactgtttcttgcacatacattggtagcttcactgcttgctggaagttgctcagcagccttagtgtggtttcatgggccactgctgttttaccctgtctatcatccactcctcctacctctggtcacagtgcctgattttcacaagggcaactcccctttccacatcctccctccttttgctttgatccccgcccattcctctctacctctgataagccagctccaaggcagaaagagggatcatccccctggtgcagtgactgattcagggttggccattcatctccaccagccccacagaaaatcagtcttgggaactactggtcagcaagagttccttctgctgggtttgcaaaatgggagaatccgagcctggagctgctggtggccatctggacatgagggacttggcctgcaagagatgggccaacagcagagactgagcacagacttctgacatgtccaagcacttggatccaggcttgctcaaaccactgcacccccagtcttcagtttctgtttggatttatatttttaaacttgccaacaaaagagacttgactgctccagatacaagacccttggtgaccaggactctccctgtcttttggagggtccatgctttctcttaccgcccaactatggctcaagttacctccttttctgggatttccttttcttttctttgtttgaatatctcctattcatccttcaaatatttgctaacacttcaccacctctgagaagccttttctgacccccaccagactccttgatcattttaccttctcatagcacgtaacatattacatcctaatcacctctttatgtggggggactttctctagactacagcctccttaagactagtattatgttttatcattgttgtacctccaaaatcatatgtattcactcacatgtatgaaataagaaaattaacgctcaaaaagagacaaaagagaaattattaccttgatttgattaaaatacatttgtatgtacttggccatctgcacctgtggattcaaccaatcagggctcaaaaacattaggaaaaaaacaataaaaataacaatacaataaaaaatcaaacaaataaaaaacaatataagataaccactatttccatagtattgacattgtattaggtattataagtaatctagagatgatttaaagtatacaggagggtgtgcataggttatatggaaatagtacaccactttatatcagggacttgagcatccatggattttggtatccatgggggtcctggaaccaatccccaagggtacagagaagcaacaaaccatattttaaaatatcacttccttggctaaatcatagagaatggactggcgcaaggacaagtttggaagcctggagagtagttgcagtgatttaggcaagagacgatggcattatgaaccatggtagcgtgagtgggaatgaagagcaagggacagattcaagacactcaaaagagctaaaggtcaaatatcagggaaatgaggactacagagaaggaagaagtccaaatacctcataaggtgtcttcagatagggaaacacacaaggaggaagagttttggagtcagggaactttaaatctgattttttttttttcaatttaaaattgagatatggccaggcatggtggcatgtacctatggtcccagctacttcggaggctgaagcaggaggatcatttgagtccaggagttctgggctgtaatgcattgtgctaatcaggtgtccacactaagtttggcatcaatatggtgaccttctgggagcaggggatcaccaagttacctaagaggggtgaactggcccaggtcagaaatggagcaggtcaaaactcctgtgctgcagcctggtcaacatggtgaaactctgtctctactaaaaatacaaaaattagctgggcgtggtggcgggcacctgtaatcccagctacttgggagactgaggcaggagaaccgcttgaacccagaaggtggaggttgcagtgagaaaaggttgtgccattgcactccagcctgggcaacaagagtgaaactccgtttcaaaagaaaaaaaaacaaaagcaaacaaacaaaactcctgtgctaaacaatagtgggattgcacttgtgagtagccactgcactccagcctcagcaacatagtgagaccctgtctctaaaaataaataaataaataaataaaataaaacagaggtataatccacgtgtcataatattcacccttttaaaatatacaattcagtagtttttagtgtactcacaaggttttctaaccatcgccattatctaattccataacatttcatcacttttcaaaaagagacccaaactagccaggtacagtggctcatgcgtgcaatcccagcattttgggaggccgaggcgggtggatcacctaaggttgggagtatgagaccagcctgaccaatatggagaaatcccgtctctactaaaaaatacaaaaaattagccgggcgtggtggcacatgcctgtaatcccagctattcaggaaggctgaggaaggagaatcgcttgaacccaggaggcggaggttgcagtgagcccagatcatgccgtcgcattccagccgaggcaacaagagtgaaactccatcccccccacccaaaaaaaaccaaaaacaccaaaacaaaaaacccaaatccattagcagttactcctcattgctccatcacccagccttgggcagtgactaatctactttctatcttcacagatttgcttactctgggcctttcatataaagagaaccatatgctattgggtggttgtgtctggcttctttcactcagcatgttttcaagatttactcatgttatagcgtgtaccggtatttcaccatgttttatgactgaatatgattcaatcatataaatataccacaatttatttactcattcattagctgatgaacacttacttggcttgtttctacctttgggctattgtgaatagtgtttacaccaatagtggtgtaaaagtgttcttttacaccagaacactggtataaaagctattgtgtagacatgtatttcctattgtcttgggtatatacctagaactcgaaagctggattatatggcaactctgtgtttaactttttgtggaactaccagactgttttccaacgtggtggcaacattttagatttctaccagcaatttatgagagttccaattttttgacaaactcatcaacatttgttattaatatcttgtgttgttttgatacagcaatcctagtgaatgtggactggcatcttattgtcattttggtttgtatttccccagtaaataatgatgttaagcatattttcatgtgctttttggccctttatgtatcttctttggagaaatgtctatttaagtcatatgcccattttttaagagtgaaaacaaaattttattctaaaaatagaactcagtaaaacgaaataacaaaagataataaaaaggaagagaaaaggcatttttagatatttaaaatatctaaaaatcagatttttgtttaagtgaatgaagaactgaagatgccatcctagaattgtttttggggccaagttaaaaaaaaagtcaaccttattaatggtatgtagacaaagaggcagaagaatgtggaagcctctatctctgtttcctcctgactttgttcatagctgacattccttctgccccacacagagggctggccccagcacagctgccctggtcttggctgtgattgatacggatgctccaaagtcaacaggtgtgttctgatgtcagagttttttgtgtttcctttggatgcattccaagcctggatagagacgtgtctgcctgaaatggcttatctcttctacaagactgggtggctggaagatgcctgagaccatggtgccagagaattctccgttagagtatgtccttacaactcagtaagcttccagggctaagttccgtgttgtgtgatacacacggagtctatgatcacagggaaaccagctaaaacatttgattcaaaactttgaggccgggcgcagaggctcatacctgtaatctcaacactttgagaggctgaggtggttggatcacctgaggtcaggagttagagaccagcctggccaacatggtgaaaccctgtctctactaaaaatacaaaatttagctggaagtggtggtgggcgcctgtaatcccagctactagggaggctgaggcaggagaatgacttgaatccaggaggcagaggttgcagtgagctgagatagtgccacagcactccagcctgggcaacagagcaagactccgtctcaaaaaataaaaaataaataaactttggtccccagcaatatctaaaaattgtttttaataagaaataggcataacacatggttactcttcttccttgatttctaactaaatttatggtcaggtgattcatggagaattttaagtttgaatatattgttacttttaaacatagggtgcaaagcatgatatttagattgttcatattagaagaagctatcacaatgatcagtcaatttataatcattcaccagtcacaggggaagaagaaaatcctagatgcatcagaaaaataaattactaagacaattatagttataagatcttcatgctcattgaaattatttcatgggcttaattattaattcattgaagaaaactgtgttttcactagttaaagcttaatttaaattgtagatcatattaccttccttctccaagttattaaggaagatctttccaaagcaggaaaggatttttggtgtattgttaaaagtaaaaatatggtctatctatcaaactaactgggggaacttaagcatttttctcatgctctaaatggccatgctccatgctagctcaggatcctaataaacttccctcttccacatcaggaattatttgattgagttgctcaatgaaatcaactggttctcctttcattattataaccaaagtcttacattgttataataaatatcaaaattaggaatgtatttaaaggcgtgatttcataggctctggtccagagaactggactcttttccccgcatgtctgagccaaaatgaagcaagcccccacatacatgaattatggagaataaaactcagcaggacaggacattaacaaggatcagatcaaagggcattcactgagagtaagaggtgacataattcacagaataactacaggaaaaggaaatgttcttgacgattttagattaccttttatgagagagtcctggcagtttggaatatgtttcactaaaaggcaggccatacttccagatttctgatttataatattttttgagtgcaatcaatatctttgtctaagactgtccctatctgggctgcctttagaacaaatcaactgacacacaaagagtccctgctctccgggccccaacctccttcttgtacggatgggctcttcctaaatcaaaaaaccctgcctccttcagttctccagatttccttactcccagctcagctacccacaccccaagggaggggtgggtgataatccagctctggcaccctcctctcccctacatgagcctctctgcaatgaggcagcccaactcctctgatgggctgtcacaaaggtaattgaaaaggagcatcagggctcctgtccgcctccctcaccctccttgctggcagcatctaccacattcctgtggatgtgagtggaatcctggaccccgccatctcttaggtctccctgctctgtcaccaccagggccagagtgtgatagttgatgcctgctggacgcttggggattcctgagttctactttgttcagaaaaggtctgtgtccgctgatgtcttatcagctggcataagttggcaggtgaggttgaggattacctctgattgctgattctagagcaagtagaccctgtagtagaagagaagcccatccttgtcaagtggaggttgatgctcggactctgcagctagtttagaagcctagttaagggcttctcccatgatgaaaaccacagccctcgccgctggcgaaggaacaccagggtgaggttaccagcattccttcattgtatccttaccagggatattttttccagcctgcttccaccttgtatctccacaccatgtttttgtcttgtttagttttatttgcagatagggtctggctctgtcacccaggctggagtgcagtggcgtgatctcggctcactgcagcctctcgcctcctgggctcaagcggtcctcctgcctcagcctccaaagtagttgggaccacaagcacacaccatcacacttggctaattattctttctttcttttttattttttatttatttatttatttttttgtggggacgaggttttgccatgtcactcgggctggtctccaactcctggactcaagcaatccacctgcctcagcctcccaaagtgttgggattacaggtgtgagccactgcatggcccattccgtgtttttaattcacagacctggcccaggaggcatattccccactgtcacttcccctcggcccctccagggagggaaacccagcacccactcccattctatctaccgccctgagagctgttcagacaaagacaggcaatgagaagaaacaaacccagccttctctgtccatcctgtgaggcccggcaggcaacagggacaatgggaaagggaaggaattgctatgcgttaagaattcagtagtattttgtggccacattttcttcctctcttcttccaaactcctttatccttcaaacttaccaagttgatactgtacaattcctgacttgtattgtcttgagcaatgaagcaaggctgcagggagtccacagagaagctgctggagtgaatttccttatcgataattcttatcagctcaaatatgccactgctctctgacatagtttgaatgttttcagaatatgtcctttctttttagtcttatggtatcgttttttcttttctttcttttttttttttttttgagacagggttttgctcttgttgccccaggctggagtgcaatggcgcggtcttggctcacctcaacctccacctcctgggttcaagcaatgctcctgcctcagcctccagagtagctggaattacaggcaagcgccaccatgcccggctaattttgtatttttagtagaaacggggtttctccattttggtcaggctggtctcgaactcccaacttcaggtgatccacccaccttggcctcgaaaagtgctgggattacaggcgtgagccaccgtgcccggcccgtttttgttttgttttgtcttttaatatagaagagtaggtattaaatacgttttctttccagattattttggtttagtgagataactaaataatattcaaaaggaggaatttgatcagcatcatcttaaaagctatctgaaatctatttctaagccccagggtgccctgggctggtgagcctgcccagcctctgggggtggtatggactgaatgaccgcaggaaggaaagtgagtctgtgccctctgtaagcctctttgtggactttaaacagtacttgtggaccacctccctgggcgtgcttctttgtggagttactcattctcttggttgttatatttaccttgtgaacttcattccctctaaaaggtagctaaggatacagcagaatgacttgaagagtcaccatttagtaaatgtttggtttgacatctgccaagaaacaaattaacattgatgtcggcctgggtgcataggaagtaccaacactgatgagtgttgcggagaccttacttagttccaagtgctttatgtccagcattgcattgactcttattgcaaccttattaatagaatgagagcaccattattacctgctttaaaaatgagaggcttgcaaattaccgggtgtggtggtggcacctgtagtcctagctatgatgaggctgaggcaggagaatcacttgaacctggcaggtggacgttgcagtgagccgagacggcgccactgcactccagcctgggtgacagagcaagactccatctcaaaataaataaataaaaaataaaataaaaatgagagacttggagtgattcacttaaggtcacacataataagcagcaggaccaagacaagaaactagacctttaaacggtatgttacataaatgatacatatttttctttggatggctcctttccccatgagtttacaatgcatcatttactgaggacagaaggtaccgcaaatgagttcgtcctcaccagacatgatcttggtgctggagttatgggtagagggatggaaactgtcccgttcctcctacagtcaaagagctggcttcctcaggcaagaggctgaaatttgatttagctttgcaaacatggctcctccaggccctcaattttgactgccataacacacacagaaaatacaggagctgattctccccgctccccccgctcccctgggtcttactcttcttcactgttcagctcgtcctttgggtgttttcattcacccatattcctccaatcagttccctctctgggaagttagccagatttcattgctgtagtgagcactcaaagaaccgcatatgtaggatacttataaaattcatggcactgtgtgtggcagcaactgctttaatcctggagataagtcattcctcaacatctaggtgactatatcctgaggcactgggaagtaacttcctcaacactgaatagcaaaccagagttagaatgtgtacaagtccaccactccttatccacaattctaaaacccaagcagctctaaaaaccaccagcaaaacgtggcctgacctcatatgccgtggttgacggtctttaccttacttaatataatacaactcaagttgtgactcacagaacctgtgctcctcccccgttaatggataatggtcttgaaggtttcaagtttgtggtgagcctccaccctcatggtcatcctccactgtcggctcctccttctcataaatgtcagcagcttccagtgattggtggggtaggtgggggctataagtttctcacccaaatttgcaaatcttggaccacatcctgacaaatgcataaatgtttagcaagtaaatttcaaaattcataacttctgaacttttatgctcagggaaacccctccttcccttttttttttttttttgatacggagtcttactctgtcgcccaggctggagtgcagtgatgtgatctcagctcactgcaacctctgcctcccaggttcaagtgattctcctgcctcagtctcctgagtagctgggattacaggcgtgcaccatcacgcctggctaatatttgtatttttagtagagacggggtttccccatgttgaccaggctggtcttgaactcctgacctcaagtgatctgcccacctcagcctcccaaagtgctgggattacaggcgtgagccactgtacctggccccctctctgatcttcaaagagtacccgcatgagagttcactctgtgctgggtgcaattgtgttctgatgtgaggaccacatgagctgaatggatccttttgcagtccacacctgaaattgtaaaaataaacaaaataactaagaaacccctgacaatccaacactaaaaatcaaagttattttttcagcttatttgatagaaaacaatctgatactgagggttcgttataatttcattcatccactaagtgcgaatacttacatgttttgtgttgaagttttaatacatttgcttccagggtgtttcagacctctctgggttattaataactgcatggcgaatgcattttattctttttctacttggcccaaaggctctgaagaagggattaagatcctgtaatttgttcattcaagaacaaaaggcccatgtaatctttttagtcaccacttatcttgaacaccatgactttcaccaacaaaaaaattatttagcatactttattccaattagtgaatacattttttggtgtagagattagtagtttattgcctattagccattgctatggtaaagtttctgatacttgaaatgccagctaactacacttgctatttggctgaaatataatttgcatgaaataatcatcacatagtcactataatactctaagcaccaacattttaagaaatgtgaactatttgctatgaaattattttaaaattcctggccaggcacagtggctcacgcctgtaatcccagcactttgggaggccgaggtgagcggatcacgaggtcaagagttcgagaccagcctgaccaacattgtgaaaccccgtctctactaaaaatacaaaaattggccaggcgtggtggcatgtacgtgtaatcccagatactcaggaggctgaggcaggagaatcgcttgaacccaggaggtggaggttgcagtgagccgagatcacaccaccacactccagcctgggcaatagagcgagactctatcaaaaaaaaaaaaaaaaaaaaaaaaattccttagaaacctgcccatattttaaaatgaaaaggtttaaactgtattggaaaacctacaggagtatgatttcaaccaacagaaaagcattacaaacctccgcacccagtttctttttcattatctcctaactattaaagtggtgtcgcttggtgccactgcacgcaaacacaaatccaagcaggagactaaaactgtcagtggttgttaggagccggatatccacatgacttagaatgtatctatattgatatttttaaccaaccaaaatccaaacataaaattgcatagaaaatccatagatccccaagaatatgtctcagaattcctcaggcccatgaactctactctgaaaaacactaaacaattcctctgccattatatgtgaaatccaaagggagaactgaagactcaggctgatcccagaacaccgtaccatcttaagctagctaagcatatgaacttattcaatctacctatagttttcctgccttcaagcactcccctggactgtgataaaaatatatgtgtacttggcatgcaatggaatcctgccaagaagggcaactgtttcttataaatgctaaataaacctaaatttctaaaaattattggaaataaattcaaatgaaccaataaaatttttaaatgaaccagtaagtatattttaacggaactgagttcattgaaattttaaacacctagagtttattgctggggggaaaggatttgtgaagaaacttcatttattgcattatctgaatttattaaaaatattttgcttggccaggagcagtggctcctgcctgtaatcccggtactttggaaggcagaggcaggcgatcacctgaggtcaggtgttcaagactagcctagccaacatggtgaaaccccatctttactaaaaatacaaaaaaaattagccaggcatggtggtgcacgcctgtaatcccagctactcagaaggctgaggcagaagaatcacttgaacccaggaggcagaggttgcagtgaggcgagatcgtgccatagtgctccagcctgggtgacagagccagacttcgtctcaaaaaataaataaataaaataaatagaaaataaaaataaaaattttgctcatcctatccatgtattttcaatttagtaagtgtaaacatagtagatactttctgttgtagcatgtaaggcttgatattatttcaatgggggaggatttctagcttggtagtaaattgcattttacagaggacaaaaaaaaaaaaaagaatgcaagcattttaaccctcaccaaggatgctgaaaaactgatacagtttgctctgtttcagagaagcctggaaaaatttaacaaaactggagagatctaggactaaggagaggtttcagaggctctttggattgagcatttggcaggactctgggacaattcccatatcatcccaaatttatccaaagccaagaaatctataaaaaagagatcaccatactctcgagatgggttggaggtgaagggtcatttgttttgcagctttatcctgcgtattagacttctgtttcctagggaacagtaaatgatagcatgaggcttacttgtttaaatgcaatctctcaatggtgtaaggcaccataaataaaaatcaagttgacccaaaacacaatgctacttaatatgtaataatgttgtaatatatagatgtttaatgtaaaagatcagttttaaaattactcatttttcagtattaatgtgacaacaatcaataggatatatgtgagtatatatctatacaaagacatatgtatgtatataattataaatttaccagtgatgaagattgataactgttgtaataacacagaaaatacaaacaggctgggcgcagtggctcactcctgtaattccagcactctgggaggctgaggtgagaggatggcttgaaccagggaggtcaaggctgcagtgagccgtgatggcgccactgccctccagcctcggtgacagagtaagaccttgtcaaaaaaaaaaaaagaaagacaaaagaaaaaagaaagaaaatacatgcaaataattgtcctgttatcaagcatgtgtcttttgattggttcttgaacatctgtccggagtcagttgtatatgtttctctgctgtaaatgcatttttttcctctcaagacttaaagaaataacaacaacaacaaaaaccctccagtttacccggatactttttggtggctccaagaggatctgattgtgtccttgacctcaagggccacctgaagagtagtaagaaggccttttcttatgggatgttggagcaactcaaatctgtaaacttgtccctgttgctcagtttaattgaaagctgccttcatttattgccattttgaacatgactgaattgggatgagaagagagcgcatttcttcctgatcgttttgaatcttttttataagttgcttctcttttccacgggaagctatggttatgtatacggtgagcaaggtaaaaatgaataaaatcctgactaaatgtttagcgccacctattggtagtgaagtacatattgattcttggtgacagacattcccaccaaagagagcagaagtaattttaatgattctttttcttccagtgtatatgcctgtatgcatgctttattatgactattatatttaaatataaacatatacttaaattttggtaataatataaatatggaattcttctaggttatgatttgtattatttagcttcacaatacccttgaagtagaatatgcagtgatagtctacttttcaacagtaaaaagaaaattctaggctgggttcagtgactcatgcctgtaatcccagcactttgggaggttgaggcaggaggatggcttgagtcgaggagttcaagaccagcctgggcaacatagtgagaccttgtctctacaaaaaaaaaaaaaaaaaaaaagaaaaagaaaaaagaaaaaggaaaagaaaattctagagaacggggaagaaacaacaacatgacattgtcacatgttgtttgttatgtttgtcttgaaatacatattgtcacctatacacaaagtatcttgaatgtgctctatatcttttgaaaccgcctttaaaatggttttccacagaaatttgagtttgaaataatgatgttatttaaattcagttacttatctgtgctaagaatgaactggccacagatggtgctgagacaactggatttgcacatggaaaacaataaagttggactcctacctcataccataaatgacacttaaatcaaaatggatcaaatgcctaaacaaaatgtaatatataggccaggcatggtggctcatgcctgtaatcccaacactttgggaggccgagacaggaggattgcttgagtccaggagttcaggaccaacctgggcaaaataatgagaccttgtctccattactttttaaaaaagtaatatatgcatataatgggctattatttggccttaaaaaggaaggaaattatgacacatgctacaacatccatgaaccttgggggcatgctaaatgaaactggccaatcagaaaaagacaaagactgtagaattccatttataagaggtagtcaaattcatagagacaaaaagtagaatgctggctgccagggctgggggcggggagaaattcggattgttgttcagtggatacagttcccatttgggaaggtaaaaccattctggagatggatggtggcaatgtttgcacaacaatgtgaatacaatcaacactactgaattgtatacttaaaatggttaaggtagtaaatttattgtatgtgtgttttactataataaaaaagtaaaactttttaaatgtctcagactcctaaatgtaagaactaaaattaaaattcataatagaaaacataaatataaatcttcatgatcttggattaggcagtaagttcttagatctgacgccaaaagcagagacaatcaaagaaaaacagaacaaacacatttcatcaaaattaataagttttgtgtttccaaggaaatcattaggagagtgaaaaggcaactagggagaaatcatttgcaaatcgtatatctcataaggaacttgtatctaaaacataaaaataacttttaaggctcaataataaaaagacaaacaactcaatttaaaatgggaaaagagtctgaacatttttccaaagaacgtacacaaatagccagtaagtacatgaaaagatgctcgatatcattagtcattagggaaatgcaaatcaaaaccacggtaggattctgactcatacccattcagatggctgtactaaaaaagatagataataccaagtactggcgagaatatggagaaattggaaccctcgtacatggttggtaggatttgtaaatggtgccgacactttggaaaacaatctgtcagctcctaaaatggttaaggttagttaccatatggtccagcaattccaccaaaaataattataaagataaaaaacttgtatacagatgttcatagcagcattattcatagtagtcaaaaagtggaaacaaacaatccacatgtctatcacctgatgaatggataaataaaatttggcatagcacacaatggaatataattcagccatagaaagaaatgaaatgctgatatatgctacaacacaaatgagctttgaaaacattgcactaagagaagccagtcataaaagaccacatatggtataactccatatgtgttatatgtgaaatgtctcaaataggcaaaactatagagatatgaaatttctgtgaaatgtctcaaatagacaaaactatagagatatgaaatagggtagttctttctttgggccatatctggggggataaactgctaaaagtttcttatggggtcacgaaaacatttaaaaattaatggtgatgatggttccagatatctcaatatactagaaatcactgaatttgtacacttttaaagaatgaattttatatgtaacatcttaaaaagatgttaatgggtcagcactagatccaccattgtcaacttgtgacattgatttaaaaataccttcagaatgagcaagactagaaaaagagatatgagatgtgaatcatatagaaggatgtgaaacatccttcatggtattaaggaatataaaactatttatatttagatttaatgaatgtgagtattacagtgctttatttacagcaaataatttccactaaaattaaagagacattggtcttatcattccttatctctatactcttttcagcaaacaatatgaacaagcatcttaaacctagaaattgtcccccagctatgacaattgctctccttcctggaactgcctttcctatatgttaatttcctcagtgcaaaagctgttattttcattcagaatgttaaagatacccctaggaaaagtcattttaaaagtcttgattttcacagccttcttctgcattagaagcttaagagatatcctagggctagtcttcactccaggttttaggagcaatctaggtaagaatctgcagaagctaggtgaaaatgcagatccatggaagctatttcaaacctatcacatccttccccaggtaatttttatactaatatatgctagaatgcgataaggttaaaaatattctacttctccactttatcagagaggtgggagttttgaaatctcattgccatgcaaagaactacggcccagaatgtgataaatgaaaggcacctaagagtcatgtagggcagtccttttattctgtgaaggaagaaacaagatgattaggccaaagccacacagatattagctgcacaaccagcacaagattgagcacgagatggggctcgggtgttgtgacgtccagcgcagtttcttcagctcagttagggcagaattaggttgattgggcaccattgaagtacatgctacatccatccaccattagatgaaacctctaattttagttctgcttattattttttattttatatattttttatattttatattatatttattttattttggtttattttatttaattttactattattttttaagacaggatcttgtgctgtcactcaagctggagtgcagtggcgcaatcacaactcactgcagcctcgaactcttgggttcacgaagtcctcccacctcaaccccccagtagctgggaccacaggcacgcaaccaccatgcctgacaaattttttaatttgtaaacgtttttgtagagatagggtctcaccatgctgcccaagctgcaattttagttctatataaatagggtagcccagggaaaagagaggggagctaccatggggaaggggttactgtggatatgatttttaaaattttctctgctacagctcttccacgtttacccacataaatttgaagtttaatttttagtctctagaaagcattttgtgatgtcttttaaaatattatgtatgtattaagaaagcttgcatccatatgtgtagaactatttccttttctttttgggcacccgtggctctctattaatattaagaatttcttagatgttgcaattcttcaaggaaacaatttcagaagatagtttcttttcctcccttcccttcccttgcccacatttctctctctttttacttccagttctggaaattggccagcagaattatttatggctcttagttcccatcacaccttaataataaacagaaggagttttcctttgttttaaaatttcaacagtacagtagttaaaaattggcttccatcagaaaactctttctccaagtctaatttgctatgccatgtatatacatgattaaccagtacaatacgtacagcaaagaaaccaggtgagagatttattgattctggctgaaacaaattgaaaagtaaccttgaacactttgtgaagtccataattgagttccacaaatcaactttggagccagtttagcatgtccatttagttgaggcaaagagcctgtgtttgatctaacttaataaagtaattccagtgtaaaaaggtaggtcaaaatgactaccttctaaaattcaaagttccttttttcatgagagaaattatatttatttcaaacagaactaatgatactgtatttggtacaatatgttattttcttagatatcttaggggtaccttctactaactaatactttgggataggcttctgggattcatgagtgtcaccaagttcagagctgatcttaagcaaaactgaatggcttggcccttctagaaaattatcttgcctctgataactcaaaattcaaattgagattgtaaactataacatagaagtatttagtgtaggtgatattatagaacaggtatctgttctactgatagtcaccccatttgagttaaatatgctatgtgacaatattaagaagctatgtcttctgaaattgtgtaaactttaaaaaatatatgaaaaattagaatactatacaaaacaataattattaaaccttctcccactttctgggatatccaagtctaatttgctatgaattataattattaaaccttcttccactttctgggatatccaagtctaatttgctatgccatgagagtggcatgctgcccaagctgcaattttagttctatataaatagggtaatccagggaaatcagaaatgcagagtgtgtttataagcacatgtgaataattacaatagcagacacacaattttaaattcaaatttgttgttgttttttgttggttttgtttcttgtttgggaaccacaaaataagcctgtctttctttggatcttaaaatttattcacaatgttttcatgttttatattaggaattatctggttctacagaagtagagaattccattcctacgggaatatcagaaggaggttaaagtgggcacaggtaaatcatccatttggctatcaaaaagtctgattctgaccaggcgcagtggctcacgcctataatcccaccactttgacaggccgaggcgggcagatgacctgatgtcaggagtcgagaccagcctggccaagatggtgaagccccgtctctactaaaaatacaaaaattagctgggcgtggaggcgggcacctgtaatcccagctacttgggaggctgaggcaggagaatcacttgaatccgggaggcggaggttgcagtgagaggagattgcgccactgcactccagcccgggcgacagagtgagactccgtctcaaaaaaaaaaaaaaaaaaaaaaaaaaaaaggctgactcttttttctggtcccaaataaaaatgactaacttcttcaaaatatagggtaataaaataccctgaaatgagtaaaagttattcattctgactataatacactttgttttggtagaaaaaaaatcttcataaatttaaaaactgaataataagcccttggttaatcatttaacattagaactcctattttctcttctagcaaatgtttccaaacagaaaaacgaccacaatcaattttagaaaacatgtttcccctttgaggaaggaaggacaaataagatgtttaaactgcagttggtaaaatcatttgctaaccctctgcgtggtaatgatgccacatcacctgcactttgctgtcttgatccatgctgaagtgatatgttcttggacccaagcagaactctctagcgatttgcatgttttgtcatattgtcacagacactcatggttaaataaaaacaatctggttagtataaagctcaatttgcagagaaataactattctctgtgtcagagtccacaggcaccagaagaaaacattttcacacagaacatggctatgtgccttttaaatccatttgcaaaattgtttcatttcttatgtaaaaaggtggaatattgactactgataaaaatttcctcctacacaaatatttttcaggttcatccaatcccacccttactcaatatagtggaacatgaagctaaattcatctggaatacttcactaactcccaaaatgaacaagggagtggaaagttgataaaaaatactagcccatacataatcagggaaacaagggttgtatgttaagtggattttcttccatccgtgtgattacctgaatgtcatttttaacttgggtaacttaaggtaaacttatctctctaagttcatcaatattcctgcacaaaccttcattgccatttaattttaataaaactgagaaagagagagtgaaaactcatgttacccattccaggcaggaagatgggaagaaaggaagcatgccattcagaattctgaattgatttgtacaatgtcttaggcaaaagctcttccagaaatatctatgaattcacgttgaacataagacacaaaattacagataaaggttaaaatcaaacttgtcagatgttaacattatcctgactactcataaattgattcatttatgtgctagaacatttttctactacccaccctggaggaggagagaatccatttactgggaatgtggaatgtgcttcgtccgggaggggaggggaaagaaagaatcttgactggtgctatgtaaagtggctgcacctttcaaccagttttcaatttcaaacaagacttttaatatctatgtcttttgattgtttctgacttttaatttttgaaataactgctttattaagatataatttagataccaatttcctcatctaacgtgtacagttcactgatttcttggtatattcagacttgtgtaatcatcaccataatcaagtttataacattttcatcaccccaaaaagaaccacacaccttttagccatcacccctcaacgcttttttttatcctttagccctaagcaactcataagtctacagatttgcctattttgaacatttcatataaatggaatcaggcaatttgtggtcctttgtgatgggcttctttcagttagcataatgtttttaaggtttcgtgtttaaataattttttaaaatttgggaatcttttcaaatttacaaaagagtggctaaaaaacattgtacggaaaacctccatttatcccttatctagattcatggtattgttaatcatgtttctaaaggtttttaatgtctgttgttatagcaataaaacattcaaaatggttatatttataaaagagtggtctgcaaatgcttataaataatttggattgtcatttggaacattctgaaaatgacatggaactcagggctatgaaaatccactggtagatgtgtagttgatgtaggcagattgaatttccatatgtgcctggcattattaaccatacagtcatacagtcgtgtaccacaggaacctttagtcaacgacagacttcatatatgactgcagccccataagatgataatgccatatttttacagtatttttcctgtgtttagatatgcatagttacacaaatacatttgtgcatgtaatactacattataattgcctacagtattcagtacagtaacatgctaggcagccaggagcaataggttataccacatagactaggtgtgtagtaggtgacaccatctaggtttgtgtaagtgcactttaggatgttttcacaaagaccaaatcgcctaaggaagcatttctcggaacacatccccattgttaagtgacagaagaccatacaagaaaactcaagattctcacaatcaaaatgaacatgtaggaaacagggcttaagaaggtcatagggctgggtgcagtggctcatgcctgtaattccagcacttttggaggctgaggcaggtggatcacttgaggtcaggagttcgagaccagcctggccaagatggtgaaaccccgtctctactaaaaatacaaaaattagccaggcttggtggtgggcatctgtaatccaagctactcagaaggctgaggcaggagaattgattgaacccgggaagcagaggttgcggtgagccaagattgcaccattgtactccagcctgggtgacaagagtaaaactccgtctcaaaaaaaaaaaaaaaaaaaaacaaaactcatagggataccaagtccttttccatcattcttaatcaactggaattacaaccaattagtatttattaagcacctaataatttgtgtcaaaaagttgtacaaagaggtaaggagtaagtataaagaagaataaaacaaggtggtcagttttaacaagatgatctacattgtgacctgaactctgtcagcaaaattaggacaaaatagctatgaaagatataaaaaattaattctttctgggagtaagacactactggaatcacaaaagaagatgtactcaacaaagcttcaagtcataatttttttttccttctgacattaaagattaccaaggctctagctctcttatggaaaaaagtaataagatgaagttaaggggatcttttccttagaagttttattatttacaaataatgaggggactaagaacctagttgttgttgttgactttttaggaataatagtactcgggcaccttgaatttaagcttagcataattatagttttaatctatgttgcaacagttctatggaatatcattaatcttttaccacttttaatatattaaagcattgcatcccagtcttggctagggaacataatttaatctgtattcaagcttggggtgcttgaatacagatacccagggttctctgcagatccccttaggagaacctctgtcaaaaaaagtttggaaaactctttgaaggacactcctttaggagtttatcagctaaatgtaggatgctctgggttactatattcattattgacacctagtttatggacatagaaagtatcctcactaaaatatttaataagaagcatgttctactgtctttgaaccaagacagagtgctcttagtaatcaaggtcaactgagctgggtgcagtggctcatgcctataatcccagcactttggaaggccgaggtaggtggatcacttgaagtcaggagtttgagaccagcctggccaacatggcgagacaccgtctctactgacaatacaaaaattagctgggtatggtggcaggtgccggtaatctcagctactcaggaggctgaagcaggagaatcgcttgaacctaggaggtggaggttgcagagagccgagattgcgccactgcactccagcctgggtgacagaacgagactctgtctcaaaaaaaacaaaaagtgaactggagtccttcgagcattggataaatactacagtggctaataatttccctctttacatgtgtaaaaccatgttagcagtttgggacacagagggcacaaactatggaatgagaagattcaattcttcctcttgtgtgaccctgggggagccatttcatccttttgaacctcattttctcttgtagaaaaaaaatgaaaagagtaagaatatctaactggtagggtaattttgatgatgaaattgaagtatgtatataaaagtactgtacacactgtcattattattttattttgtaaaacaataatttttccacattcttgtcctttagaaagcagtgccaactattgtaacaacttttttctttacgaagctacataccattttaaatatattgtgcaagtctattatatctgaaaataaatctacaaaagaaataattttccccttttgtgtactattctgtactatagcaattttgaccctttcacaattttggatctcctccatacagaaagttcccactctaaaagacttgaagatgtttgtggatgcctgggttagagaaaatgtacagatatataaaataataaaataaaataatttgaattcaaaaaagctatttataaagaaatgtaacatgcaaggaatatggctacccaatttaagcatcttcgagagtacagctatttgcaatttagaatgaaaggaattgaggataaacagttcaagtgtctgcctggaaaatacaatggcacatcaaataataattttaagtcctctgtctgaacaaaggctttagtatggtaataagtagtacaaagcaatcaatgtttcatatattataatttttcacatatggaaacttgcaactacagctctctgttggctgcatgtggtggaaacaaaaggaagatgggaatttaagggactccaagtgtatttataaagtcagaagttacactgagttggaggatagggtggaaggcatgacttgaaatatctaggtgaggagagtttggacaaaaacgctgatcccattagaaagccaaatggcacctcccaggtgtggagcaggcctgtcgcatctcacaggcggaacagcgggcacagccgaggggacgcccactctaaagagggtgaagaactaaaccccttagtttgggcttctgccaccagatcccctggattgactattagaaacttcacttctatttctccatcagtaaaacagaaaaagaaatattcgatgggtaggagtagctatggttaataaaataggtttaaatatttggcaacagaagaaagaattcaaatctgtgattgagaagcaggtcactggaaggttaagttaacctgaaaactccaattccccctttcctcatcactgcgtagtttgcttttcagtcgtttcactcagtctgcacctacactaaatcccagcagcgaagttgaaggcattcacgtctccactcaccaaggtccctggatctgaatggccaggcaaataacctagctgtgcgatagcgaatgcagtcaatatatggcatagtgttcatctggtgcttacgagtgatagaagtttttatctaatttcacttttataatcagtttgaggtctcattatttttcctttttttaaaaaataaggaccagtaacataaaatggcaaaaaaaaaaaaaaaaaaaaaaaaaagggctgctgttttaaggccccctgtgaactgtttgtatcccacctgcaggggaagtacagaaactgcaagtaagcaggttgggaatttgggagcaatttgaatggaatctgacacctgctgaaatctagaataaaaaaatgtgtattttgtatgcctttattttattcttctagtgatttatttttaatgtatgttaaaagtactactgtgtgacagattggaaataaaggaaaaacctgattcctctccacaggtaatcagtgagaacattgaattttgatgggcatttcaatgactgagttattttctccatagaaagagtgacacaagtgaggggtgagggggtggggagggagccctgtcttcagatctcccgttgtttgacttgggcgtaaggaactttctgagtcaacctgcaggtggcttggcagggattccttcttcccagctcctggctccaggtgatagctgtggtctcatctcctcagcaaacaccttcaaagagctcacagcagatatgcagtgggcagggagattggctttctccaaacacaggggagattgtggagggggagcaggtgaaaatcatattgttaatcacaaacaaacataattaaccggcaactggattaagatacctaatcagtcaaaattatttagaggctcttataaccatcacccttcttttggaagttcctgcttgctctgtgagataatgctctgttaatgaaatacatgtccataggggtcccctgaaggggacattcctcctcttaaagtgacataatgaggcttcaataaaatctctaagggggaagagtgttttaaagaacaagaggagacgtgaaaatgtgtggtcaaggactaaccaagagtcaaatgcttgcccagctttggtccctctgtgggctttaaagaaatccttcagtaaggctcagtctcaggtgatctttcattcattcaacaaatcttgcggagttcccacgatgggccagtcgccagcagttctgggcatggggggctgggtacagcaatgaacaacacaggtaacacccctgagagctagcattctaatgggcagggggtagacaatacaaataaatatagaacataatgactgctagtaatgagtgctttaaaaaattataaagcagagaacagtgtgtcacaagtttgtggaggaggtgggggacagtaacgattctaggtaggatgtctctctgagtaggtgtcgctgaatgaggggactgtagttccaggcataggcaagagaatatgagtttcgagcaaaaaggagcttggcatgttctgggaatggccagaagccagttgactagaacactgtgatgaaggcagagtcatgaaggatgggagtagaaggataggaatgagccactttggctgggcgcagtggctcatgcctgtaatcccagcactttgggaggccgaggcaggcagatcacttgaggtcaggagttcgagaccagcctgaccaacatagtgaaactctgtctctactaaaaataacaaaattagccgggcttggtggcgaatgcctgtaataccagctacttgggaggctgaggcagaagaatcacttgaacccaggaggtggaggttgcggtgagctgagatcatgccactgcactacagcctgggcaatagagtgagactccatctcaaaaaaaaaaaaaaattagatggtcatggtggtgggtgcctgtaatcccagctacttgggagcctgaggaaggagaactgcttgaacctggaaggcggaggttgcagtgagccaagatcgtgctgcactccagcctaggagacagagcaagactctgtctcaaaaaaaaaagaaagaaccagttcatatgggaccttgtaggtcaccagcatggataggatatttacataggattaaatcaaaattgatgattgtgatgttatgcatgtacacaagaaagtgcaaggagcattcactaataaaatgtacctaaatcaaatgctaggcaaaaggttaaaaagtagctataagttaaccatctttataaatatgccattataattcatgtgttaaacagcataaaatatgtactggcaaaatcaaattagcataggccctccaactgttgaagacttagactgctcaagaattaaagcttcaattcgaacaaccaccctaaaactgagttgacatgttaggtatttgtggatcacactacatacaatgaccaaaccagttagtcatatacatatgattgctatttgttaaatcattcatgctcagagtctttgcttaaccagaggctgccccttctggctctgggatgtcctatcatcaccttttctgtagacacgaccctgtcagattttcctcctttagtcctggaaagggagaaaagatttgccaagaagagaagagcctgtttacgtgccctaggtcatccactgcagctaacttttggggtatctgtttgttttgttttttgaggcagggtctcgctctgttgcccaggctggagtgcagtggtgcaatcatgactcactgcagccttaacctcctgggctcaagtgatccttccacctcagcctctcgagtagctaggactacaggtgtgcaccaccacgcctggataataaaaaaaaaaaaaattgtagagacaggcactcactatgttgcccaggctggtctcgagctcctagtctcaagcaatcctccctcttctgcctcccaaagtgctgggactataggcatgagccaccgtgcttgacccgtagctaaacttgtacctgcgcactgtcaggtttcctggggctgccagcagtgccgctcctgagctctctaagagaaagcaccacaccagggatgtagagttcagagagccactgagcctgctttggagacagaggggttgatcttcattttaatgtagttccactgaactttccctcttacactgaagatggaaatgactcatgggaattcaatcatgcaaagcagcagtataaattagattggccagcctctgcacttggggcaagtcatgcaatctggcttgttatgcattattttcttcatctacaatcatggagagtaatgtgtgtgtgggtgtggctgacagcagggaaaggcaatatatttatgaaatatttcctcaaagctgccacatattttattaacacatctggaaaatactatttaatgcttactcctctttcttccttagggtttgttttgttttgttttgtttttgagatgaaatcttgctctgtcacccaggctggagtgcagttgcacagtcttggctcactgcaacctccaactcccaggttcaagtgattctgctgcctcagcctcctgagtagctgggactacaggtatctgccacaacacccggctaatttttgtatttttagtagagatggggtttcaccatgttggcgaggctggtctcgaactcctgacctcgtgatctgcccacctccgcctcccaaagtgctgggattacaggagtaagccaccgcgcccggcccccttatggtttttaagaaaagaaatcctagttttgctttagccatgactaaaagccccagacgcaaagaatatttgtttgtttgtttgttttgttttttgttttttgagacagagtcttgctttgttgcccaggctggagtgcagtggcgtgatcttggctcactgcaacctccaactccccggttcaagagattctcgtgcctcagcctcccaagcagctgggactgcaggcacacaccaccaatattttagttcttaatggtacaatcttacagttttaaaacgatgagtgactgcattcaagacaaaccaaaattgtgccttgtttttaactgatgcctgaggaacgtgccagcaggtaaagggagtgaagacgaaaacatcaattagcttagagtttatggtcacactcgatacttaaaataatttttaaatagatttaaacaagtaattctttctttctttcgctttggggcatggaggaagcagggtgctgggcaaagcctgcacagaggcgctggcatgcctggaagccaaaaaaatgggggctgggagcgggcagtggtgtggccgggagcctgattacagtgagcacatatgtgcacatatggagagaaacaggagccaggtttctcactgtgggaaaagagatttacaaatacagcaaaggagcagtctagaaagaaccctaagatgttggattggaattggagactaacacaagatatatatatataaacacacacagaggtagatttagaaatagttatagatatgtatgtatgtggacacacacgtatacatacatgagcatacattatttcctagctctgtcttttgagggtgcctggaagcagggacagtacagtactgatgagaacccagatttccacttctaaatgccatcctccacaaaaagatgcccttgatccttggagaaatgcctggatctagggctaaatgaagggaaaattcaaaacgagcctggaatatcgtgttgtgctaaaaactatgaaaatggtcaaagggttataaggacatatcaaaagaatacaggagctagctcgaaaggcacctcactggccaaatctgtggcaactgcagcacccaaactattgatacaatctagggaataaaaagagaatcaattggccaggcatggtgtaatcacacctgtaatcccagcactttgggaggctgaggcgggcgaatcacctgaggtcaggagttcgagaccagcctggccaacatggtgaaaccctgtctgtaccaaaaatacaaaaatgttagctgggtgtggtggtgggcacctgtaatcccagctacttgggaggctgaggcaggagaatcacttgaacctgggaggcagaggttgcagtgagccaagaacatgccattgcactccagcctaggtgacaagaatgaaactccatctcaaaaaaaaaaaaaaaaaaagaaaggaatccacagagatacaaataaacaaacaaataaaagaagggagaacttccttacagtagaaggaatacatgccatttcattgtcagagttctcaacacaaagacacacacaaaattctcacttacaaaggggaaaaatagtgacctgaaggtagagaaactgggtagacaccaacttgatgaagtgaccagattagcatcaccagtgatgatgagacgtccgacggccttccttgtcataccctgatgggagcacaccaccatatcaacgattttcctacaaagaatgtgtgagtcaacatagacagaccagggtgtgggacattcttggcatgaaaggcctgcactctttaaaactataaaggttataagatagacagaaaaatatggaagacctttgataaataaatgtaacttgatcctgaattggatgttgggccagaaagagaaaagaggcattgttgaagcagcttgcaaaatttgaattgagtatgtggcttagatggtagtgacgtatggtagtaatgtcaatttcctaatttgtatggtatttgatggttttggggagagtgtccacattttaggggaatatacactggagtatttggagtaagtgatgagacattgtgccacagcttgctctcaaatgggtcagaaaaagactaatggcatgcatatatgcatatgatttaatatagaatatgtaacaatatatccatattacatatttatatagtatctatattaatatattatatactaatgtattctatgtttctattgttctgtgtatgtatatttagaaaagaagaatgagatggaacaaatgtgggaaaatgtttatttagatagagatggagcaaaagataaaatgctggtgaggcgcagtggctcacgcctgtaatcctagcactttggaaggtcaaggcaggtggatcacttgaggtcaggagttcgagactagcctggccaacatggtgaaaacctatctctactaaaaatataaaaattagcctggtgtggtggcgcaaacctgtaatcccggctactgaggaggctgaggcaggagaatcaagtgaacctgagaggtggaggttgcaatgagcccagatcacgccactgcactccagcctgtgcgacagtgagactccatctgaaaaaaaaagaaagctaacacagcagtctcagaaaaggtgatacagttctttgtgttattcttggaacttctctgcaagtttgacattatttcaaaataagtgattttaaaagaatatctgtgtatttatatagtggtataagtaacaaacactttcatttttagtggaatatgtagtatttcatatggaagatatttccatttttcaatactctctaggaattctggaacttggaaggaagggggtgagttatatagccctttttagcccctgtaaaaatgttatataaccagaaaatgtcaaaaagaaagagttatctattctctgtccaaattcccaaattctacttttagattagccactgaaataatcgattagctttactaacgtaatggaaacccagtaaatccatagtcattcctcataaaagtagaatctgcattcccctggatcaaaggtagggaccctctgtgcaataattaatttcaaataattttaaaaagggtttgctctataaaaaaatagcattccatttttacccaaagcagtatagtcttctttacagtccctgacttgcgttttatctcaatttgctatttttttctgtacagaaaattttctctaaatcattatatccctagacacacacacacacacacacacacacacacgcacacacagttttactcagcacttttactttacaaaggtgtctgtgatcatttttttcacttctttatctgacaaagatctgacattctccccttctttttttgggaaaattgagggtgaggacttgcaatttacctggtagcaagttattgaacaaccgagactagaatttagtcttttcactctacaacacaaagatctagcctaggttagtacatttgtgggttattcttcctttaaaatacttgataccagccacacttattgagattgtactctgcctctgtaagtctttaggagaagaatttaggcctacccatgtaaatacccatttgcaaagcatctctttgcattgcaaagatatactaatagaatattgaattctttgcaattgtatttttgcttgccggttgtaacagggttttagaaggttgacattcacaaaacaaagacttcttttaccaccagagtaaaaatgctcacattcaaatataactagaaaatgaacaataatttatagagaaatctctgaaagttttgctagtgtaagacaattttgattaaagtataacaatgttgttactagctatcatagatgttaacacatgatattatacattccatctagttgctataatgcatgtaccctcaacactgtggtagttttattttattttttctcacaatgttttcataagctaacatgcatttatttaatttaattttatttattaaatacctgtgtagaacttactatgtgcctggccctattataagtagtttatgaataattaattcatttcatcctcataaaactccctgaggtcattactattaccatcctccagttcacagatgaggtctaaagaagattaagcaacgtgtccaaggaatacaccactggtaaactgtagaactagaattccagcccaagcagttcaactccaaatatgtgttcataaccaatgtgtcatgctgtgccaagcctcagattcacagttgttggataattatttgtggattaaatgaacaaattactctcttgtctcttaggctgatttgaaagcattaagcaaattacccaattgttctgtaccttattttttcactttgtaaaacagaattgataatatttgccatccatttctcttccaaacaacaggaagaatggagagcatttactttacctacctgctgtatgtttttatgtctttaagactggatctgcagtgggtctagagtaggctaacagcttataccttaaacaggcaacaaaaccacaattcagtataattaagttgctttccatctgaatgagtgtgaagtagaggggcaaaagtttgagaacttcaacttccttacacatgagctttattcccatttaactctgaactgttctgtctttttttcagctgaatcagaatttgtttgtgtaaaataatagttaaatgaaatgttatctagggcttagattatatgatctaataaaaatatcaagttatagatcttctaaatgaaaatgctttcctcttacagcactgcatctctaatatttaaaaattatcaggacctagttagggataacactggaagtttctgtgccaagggtccttactccatctctgtctatccactgtctttattttgtccctgcgctttccattaggttctttattggctgtagacatggcatgaaaagaaattcaaaacaagacccactaatgttttgttttgttttttttagaaacaggatcttgctctcttgcccaggctggagtgcagtgatacagacatggctcattgcagcctccaactcctgaagacccactactgatagcagcaagggcagatagctggtccaagcactcttgtgtgcttttgagcaaatcatctgtcctttctcaatcttaatctcctcttctgaaaaatgaggctaataacaaaggctgcactgtctacctccagagctgtcaggagggtcagagaaattagtgaaactgctttgtaaactgtcctctaccattatgaagacgttaatactaaaggtcagtttcgaaaaattttccaaatatagacatttgcttttgcattatatccacatgcaaaattatccatttacattcttggcctggagctccaagtggaatcagttcagaaaagaaacagaatttgacttaatcctcaaaaaaggtggtatttcagatgctcaatgaatgtctggagactaaactcctggtgaatgagaaaaagaatatgacagacctgaagtcagatgaccacaggcctacacagatgtgtctgagatgagaacagtctttgctaaggtctacagaggtcattctcagtgcctttgctaaggtctacagaggtcattctcagtgccttgccttgtagggagatgaccttaggactccatccatgacagctgtaacagtatactgaagaatatattgaagaccagtgaattgcgtgggctctcaggacataaagatgaaatgtaccaaagaccctgtgttgttattaaagagtattgacagttttgcaaggtccaaaaagtggacagagaagaaaatttagttaacaggttaaccaaatactgactgcaaaggaatctagcaaggatccctaacattttctcttctgttcagaaactttggaagccaattcagataccctttcaaaatctgacatgtgtgtggctaaagttgtacaaaacagtgggtaatgagtgttgtcagaagtggcctgtcctatgccctatttaactttgatcacttccatgataacaaaatgcacaccttgccctaaccatctggcacaatccagccctgcttaccagggaaacttggcaagccagagttttcagggtggaaaggaaacctattatctctactagaaaaaaaaaatctcaaagcgcttgacctactgatgtcagcatcacctttacatgccaggaacaaattattacagaagaccatacctagaacacccagctggaagttaatgaatcagggaggaagactaatgacacggcacggtacattcctccgaggcagggaccgcgtctattctccttcgggtgggagtggaagtgctctgcgcacagtgggcacgctgctgataaggctgtctggtcaggtgaggacacaggtctccaaggaaagccctgccttctcctagggtgtggatggggaaagtgggagtaggagttcacctgcagcaccgagtgcatagaagctctgccgctattgaaatcccttttaaggctgaggggcagatctgaaaggggtgagcaagacagtactgtgtatgtgacgagtcctgggtgaggaacgggaccctctccctcattcccaacgccacctctccctggagtatgaggttccacagcccaggcaataaagggaagtagcccacacacctcaacccggggccacagttggaggtggggagatctaagaaacactccacggatgagtttctgaagagggaagtggaccgggaacagcgcatttcctgcttcgcctgtgcaaatcccaggcggggccaagcgggaacggggacacggtctaagagtcgcccgctgccagggaggggttggggggcagcctcgaggggacaccgcggaaccagggagggatgcgcatggagggagtgggagaaggcgtccaagtaaaatgcatgctccggtcatcgggggtaacgcgcgtccccaaatcccctctcgctgtcgccctttttttcagtcctcacggggagaggccggcgcagcagtggagcaccgcaggggctggatcggacccgcactgcagcatctgcagggctccgacctggtgcgggcctccaaggcagggggcgcgcggcggcacagccggtggccgcgattttccgggccactccttccccccttacactcccctcccgcccgcgaccttcgacctccatcctggacccacggggtactggcccggggacaaggaggagacgttaaaggtatcaaggggcgcggcaccgccgcctagacggcgccgggacgcgaggtgcgaatcggcggcgtccggctgcgctgccctacctgggaggtgcgggaccctcggccgcgctccaccgccgcgcgccacctcgtgctggcctccgggaggcagccgcccgcgcacgatttataaatgcaaaggccttattgttgttctttgttcagggataccattgtctagtcatccacgggcagcctggagttttcccagggtttgcggcgcgcactcccctcccccgcccccacagacttgctctccagcgccaacccggatctgcctaggtgcccacgggtccttcccgatcgacttgagtgtccttcctccagcccctgctttcccagcatcgaaaacacaaaagcctgccggaaatcacccagcctttgcctggtcactcaggggcccacggataagcgtggctctgattcctccaggtcagccccacggttcgccacctacccgagttaatttctgcgcccgctgaccaaaggccccaactggcaacgggcacagcttcttggtgcgctagtcgcttccttgcccagcctttagagcctcgggtccggcccaaggacccggggacgtgagcgcaattagtagccaggagccctgcgaccctggaccgtgcagtgctaacgcacccgaacggctatgcgagcggtgtactcggctcttacttgtgaaagttgtttcccccaaccccctgcgtaaatctcttgtgttgagaaaagcaaggcttgcaggaagccactccggatgtttgctgctttacatgtggcatctgtggctggctctgataacgtcccggggcaccacgtattaaagtgaagagactgaaatagaaggctccacacaccgcgcgcgggtcagcgacgtcgccgccctccacactgccccccgaaatataagacaagcgaatgatcagaagaaatgagatctaactaggtcacagtatgtaaaagggactagtcttggaaagccaccacaattcctcccctgtaaatttgtaaactgtgaatttatgatctcagggagggtgttataagaagtagggggaggggcgtcaaaatctgaagctcctactccaacctatgattgtgtactttcacctgatttctcttaccagaccaagatcagtccccaagaacaagggcaaataaaaatagggaaacccggccgggcgcggtggctcacgacggtaatcccagcactttgggagaccaaggcgggcggatcacctgaggtcaggagtttgagaccagcctgaccaatatgatgaaaccccgtctctactaaaaatacaaaaattagctaggcgtggtggcatgcgtctgtaatcccagctactcgggaggctgagacaggagaatcgcttgaatcggggaggcggaggttgcagcgagccgagatcgcgccattgcactccagcctgggcaacaagagggaaactctgtctcaataaatgaataagtaaataaatcaataaaatatggaaaccccacgttttcttccccatcattttctccaccttcttggctcccaagcgcacctctcccaataatgagctgggtgaggaagagcatgaggatgaagaaagtgtacagggctaaatctgtatatgtacattttttggactcacacctggattgtatttcctgtagtgttttttaaggaattagtcaaacagactagacagataaaaatgaattctggaccagatattgttttttaattttcaatgtttattctaggaaaactccttagctcataaaagatttagtgttaagagaaaattctgctttgagagctttgaaaaatatttattattatccagaaaagttagaaaagatctcaaaaaaaaaaaaaaaaaaaacagcaaaaaacaaggtactacggggttaatttgtagattgctctctctcctcctatagttttgttgcttatttaatcatttgcaatgtgcttttgctttatactgaagcccatttttttttcagaaaaaataaagctttaaaagtacatcatcatttaaatttgtctaaaatcaaccgctttcaaaactaccaactagaagtaacacctctctatgatttctttatgcagatttaattttttttcttgtttgaatcttagagacccaggaactagaaacactttcttaacttgtcccctagccaaggcttcacagatacttgcagaattaaagataagttggcttaaaacaattgtgtaagagttcttttgagaaaaagcaatgccagagaaactgaaggccaggagtttgcaaaagttttgtatttttatggatgccactaataagcaagactggacagacggtcttgttgttgtagtatcacactcaaagcagcagcattttacttctcagattccaggtgtaagctctacttttttatcacgccttcataataaagaaaatctgttctggagattcgtatattgatttctttgcaaagttatctctaattatgcaggaatggctgttagttgccctcaaaaaccaacacaaatacacaaacacaacagcctggcttagtgattattaagagctgcaagtctgaaggcggactgctgggtgtgaattccaccttctcaacgctgtagtctccagcaagttccttaacttctctgcctccgtttcctttcctgtaagatagagtctacctcagggttaatatgaggatatgcttctttgctaatgctggagggcgctaggaatagcagtggcaggctgtgtcatttctcagtgttgtataacggcttgttttaaaagtcccactgaaaactttttttttttccagatcgaaacacaagtttaatagtcattcagatttcattccagtctaaagaaacttatagaaatctaattatctgccagaataaccgctttaaactgactgtaagaaccacagttactttgcagctaaaacagattgttctcttcccccaaacaaactcggacatttagacaaatattgctgctgtctttacattttagaaatcagtattaaggctcacctgttactgaacacatacgagaaacagttttgttatgcgtatcttatatacatcatgtatacattttcgtactttcacatgatgtgtataataagatacacataaaaactggttggcttgtcatgagtaaatgctttattctttagagtgaaggaatattggatacagaacgtcgttccatatttaatcttgctttagaaaattaggatttatcttggacacagcattttgaatataacacaggcaagttgagtcctgggggaaaaattgtatttttaaatttattatcaacggtgtctttcgcatttgagaaaacacatttgaagatgcccatgcagttccttggaagtaaactaggtcacccaccactgaaacaccctcggcttctgcaaaaagatgtgctttaaagagaatagaatggacgctcggtatgttcatctaaacgaccttgggcaagtacgtcgattccaaggtacaatcagccctcccagacggcttttcgagtctccctaaccccggtgggagaggacgcggcgccagagcccagctccggctagttttcccgggggcaggtgtagccttgggcgcggggccgggggaggggcaaggggcgggcgtggggttggactgggacgtgggactcggaccacggcctgggcgtgggcctaacgacgcgggaccggcccgccctcgccgctccattggccacatctgtgcagaaaaggccccgcggcccaggggcgcccgcagtgtcactaggccggctgggggccctgggtacgctgtagaccagaccgcgacaggccagaacacgggcggcggcttcgggccgggagacccgcgcagccctcggggcatctcagtgcctcactccccaccccctcccccgggtcgggggaggcggcgcgtccggcggagggttgaggggagcggggcaggcctggagcgccatgagcagcccggatgcgggatacgccagtgacgaccagagccagacccagagcgcgctgcccgcggtgatggccgggctgggcccctgcccctgggccgagtcgctgagccccatcggggacatgaaggtgaagggcgaggcgccggcgaacagcggagcaccggccggggccgcgggccgagccaagggcgagtcccgtatccggcggccgatgaacgctttcatggtgtgggctaaggacgagcgcaagcggctggcgcagcagaatccagacctgcacaacgccgagttgagcaagatgctgggtgagtccgagtcgcagacccaggcggccgggcgcgctggcgcgaatcgctaggccgatttcttaaaccccaaactgttctttgcgagcctgacgcccaaaaccaggggtgtgtagcggccacgtcctttcttaaggctctgggttcccttcccgcttcccgccctccgaccctccaaagcagctttccgccttgctctccggctcccggattccccaggtggccgggggcgcgggtccaacggctctgggaaggcgacttcccggcacctccgggcggcgcgagagcacccttggccctgaactgggccggttgtgtccatccctcgaccccttccctagttaggtgtccttttctgtttttcgaacgaccgggtgatgggtgagcggaaagccgcttccaggagaccaaaagaaaggggtgcctttagaggacgggtgttccccaagggctcggactcaggagtcccagatctccctctttaacttcaccccggttgcgcaattcaaagtctgaggggggaggtgcgtccaggtggggccaggtggggcctggagcgggagcgcagccgataagccctgcgcccctctcccccttccttccactgtgcaggcaagtcgtggaaggcgctgacgctggcggagaagcggcccttcgtggaggaggcagagcggctgcgcgtgcagcacatgcaggaccaccccaactacaagtaccggccgcggcggcgcaagcaggtgaagcggctgaagcgggtggagggcggcttcctgcacggcctggctgagccgcaggcggccgcgctgggccccgagggcggccgcgtggccatggacggcctgggcctccagttccccgagcagggcttccccgccggcccgccgctgctgcctccgcacatgggcggccactaccgcgactgccagagtctgggcgcgcctccgctcgacggctacccgttgcccacgcccgacacgtccccgctggacggcgtggaccccgacccggctttcttcgccgccccgatgcccggggactgcccggcggccggcacctacagctacgcgcaggtctcggactacgctggccccccggagcctcccgccggtcccatgcacccccgactcggcccagagcccgcgggtccctcgattccgggcctcctggcgccacccagcgcccttcacgtgtactacggcgcgatgggctcgcccggggcgggcggcgggcgcggcttccagatgcagccgcaacaccagcaccagcaccagcaccagcaccaccccccgggccccggacagccgtcgccccctccggaggcactgccctgccgggacggcacggaccccagtcagcccgccgagctcctcggggaggtggaccgcacggaatttgaacagtatctgcacttcgtgtgcaagcctgagatgggcctcccctaccaggggcatgactccggtgtgaatctccccgacagccacggggccatttcctcggtggtgtccgacgccagctccgcggtatattactgcaactatcctgacgtgtgacaggtccctgatccgccccagcctgcaggccagaagcagtgttacacacttcctggaggagctaaggaaatcctcagactcctgggtttttgttgttgctgttgttgttttttaaaaggtgtgttggcatataatttatggtaatttattttgtctgccacttgaacagtttgggggggtgaggtttcatttaaaatttgttcagagatttgtttcccatagttggattgtcaaaaccctatttccaagttcaagttaactagctttgaatgtgtcccaaaacagcttcctccatttcctgaaagtttattgatcaaagaaatgttgtcctgggtgtgttttttcaatcttctaaaaaataaaatctggaatcctgcttttttgctctactagtacctctgtcacactagtcttatcaaaaaccagttcttaagatcaatgttaagtttattagttaatgtaaatttctcatcctcgaaaagggtgaacataaatgcctttaaggagtatatctaaaaataaacattaggatatctaagtttgatgtaattgtttcaggaaggaaaaaagaaaagcattctggaatgagcctacttcaagtaatcttagtttctaaaactaacagttaatattttcaattccagtatatcactttaagtagaaggggatgtccaagtaattttggttttctaactgttgaatcataagcttgacctgcccccagaggctttttggatgtttttatctgtgttttgccatctctttacactcctcgacattcagtttaccttaatcttcacatttttacaccttgggaagtggcaagcatcgctgggtttaagataaaggagtcacaaaaactaatcaaaataaaatttgcattatgacaacttttaatacactttagcattttatttgattggttttttttttttttgcttttagatttaatacatatacggacgattgcacagacttaggggagaatccatgaatggtttgtgtgtagtgtccctatctatcaccattactttatcaagaagaaacagttacagggttgtgagtaaaagatggggatcagcccctgtaatctgccatactaatcgctgtggcacgtctcaccacatttgagattgagacataaatggaaacaggtgacttataatgggcatttcctgtgccagatgtttgttcaatgccattctaaacagtgtgagcctcaacaaacctgcaggtttaggtgctatttttcctattttgtaagaaaaggaggcaccaggccttcccctgccatgtatatgaaggcttgtattacaagttcttttgacatatttctcacctgttttcctctgggccagtatgtattcatgggcactgggagaatttacattctgttgatgagaaaccatataattatccttagcagcaagtgctatagaaaaaggaaaggcttggaggatagcttccagcatttacatgggagagatgtctgagctgaaatgattggctggattctcttgaaaaagggcatggaatatgttttttagaagggattcctggaatgtgaaggatagacagttttagtgaggaaaggtaagtttattctgtcaggcataacaggctgcctttaaaaaggttaaattctttctcttagctcagatgggttgtttctgcttccagcctgagctccttctgcagggtgtcccaagagttcccagtagataaagtggacagaagggctaccagcccaagttcagggctgtgctcagattacacttggcattttcatcatagtcagcccaagaagactcagttttacccttggctgccatctcttaacgatattaagataagtacagaaaagaaaaagaaaaagagttcttaggggaaagatctaaagtcctgtaaattacatctttaactactcactaggcgcaggtggaaaagcagtaagagctaaaattgttaagttaatgttcatgcatttacatggatggagggattggtgttcacaaataattttttttgggtaagaagcatcaagccaattccttctctttcctcaagcacacagatcaagtgactgcaggtagcagctagtgattttttttaattcctaattttagtttttatgggtacatagtaggggtatatatttatggggtacatgagatgttttgatacagatatgcaatgtgtaataatcacattatgtaaaatggggtatttattccctgcagcatttatcctttgtgttacaatccaatgatactcttagttattttaaaatgtacaattaaattaatattggctatagtcactctgttgtgctatcaaatactaggtcttattccttctatgtttttttttttttggtagttttaaattaccaaaacatttggtatccttaaaccctttctcattttaaagtacagggatgtgggccctggtggcaaaattagaaatagagctttggggtccattacagaccattatagttttaaagtgaacgacagaatgtaaaacttctgcctaggtcgaacgactctatgtcatcaccaagtgaacagacctccccccaccaccaggtatgacatcgccaaatgcataaatcccctctgtgacattaccaagtgcctggatacccccatgacatcaccaaatacgcagacctctgtttcctcaagtagattcagatgaagtgaccacaggtaccagctagtgaatttttgagacaaaatattaaatctgtctcaagtttttactgttttattttggagacaaatacacataaaggatacattgcttttctacccatgtctaatttggtactttagaattacattaggaggtaagaatccagctcttttatgagctaagatagccagacttgatgccagtacagaatgtgcatgcctttgagacatccggagcaataaggaagaggttattttttcccccatgagaatactgactacatctctattaaagctaccaggtgggtctgataaattacagataaacttgtaaatgacttacacaagcagctaagagataatattgcaatgaaacaatttacttattattcttatcagtagattattgcctctttagtttgaatcacgctgcagaagatatcagcttgaatttgtactgatattaggaaaagcacatacaagccaaaggaattcagataaaatggaaagggtgcaatgaaccaaaagacatcatctcagcctaacattttaaaatgtcccatttcattttgtttttaatactgtgcctgtcacataataaatgttcaacattcccttcctcctcctgttcctctttgatttgttttgacaatagtggacagggagaagtattttacatccattatttcagcacaaatttatttttcctgcttacaaggtgcttccttctgggtctacaatattcatctgaagaaaaatggcactgatgttcctacccagtccccatctggagtaggctcaagttcctccacagggtgggctcctaatggagagagtatttctttaggtcctctggcctgggatccagcagcatctcagtttttcaccataacacctatccctaccctccttctaatgagaaggtggctgtgtgctttctctggaattaccaagcagctttatgggaataattcagtttgcaccatcctccatatacaaacactgaaccctcaccactgatatttttcccaggttggttcaagacactggaaactacaatgtcttagtgcagcacttagtacacgcaagtgctaagtaagttgttgtgataatcatgatgttctttaatgtaaaaatttctctgtagctaagattcaagaaaccatttggctaaatattttaaaaatctcttcttgctgaagaaattttagctttgacaatctttttttccacttgaatcgaagtcttaaaccttttgccaaagttgacttcctaacaagtattccccaaattgatgttgctccaaaagatgatcttgtgaggatactctctgtgtgcaggttcagataacaaaaaaaataaacatcagtagctgtgctgtggatcccagttctgtaagtcagtgccttcccataagcctgataacttgttaggcaagaaaaagaactgtggtgcgtgtgaagttaaacccagcagttttctgctcttggttaaggactgtctcattttcagtattacctgacgttaccggttgctcagaaaactgactgaataacttgctggaagcaacttgctgggaagccccaaggaaactcaagagttcctgctttgcctctcttttctattagaggcagtcacctggtgactattattcctttctcttgaataatgtgtttgaacacaaaaatttaaccccagactgtaaactactggagcaaggattagagaatagctctatgaataaagctagcagtgtctgtcctccgtaagaagaaaaatctctgcagtttgaatcagaggttcacctggcttggaaacttagctctgtgagtttggagacatcaccgaccatttctgcactccagccagcttatctgtaaaaagcaggggtgacggtaaaacattttgccaaagttgactctggataacggcgaaagcttcactgaactgttgtagggattagatgagattacgctgaagggagtgcttcagtgccacagaaagtgatctctctccctctctccggcttcctatcttttgattttatgtatctctctctatctcagctgacttggggaatttaatttcattcttccattgggaaagaaaaaacaacaggaactcgccttccccgggtgctttccttagtggaatgagaattttacagccctataagatggtctgtgtttgctggagacacagcatctgtgttttactttgtgctttggacagcttagtctctttgattataaaatgagaaaaaaataattgtcagttggagaactttgtatagaatgtcttaatacacaagaactcccatcctgcatgaaaatcttaagatctttataaaagggacagttaattgggacatactgaatgcgatatcaagtttgccaacatttatctttctgttagcccctcctcccaccagtatggtttctgaagtcctgaatcgatttccataccgtttactttttgagaactgaacagggtctgaattcttgaggaggaataagcagagtgtaatggggaaaaaggcaaattaagaaaagattctggcttccagtagttccaggtaatactgaaacgcgatccgcaggcttttaaatccctcagtcctcagaagttatttctgtgaactgatggatatggacggactgatagaagaaaattagtagacaccagcaaaatggaaggagcaattttatagctgccccctatatagtggatttttctgctttttaaaataaatatttgtttggacgtttgaatacaatagtaaggatcagaggtgcacacatgcgcaccaagaatattgacctgaaaaagcttactgagataacaggaaggaaaaatagaaaataaaaatttaggtttgtagtttcaataacgagactgtggatatagaaaacattattgttttattcatttaaaaataattttaaaaatgtaaatgatgcacacgcttacaacaactcaaacaacattgcagacgggcttgtaatataaacagagttgtcagaagtttccatctctccccagccccagtgccacaggtcagaatcaattccttttttcttccccctactgggcattacctacattaataattctgcttgtctagtggttaattaattaatgtacctgcatggctaattttaggcttatgagttttagacatttactttctgctacgacagctaagaatttcctgcccgctcttcctcggaatatagttacatccttatttccacttctgttaattgtcttttaaagtccaggactacatacccttttctagttccatcgcgaaggcgggaagtctcgattcctcactgggaaaggtgaggacatggatgcctccacccttccctgaagcactcctctcctcttctgcggaggtggatttttaaaaacagattggggttggggtgggggagggacagcacgcagaatattgatgcaaacgtcatatgaaaaaaaatacatataatatatatgtatgtatacctgcaaagtgctgttacatatacgtgtgtatattaacagcattatgaatcccagacaattggggccgcttaccgccgtggctgtgactttaaattcactcacttcttacatccactaggaaaagaggatttgtttccctaaagcctataaaaggggaaaggcttaggcgcagtggcagccccgttccccgcaccctcctgccctcgggtcccgggcgggctgcgggagttcctcctgcgcgggcgtctgaggcgctagaggtcaccggagcgcgctcccctcgccagggacctacactcttcccgctgctacattaggccgcattaacaaggatctggattcactttaatttaaaaggtaaaagatcttaggtctgatgggggagtgcggcgaggagagctcggaccgcgacgtcgcgcgcccgcttcgaggagttttgagctcttagcttggtgccggggcccgcccggcgctagatgaagtgctcgtttactcggcctaagccacggtgactcgaaggtgagaatgcaacttcgcggtgcaccggctcaggggcctgcctgccgcgccaaggcttcggaagttctcagcgggaccgctgggacaggctttcctctgagggaagaggaggggatttgtgcctctgcacgttctttcctgtggaggggaaaatcaaaccctgtagccgtccgctgccgggtagggatcgggcgatgctcggcgcccgagttctccgccgttgaggtggagcccggcggcgggagcttagattctctgtgggccacatggtctcagaagaggccccgcggcccgggggcgcccgcagtgtcgctggaccggcggcagcgctggccacgccgtgggctgggactggcccggaacgcgggtggcggttcggcctcggagacccgcgcagccgtcggagcatctccgtgcctcgctcaccaccttcttttcctccgcgtccggcggagggtttcggcgcgcggggcaggcctggagcgccgtgagcaggccggatgcgggatacgccagtgactaccagagccagacccggagcgcgctgccggcggtgacggctaggctgggcccctgtccttgggccgagttgccgagctccctcggggacttgaaggtgaagggcgaggcgccggccggggccgcgggccgagccaagggcgagtctcgcatccggcgccttccaggtggggcgaaggtcgagcgccagaggctggcgagggacccccgcccagcttgacgcccagctgcgcccgacgccgggggaggcggagcgcggggaacccgggcgccgggaaccccggacgtgggagggctgggcttctgcgcggggagacgccgggcttggcgaacatcctcaagaaccggtcggtggctctacctccgaaaactctttcgtgtttagcgattctcatatttagtgtttccctttagggagacttgaccggcaattgcagactcgtcttgggagctggagatgacattaaataaaaagttcaaaaccaaattgttaattatctccaggtataaacgataacacaaaattttgcagtcttgggagaaaggttttaatgtgccgcctaattaggccaggttctgcaaaaacgaaacagctctattccaagttaaaaagtatgcccctattccaagttaaaagaaaaaaaagttgtattccttgttcatttattgagtaaggaattgagagatgggtgctgagttattacagattctaactgctcgccacacatggagctagaaatacatttaacagcctttcaggaaaacgcctaaagctttagaatttcaagctagccaggttgcaatctagagctctagtttgttgctgaagtttgggagaggatggcctctacctgtgcacacatcgagttaattttccagagtcttttgaagttaatagggagcggcttttctgtttgtttattttttgacagggtatccttctgtcgcccaagctggagtgcagtggtgcatcgcagctcactgcaacctggacctcctgggcccaagcgatcctcctgcctctgtctcccaaagtgctgggattataggcatgtgccaccgcgcctggcctgttttttgcttttaagagaaggaataacatggccagagtttgtttgtttattttttgagatgacgtctagctctgtcgcccaggctggagtgcagtggcgcgatctcggctcattgcaacctctgcctcccgggttcaagcgattctcctgtcccagcctcccaagcagctgggattactggcgcgtgccaccactcctggctaattgtcttattttttagtagagacgtggtttcgctatgttggccagtctggtcttgaactcctgacttcaagtgatccacccgccttggcctcccaaagtgttggaattacaggcgttacccaccgcgccccgcctgttttttgcttttaagagaaggaataaaatggcccgagtttattttaatcaaaccagtgtaaaaccctttctattctgcattatagctttatttaaaacttatttcatagaaatgtaagcagcatatgaaaacagtttccctgctccagtcccaacttcagatattcagatatgtgtcctgtgttcccttgaacacattttctcttttcttttctttctttcctttatttcttttctttttctttctttctttctttctttttctttctttcttttttctctttctttctctctctttctttctttctttctctttctttctttctttcctctctttctcgctttctttttttctttttttgagatggagtctggctctgtcaccacgctggagtgcagtggtgcgatctccgctcactgcaacctccgtctcctgggttcaagcagttctacctcagcctcccgagtagctcggattacaggcgtccgccaccaggcccagctattttttgcatttttagtagagacgggatttcactacgttggccacgatggtctggaactcctgacctcaggcgatctgcccaactcggcctcccaaaattctgggattacaggcgtgagccaccgcgcccagccgcacacattttctatttacagtcatacagaggagtttctccccccaagcccccattgggatcgcattttcctactattctgaaacttgctttttcagtttagagtacacatttggcggtcttgtattcctagaagatggacttcgatttaccggttgatggtcttctccactcttccgtggggtcagccccacttgtcccgtctccagtccaatgtcagtttgtgacttaatcttttacatcgtgtacagtctgagccctcagaccccctcacacatgcacaaattgagtttatgcacagaacagatagtacctgtacttaaatgtagactcactggggagcacgtttcactccataagaaaaggggtaaaaattgtgcacaccataattgcaatattttacaagaccggtgctttctttatctcaggggtgctggcagagagaggtgcatagaaaactctgggtgggttatttcctcctggagcattgcccctccgttgcctgcttacctgggcaagtgctggtctgcgtggatggcttattggcacttccgggaccctcatgtcgtaaggctgagacctaagaagctgattctgtccaggaggtgagatctgccccgataatcgtaggctgatggggtcgctgctctggcgtcatagttaatgttaacttccactcacactgtgttcgtctgggtgataaaagtgtgtggggcgcctctttgcaggcttcctgtcctcttgggagatgtctgcgctttgtgagtttgggaaacaactgggtacccagcgaggtgggcgcaggaggaggagctgccttcctccgggaggcggcgcagcgcggggatcttgcgggaccaggccagagaccaggaccgtcccccaaccgttcgcggccgcgtagccctgggcggcctgggcctgcccttccccgcgcagggctttccctcctgccggtcgctgccccgcacatggctctggtcgtactcccgctccactgccaccactgcccacgccctgcgtccccgtttgaccgcgtggagccggaccccgccttcctcgccccgcgctgccccaggcctgccccgcaccagcagctaagcgcaggtctctactgcaagcccgcagccccctcatcgctgggcctactggcgacccccggcgccatgcgcgtgaactgtgggcgacgggctcgcccttggcgggcggcgcgcgcggtttccagatgcagccgccgcgccggggcagctgacgccgcctccaaagacgcgccctgctggacggcgctgaccccacgcagccagcggagtctcctgggaacagcccaggcgccggtgccgacttcaacctctctgctcaggcctcttgagttgcgttaccagcttaccatgtattactaagactgacagaatataggaaatattcctgtctttctcagaaggaactttccagtaaagacagcgtttaatactgttaacgtctcaaaggaggcagtgaaaaatgtgctcagcttaagcatatgcaaagtcagtctatttccattttctacttatgcacattatattttgcattaaagtttgatcattttaaaagtggaaaattaatgggcagtggcagaaacagcttttttcccccaaaagtaatcttcttccaactagttttaaacattttactaacaattattgagtatcttctacattttaagtcattattttaaagttcttggttattgacatgttgtaaatttgaaaaataaagtttttcttaaaaaattgtgtgtgtatgtagattttatattctgcaaaattaaatgaagtgtgtgtgtgtgttattcagggccccgcaggaaacagctaacatacttaaagagtgcccgaagaaagatcatgagtggtctatacatgtgaatccatctcgggactggaagcatccagggccccaggcgctcaaagctgcactcatcaggcctgactgggatgatggcaaagcagtccctggagcccacgatgactgtggctttaggagttctgccagccaggagctctgaccttgaagctaatgctgattgtggcccagaaagatgggactaggaaataaatcccggagaaaatcctgttgcccacctggtttgctggccaaacctgacccccaaaccagaggacaggaggccagtggacgcaggaacccggagagctgggggagagggcatatgctgggggacatccaggtggaaagggccaggctttcctttaagcagctccatgggaggccgtttagcagagcaccgtcatattatgggtgcggagcgtcagggatgggaggagggaatcttagctgctgttcttctcattctcaagaactttatggcccaggtggggacccaaccaaaaatgagtaacaatacaacattgccgggtggaacgttccttccctactttctctggttgacattacttcttagaaaggttgggtgacaccctcttaggagcttgtgttttgtcccttaaatgttagaggtttgaaatactagtttctgaggaggcttttcaaaggttggggatacattagtacctgcagaatgagctaataaaatggattaatacatgccattctccatgataaatgtagagtacgtatcttgctatttttcatactacttacttaagactttgaatgagcttggctattttccgaccaaaaattagctatggttttcaaaagagctttgtaatgtttgagtgcttttccctggaatcagggatgtggatgtagggtgaatgatttctgtagaggatttctaaaatcggtttttcaggaagcatctttgtgatcaaaggtgcaattcaactccctggattcatgttaaataaattttgaaatgaaataccataggccggatgcaatggctcatgcctgtaatcccagcactttgggaggccagtctgaccaacatggaaaaactccgtctctactaaaaacacaaagtcagctgggcgtggtggcgcatgcctgtaatcccagctacttgggaggctgaggcaagagaatcgcttgaatctgggaggcggaggttgcggtgagccgagatagcgccattgtactccagcctgggcaacaagattgaaattccatctcaaaaaaagagaaatactgtaatacccacatgaccagcactgtattgctgtttaagaactggtgaccagcactgtattgcactttaagaattggggacagagctccctgtttggcctctcagatgggatgcgaccatggcagttgttgctgtctccccagaagaactttggtttttctttggagaacttgccctttcagcatcgtcagtcatgaggtctgggtggaggtcactcgggtgagcccggcatgtctcaagcttgttggcattacccatccccctacccccccagttatccagttaaaggacagacgtgactcagaaggcgggtggatcgcctgaggtcaggagttcgagaccagcctgaccaacatggagaaacctcgtctctactaaaaatacaaaaattagctgggtatggtggtgggtgcctgtaatcccagctacttgggaggctgaggcaggagaatcgcttgaacccaagaggtggaggttgcggtgagctgagattgtgccattgcactccagcctgaggaacagagcgagactccatcacaaaataaataaataaataaatgaacaaacaagagagtgactggaagcagccctccttggacacagtgggggtgacggtccataaccaatgcagccattttcatgagagttgggccaggaggttaccggtggagaacggacacaaagccaagcaaggacacagagaacctggatcccaggtgacaatatcaaggctcccagggagtgagctgtacctctgactacttcagttatgtgagcaaattcagtttatttactatgagttcattttcttttcacttgaaacaaagggattcataacagataaccagggtacagggcaggctggagcagtgattgctaattccactggctggcacaaggaaataccaaatatggagtctctttggaccgccggcatttgcattgcctgagatcatccagaaatgccgaatctcagaccatcgctgcacttcttctttagattggtccagaacagtacttctcaaatgaatgtgcatgcagatctccttgggatcttgctaaaaatgaagttccaagattctgcacttctagcaagttcccaagctaggctgatggatcatactcagagagcaaagccctggtctacacttacttcatagggaccattcttttttttttttttttttttcccccgagacggagtttcgctcttgctacccaggctggagtgcaatggtgcggtctcggctcaccacaacctccacctcccaggttcacgctattctcctgcctcagcctcctgagtagctgggattacaggtgcacgctgccaccacgcctagctaattttgtatttttagtagagatgaggtttctccatgttggtcaggctagtgttgaactcccaacctcaggtgatccgcccgcctcggcctcccaaagtgctgggactacaggcgtgagccaccgcgcccggccttagggaccattcttaacctaaaacacttgaagttcaggaacggacactgaagattcatttcagaaaagtcactagatgagaatcttgggtcatttctcctctgctccttacctcggcacagcctgtcctcctgactcaccaggatcctctttcttttctccaaagtcttatcaatgatctagttagatcgagactgacatgagctgacaacacatacaccctgttggcaggcggcaagcagcccccgcttcctcatgcatttccactggcctcactgccaaattcattattgctcatcatttcaagaatctgtctctggtttgcttgtctctcttactagattagagtcaggctcttgctgtaacacaacatactgaattagatactgagtttctaccttctataaacaaatgattctcaaagcaggttgcacactgcaatcagtggaagctttaaaaaaagactgaggcttggtctggccccttgagattctgacttaattggttttgcctgcagtcagggtgtttcagttttaaaatctctcgaagtgctgctaattgctgccataagtagatgaacatattgatatcacagagctacctgagaagtcagttacttatttaggtatttatttcatcaaatatttattgaacatctattatatgccagacactatacgttgtcttcaaagataagacacatacattccctgtcctaaaggagcctgtcatcctgtagaagggaaaggtgtatagacaaataattgtaatggtgtgttcaatgcaatgaaaagtataaaaactatcctttggcaaaaggcagagtggtggattccatgtaaaggggcatgggataaaggtaactatggctgacagtaactgagcattactatggaagaggaaggcctccagagagtgctgatgtgtgtgtgaggccttgaaggaggagagaacccaatgaagaaggtgagtgggagatgggatggggaaggtttttctgggttgaggttgggggatttggggatgagatggtggaggagctgagggggctcccttctgttttctttgtaaaatcagagtggggtgaaaacctgagagggcacagtgctgggtgttgggaggggcaggggcattggcaggggtgggcctgagaaaagcagtgagctctgttctgcaacattgaaggccctgataaaggtgagttcatagatcagcatccctcttcaggctcttgtgagcagaagctcccatgtaaacagagatgagactataggattcatccgaagctgtgctttcagcagcaggggtgaaggcagacaagagggccagagagtgttggtgagactggggttcgagagttccaatttccatatggaggaagtgagatctgaagagagcttgggaaaaagggagggagaagctgggatgacaggagaaagtatcagaggggaatttcagagacaagtaggtcagggtgaccaaaatgtgcaggatggactgctgagggggtgactgtcactggagttgtggagctctgggacgtggatgctgaaaccccccatggtggggaggggaagactgtgatcctctctgtacatggttcatgagatgcccaccagtgggtccacccagaggggaaggcaagtctagtgggagtggatttgaagaaatcattcaggagggggaggtaaaagagaacatagggacatggcactgaaatgcaaaacagagcaatggagaaacaggaaaatactgaggaaaaaggacagaggttcctagtgataaaaggaagccttgcacatccctctgaaagctggattttttttttttttttttttttagtttaggggtaaaagacctagagttctgaaactttgctagaggcaacagtggaactgttgctaccagctcaaggccaacctagacagcatctcttatcaactctgtaattgatagcaggctttacagataagtgatttcaacaatgcactcctgctgagaacttccagttagaattaattgatcttgatcactgggtgctaaacttcaaaaatcattattaaaaaatattctgcccaacagctccatattgacaccttgaggcaaagccccattcatctggcatcaattacagttctgctcagcctggagggatgcctgacttcccacacttgacattcctctcccctcccccagaccctagaaccttcccttatcctattactgagcattagggccaggttctctatctgacagcacaaggacaacacccaatgtcaagaggagcactatctgacccaagatataatggaacttcagaaggtggctggctttcccagaatttcccactagaggagggggatgcacctggggtgctggaaacatgcgtgcaggggtcctcctggagcctcctcctccagagaagtccagtgatctccaaaaacagggcacacagaccctgcaagatgcgccccctacttagagagagacagagccgcccgaagaccttcgaggacagaacccgagttcaccagtcaatgaacgccgggagcatcctcagaccctctgcagccaatgctggtgtgaaggtggagtcagttctttcttggaagtttattaccagcggcggctgcgacgtccatgtttgcaaaggaagggaggccttcctcttcccaagtggatcctacatcccgctccactcactccactcaggagaatcaaaaaagaggaagatagggctttctgccttccttttcccagcttttctttctgggctgtctcactcgggcttttgctgaaccatacaccccagaaccatccaagagcacaatggctctgtgctgtgggggagtctccaggtgcggttatatatagtgtgggccagcacacccactcccgttactcatgcagtttggccctggttgaatgcatgaacaatctcttccaggcactccctgttttcacttcccgctgcccacagggcccctcctctgtctgacccttgggggtcaacatcctttctagctaatccaccccacttcctccctcaggccgggctggaggctgttttttaacttcaggggttcctggagaagagcttcctctgccccttcacgatcacatcaaacacactggattcagggtcttgagatttgaagatttgaaagcagaaagatcagtgtgagtccaaactgtgggaaggaacatgatgaaagaggctggacttgaaatatccaccagcgaaggtgggcaaagggccgcctcaaacagggagaaatgggagcacctcgcattctgggttctctggacagcagcctgagcagctggagcaggggcgcaggggtgtctgaggggctctggcgagagttcgtgcaagcagcatactcaggcagggtgggcgctgcacaggtgatggagctggacacctcattttgagagccccctagctgggtctgtgacctggggccagccccaaccactcggaaggtctgtttcctccctgtaaaatgcaggtaattatattaaataactaactgcagagtcactgtaaggattggaaatatttgcacagtgcctgcctgaatgatggtattgggaggagacctgtgtacctgagttcctctgacctgatatttccacgggagctggggggcagctgatgaggaagaagcttctgccccaccagcgcaattctgtaccgagcaatgcagcctgagcctccgagtgaccaccctcctgagcagtcataattcactgggatagaaacatgaaacagttttttctcgaagtatggctttaaccatgctctcttaaatctccctgtcttgctctttaatgatcccttgggaagattttattactttttacttttatttgttaaaatctaactgtatttatttgaaaactaagaatgcaaaaagtcaattcgctgtaaaacctcaaacatagtttaaatcttatcccttttattcccttccctaaaggtttaaactgggaccctatctaccagccatggaagaggagggacaccctgccttacagatatcccttctcccctccctctctaaggcaggcttctgctgtgtgcgtgttagactggggtgtggaggaaggagagggaaagggacaagggtcattttacttacctggtagccgctgctgtgcttatctctggtgcttctctgcaggtcatttactggactaagatcccttatgtggcagggtccaactcatgggccacatgggatgctttagaaggtgctgggggccaccatactgccttcttcctgggagatgggctgcggctggccacttccacttccacctgcccatcctgggcggcaagcccacagctctgtgctcaggcgccctcacctggaaggcagttttctctgtggtgcactggcaagatgactagggcctgatcactttgcatggtgcccactctacaccaggaaaatccatgcactctggaaggtagtgagatggcccctactgcccctctcccagccctgccgcttcccctcaaattcttttttctttcaaatttgattcttagacatcaaatcagaaaccaaagttcaactctcctttattgcatttcctgaaacatctgtcttcctttttttttttttttttgagatggagtcttgctctgttgcccaggctggagtgcagtggcacaatctcggctcactgttaactttgcctcccaggttcaagtgattctcctgccttagcctcctgagtagctgggactacaggagcgcactaccacacccagctaatttttgtatttgtagtagagacaggcttcactgtcttggccaggctggtctctaactcctgagctcaagtgatccaaccacctttgcctcccaaggtgctgggattatagatgtaagccaccatgcccagcctgtcttccttttcagaaattatttaacctacaattatttattatgtaatttataagacattcaaggactaggtgtggtggctcacacctgtaatcccaacactttgggaagccaagatgggagaatcacctgaggtcaggagttcgagaccagcttggccaacatagtgaaacccctgtctccactaaagatatgaaaattagtctgtaatcccagctatttgagatgctgaggctggagaatcgcttgaacctaggaggcagaggttgcagtgagcagagatcgtgccactgcactccagcctgggcaacacagcaagactccgtctcaaaaaaaagacattcaaaattacacagtgtaatagcataccacccatcgtaagaaacaaacatcttctacagttggtcctttgtattcctttgtataatactacatccgaactgtgtttgtagtgattctttatttgcatgtgaaagaaacccaactctgactggactgataaaaagaaaggaagtattgattatgtaattaagccacagaaagggcaggtagacttttttcttcttttcaatttttttttgttttgttttgaacctttaatgataatatatatgcatactgttgggctatagaacaccatgtttggtttgtctttgggtcaagggttggggatgcgcatggcagcactagtgaacagggtctacatcaacaaagatacacgtggtcataaagcaagaaactggtgcgtggcgtggtcaactttcatttcctcatcactcagtagcatgttggggtccccacggctgatgtgggacagatgtccagactctgcgcattgcaaggtgtcctctaacacatccagctcgagcagcatgtggtgcatctcccttggaaatttctcataatgctcatacccctgaatcagccctttggaaacctcgagcaggtccagagtcttggctgcttccaggagtgctgcccactccaccatgggtagcatacacaagtgttgaactttgtagggttgatgtggacctcagtgtagtggggaggtggaaggggaagccacagggccccatcccctgcacatgtgagctcagctgattgtggggtgagcagtttcaagtcatcccattagctcttgccaggccagaagtggaacggtcctcttttctcttctgagcttctgttggcctgttggtttcattcctttcggctgtggatctccaatatactggatctattgggacagctctttccagcctcattgctagatagggcgtgtgccctccaccagctccagacagaaaaatgcaggggaagtcatatgcctatcgttgaatcaattattgtgtgtagggggactgggtattgggttaggctgagcctggttttttagagttaggtattttatttttagaaaaattgagagagaatgcttggtactacttagtatccactgtatagatccactcaattctttaaaatgctgcattgtattctgcttcagggctgtgctgttatttggccaatctctattaatggatattaaaggtgtctccatatggaatcaatctaggttcccatcaatgatgggttggatgaagaaaatgtggaacatgcacaccatagaatactatgcagccataaaaaagaacaaaatcatgtcctttatagcaacatggatgcagctggaggccattgtcctaagcagattaacacagaaacagaaagccaaatgtcacatgtccttacttataagtggaagctaaactttgggtatacatgggcataaagatgggaacaatagaccctggggactccaaaatggagaagggaggggagcaagggctgaaaagcttcctaatgggtactgtgttcactattcaggcgatgggttcaacagaagcccaaaccccagcgtcacacaatataccctcgtaacaaacctgcatgtgtaccctctgaatctaaaataaaaaaaaaatttaaataagaacttaaatggactggatgtggtggctcaccctgtaatcccggcactttgggaggctgaggcaggaggatcacttgaagccaggagtttgagaccagcctggccaacatggtgaaaccccatttctactaaaaatgcaaaaattaaccaggcttggtggcacatgcctgtcattccagctactcaggaagctgaagcaggagcatcacttgaacccgggaggcggaggttgcagtcagcagagatcaccccactgggtgacggagcaagactctgtatccaaaaaaggaaaaaagaaaagaaaataaattgtctctatttttttcctgatatgaacaatgctttccataacattcttttatttttgtaagcatgcgtccatattttttataagacaaatttccagaggtggaattgctgcctaatggtatgcgggtggatcacgaggtcaggagatcgagaccatcatggttaacatggtgaaacctcgtccctactaaaaatccaaaaaaaaaaaaaaaaaaaaaaaaagggaaagaaaattagccaagcgtggtggcgggcgcctatagtcccagctacttgggagcctgaggcagaagaatggcgtggacccgggaggcggagcttgcagtgagccgagattgcgccactgcactccagcctgggcgacagagcgagactgtcttaaaaaagaaataaaattgatattgccagattactttctagttgcactctaccagtagttcacaacagtgttggcttttccatactcccaccaacatcaacgtactggttaatttgtgctgtgtaacaagcttctgaaaacttagtggtttgaaaccaacaaccacttatttgcccaccattccattgatcagcaatttaggcagggcccagatgggatggctcacctatgttgaccatagtgccccagttttacagtcagctggaggtcagtgacctcgctcacatgtctggcagttggctggctgttaggtggagtgatggagacaactaggtcatttgtatttgtcagtcagcatgttgttggtggccaatggattcccaagaactggaagttgcaagttccattgcatcagtacttttcaagcctgcatttgggtaacatttgctaataaccctttggccaaagcaagccacttggtcaagctgggatccataagatggaaaataagctatacctcttcatgggacaaactgctaaatattgtgatcatttttgtaatctatcatagccaggttatatcattttgttaatcttggtcaatatgactggtaaaaaatgaaataatcttttcttaaattttactattatgattgatcattttttcccaatttgtgtccatcatttaaatttgttatataacttgagtgtctgtatttttgtttggggttttgttttgttttccactaaattgaaacaccatttttgacatatattaactttctcatatgtacttggatttgatttcttctgcatcctctatattttttctgtaccttatttgttaattcctgaaaatattttcaatatttctttttttttttttttttttttcagagaacagggtcttgttaagttggccaggctggccttgagctcctgggctcaagcaatcctcttgcctcagccttatgggtagctgggatcacaggtgctgccaccatgcctggctcctatttactattcttattttaaaatttctttttctggccaggcatggtggctcatgcctgtaatcccagcactttgggaggccaaggtgggtggatcacctgaggtcaggggtttcagaccagcctggccaacgtggtgaaatcctgtctctaccaaaaatacaaaaattaactgggcgtagtggcagacacctggtcacagctacttgggaggctgaggcaggagagttgcttgaacctgggaggtggaggttgcagtgagctgagattgcaccactgcactccagcctgggagacagagcaagactctgtacccctctccctaaatttatttttctattaattaacttttattattctatttaaagttaaaatcatacttatccagtttgaaaagaattggaatttaaattggaatgatagtacatttgtagcttactttaggtaaaatatatatttttacgattcattcccatctcatatttcctagcctggtctagagattcaatgcaatccctattagaatgccaattgctttttcttgcagaaaagacagtttgatcctaaaattcatatagaaatacaagggtcctcaaatagccaacacaatcttgaaaaaaaaagttggaggatttctatttcctgagttcaaaacttaatacaaagccaccgtctgatacttacaactcaacaataaaaggacaaataactcagtttaaaaatgggcaaagattttgaatagactattttttatactgtctttgtctggtttttggatcagggtaatattagtttcataaaatgaattgggaagtcttttctattttttggaggagattgtgtagaattggtgttacttccttttggattgtttgagagaattttcctgtgaagccatctgtgcctggagatttcctttttgggaggtttttaaattatagattcaatttcttcaacagtcataagattattcaaataatctcttttatattgaatggtattttgtgattttcaagtaagtggtctatttgttctaagttagtaaatttatgattatagaattgttcatagtattcacttactatcctgttgatatctgcagtgtctgcagtgatattctgtttcattcctgatatagtaattggtatcttctctctttctttgtcagtcttgctagaagtttgtaacttttatagagtttttcaaggacccagtttttgcttcattggttttctctattatttttctggtttcaattttattgatttcttgtttttccctgcccccaccacctttccttccttccttccttccttccttccttccttccttccttccttccttccttccttccttccttccttttttccttcctttttcttgctctgtcacccaggctggagtgcagtggcacaatcatggctcattgcaaccttgatctcctgggctcaagggattctcccacctcagcctcccaagtagctaggactacaggcaaatacctaaaaaaaaaaatcattctaccataaagactcacgcacacaaatgttcattatgcactattcacaatagcaaatacctggaatcaacttaaatgcccatcagtgacagattggataaagaaaacttggtacatatacaacagggaatgctatgcagccataaaaaagaatgagatcatgtgtttttgtaggaacatgaatggagctggaggctattatcctcagcaaactaatgtggggacagaaaacaaaatactgcatattctcacttaaaagctaaataatgagaattcacgaacacaaagaaagaaacaacagacactgaggtttccttcagggtggagggtgaaaggtgggagaggagcagaaaagataactatagggcttaatacctgtgtgatgaaataatctgtacaacaaacccctgtgacatgagtttacctgtgtaacaaacctgcacatgtacccctgaacctaaaatgaaaaaaattagcttgtgactttgctagctcacttattagttctaatagccttattggtagattatttgagattttctttgtagacccatatgtcatttgtgaataaagacagttttaattcatctttccacatttatatgccccctttttttcctcacgttactgagctggtgagggctttctgtacagtctcaaaaaggagaaacacccaagagtcttccttctttttctggtgacatgactcgttggtaagtcatctcccaagaggatgaaagtacatttttaattactagactctgcctccatgacactcacctttggaggcaatcaaaccaccttagtttgagaagggagtagagtgaactttggtagtgtgagaactgaaaaagtgagtgactcaacacttgtagtggctcatctcccagaatgaatgcccagtgattatgggtccctgatggacttaaacatgtctttggggaagctgggctcagagaagaatggacattcattgaactgagaggatagggctcttaggctacaacatggcaaatatggtgagaaagtctttgcatcatgtgtggctctgaggaaatggaggcatacaggggcaacatctaacttcagaagtcctggccaaccagtgctgggagatgggcctttgctttggacagagggaagactgtttgatggcagtcctgggtggcagagatatggcaatgccagtggcaatggtttgagagacaccagggctgttggagtcttggatccacttggcagtgaatgtttgagggatctttgtttggactgcatgtgactgaaattcttgaatgatccagaagaggataagagagagcctctaggagggtgaaaatgtacttcctgctagtcacacatttgggagttcaaatcagttttaattcaattgtgggaaatgaaataaataaaaagcagaatcattaaatgttttgagaaggaaacgatggacatgtcaagtgcatggtgtgccactgtatactggtgtgtactattctcacaggtcaagggaagaaaaggtgtgcacaagcatggaggctggagcaggtaaagcccatactggaaggacaagttcattggcctgttcagagtggaggagaacccaaggctcttgggccagggtggggggaacttgaacaatgcttctgcaaagaacttttcctacaatgagttaaaaacaattccaagatctggaaatatttccacttctttttcttatcagactaaaatccattttagtaggtatttcttgaagttattaagggaatagacttattgtttaaagagagggtggctgctccatttaccagggagaacctatttaagaacccacagtcttgggctctttccaaggcattgtaaatttactttacagtgtctgatttactttaaagcttcttgttattgcagtttaaaacaaaatttatcctgcacacatcctgtttaaaacagaattttctcctctgttaggcagagataaagaatgcaagaacgtgtgcttttatagcattgattgcaccttgatattaggtgaaaatgggccctgatgctttaaattatcaggttgatggctgaagggaaaccaaatcaatatgcattttaaaatgtaatttcattatttcttaatttagttagggtgatagttctaacaaatctaaatggaagaaaaattcattttgtctccttttcctcttgctccttcactttcttcacctttgtgttcctctttagaagtgtgacatgtacacatttttatatatagcattatggtactcctccaacatttagatcctattttcttttggaagacaacagtatgctccccaggctgcgtgacatgctggtggatcgcacctgtccctgtctggcacagaatcactagtagctagagcagctctcccttgctgagcagcccggggtaactgggaccttcttgtgcagcacttttatttccttttgccaactcacagcggatttgcctcttgcataagtgagcaaagcccccagaagtgttgtatgtgctaccccatgtcatgcaaagatggaggtagcaggctccatgcactgtgcatgcctttctgtctttgatagggctcaggtatttggcccacatctttatagtttcaaagactgccagtggaacaggagtcatgcttttcagcttatgacctctgaaagaaacacatctcatatatgcttgctttggagattcagctagttgacaatggttgatattgacaaaaaagtcaaaaatctacaagaataatattttactgctagtctcaaggaattttgacacagataggccttgactatggcccactgaagtgtcatgagaactaggtttgcttgctttttaggtaatcccctgtcatttctggataatctcgaagaaaatgccaatttcttgctgaggatgagcagccttcttggtctgaaaatagtgcttctgcctcagggcaacttccttcacgtgccctcacagatgcccccagtgctttatgctgccttctcctaagctcatcagcatcctgcccttatctgggaatcctctgtgactttgacctgggaaggtccttccactgccctgggcatcacatccactggtcatcatatccactggacatcacacacactggtcagttgctagggaaggttctggttgtagacctcggaactggccttgttttatggtaactctgtgacttcaggatagagactacgtgtcccatattggttccctttaaaacagtcaaccagaattgtgtcacttgctgtttcaaaacttgtgtttcttgtagaacctaggcctcagttgtggtttgaatgcttctatattcagatgacttttcgggcaaaaagattggcacttcattgatgactggtcaattcttcctagctagaccaccagtcctgctcatcgtctaggctctctttgactcaattcccccatcaattgtcaatcaagctctcttcttcccctcttctctatctatctctctaccccagctttggtgttctacaatatttaaatgttctaatttacagtttttgtgacactttggttccatgtaacagaaaatccaactgtaatttgcttaggtaaccatgatctttttaactcacacgactaaaatgtttacaagtaagacatatttcaagcatggctggatctagggactcaacaatattctcagaaccaaatttttctcctttcctttttataaattttgcctctggttccttggaggtgaatccatttttagataccacatggaggcaagatgactggagaagctctaatatccacatggcaagaggtacctacatggcgtggtccccattccattaatggcatcttaagttggctgcttcttgtgcaaaacccagtctctgttgggtaaatactgtcagttcaagatttcctccttggttttctccccaggggctctggaagtcatggtgcatgggggcggggaagtggcttctttcttggtgtcttcatgggcttccatccctgctcagtcttctgatgaaacatttgcttccccttctgctctccaagtaggtatctgttgtttttgtcccaacttcaaggtgtcctcattcagctacttccatctttctgtggcacaagaatttttggtcaccctgctgtttcctgtggggactgcctgagcctttaaaaaaaaaaaaacactggctaggggcagtggctcatgcctgtaattccagaattttgggaggccgaggcaggcagatcacctgaggtcaggagttccagaccagcctggccaacatggcaaaaccctgtctctactaaaaatacaaaaattagctgggcatggagggcacacctgtaatcccagctactcaggaggctgaggcaggagaatcacttgaacccagaaggcggaggttgcagtgagccaggattgtgcactgcactccagcctgggtgagaagaaacaaactgcgtctcaaaaaaagaaaaaaacaacaacaaaaaaaacctaaacatacttgctatcatttctagcctaacacttcaaatataaattgagtctcagattagcttactcacatatttccagccctgtgttggtgtttctaactccttctcacaagggttttgacaaggttgagcaggggccaaggagtaagctttgatcataagtattgaaaaccttctcctttctctagctggttagatttttaaaaaaatcacctattgcttaaaaaaagagctgcattcctttctgcgccctctctaactctgtaaagcatattcgttctgtgcttgagtctcctaggctttgctcttgctggtcacaggcaaatatctggaattttaatacacacagcaaacagcaacagttacaaaacattttctttcttaagtttctctgaatccatggctttcaagactgttctctgtgttttaaacttgaaagagtactgtgagagatggagaaaccaagaattggaccctccattgactcagaggctcctgctgagatgttaggaagaacaaacactgggaaatggggcagggtgggaaagggtgcggtggaggacgtgtatttgtttaagtggtccaaattttaacttatttctattatgcctaacagctcttgtatcctgaaatcatatataataaaatgctgtaatgaccatcacaggatgatcttacaaaggacataactagtagagtttaggagcattggtggaaaggagggaggaaatatacatattctcccaacatctcaggttggatcagggtgtagtgagtgttctgtctgggatgtgatatgctgagatgacaatgacagtatttgtgaagctcaagcttcatggtgttagttctgaacaggaagaaggaaggaggtgctacagcagtggttccagactctgggtaaatcaccctgggggtacttaacaaaaatacactgggcctcctgagccagaatctctggggttggtgataagcttccagggttttttcttttttttttgagacagagcctcactggcgcaagcttggctcactgcaacctccagctcccaggttcaggtgattatcctgcctcagcctcccgaacagctggaattacaggcatgcgctaccacacccgggtaatttttgtatttttattagacacggggtttcaccatgttggccaggctggcctcaaactcctgacctcaagtgatccaccagccttggcctcccaaagtgctgagattattggtgtgagccactgcgcctggccatagggaattttattgtagccagcctagtacaagtcaagtatgtttggggaacactgtgttagatcagggaagaatcaacaaaatataaaatggcagcatgatcccctggtagcctggttttaagagacttcattgtcaagtgctctgacatgaatagtgctagacaagaaagaatactgagctgaaagaattttaatgatttatatgtggaggagaagatgttttctttgtaaagttgtcaaagctaccatatttggaactctttagaaatggttggccgataagagaccctgatgtgcaaaacaaaccattggggaaagatgctaaactgtttttcttctattgattgaacctaattaaaatgatgtcttaacattaagctatattccacttgtcaagctatgaataattttatctgcctttctctcttctaaccaggctaacattaagagaggccagtattgaaggctgcatcattaaaaatcctgtccaggtaggagaagtctctggagaaagccctatacatcataagactgctctgtttctgtgtagcaggatagaacaaggaaagccttgtcttcattatttcccacggattttaggacatcttttgcagctgcattcagatactcacgaagtaagcctttgattaggaaggcggagaaacagagatgcttaaatggaaccgggcaaactaaagtgagcacatagcttagtttgtattccctttccttttgttctctctgatagtgtttattctttcttatctgaaagcattttattgtctacttaaaaaatcttaggtataaatttatagagcttggattttaggatttatataatctctgctttgctgaacattcaggtgcttttaacaactgaaatctttcaagttgtatgccaggtttttgtgtatgtaaggttttctatggaagaagattcaaatatttccttagattttcaaaggagtctttggcttcaagatgataaagaactaagcagaagtcttgatgctaagtcaacagttctctttgggaatttgacagtgctaatcggtagtttctatagattacaagatgccccacacctgaacaatagaaaaaaatctaaggtcatcaaatgagacccttgaggggcggtcctccttgcatctggtctgagggctgtagcaactggttcctttctcttgataatgcttttcttgtttgttttgaaatgtgggttgctagagagattaactgaactaggaggggttctcagagatgtggcagtgcagagagggctcatgacttagataactctttagcaaagtgctgtactgggccaaacttgacatcacctggtgcagtcttgtgcaggaggcatgcacctgagctctgatgaacaatcctctgtaaaactctattcttcttgctttgggtcttcttgcaaccccagggagcctgctcagagagtctgtcatggtcatggcataataattgattttaaactgggcacagtagtgtgcgcctatagtcccagctatttaggaggccaaggtgagaggattgcttgagcccaggagtttgagtccagcctgggcagcatatcgagatcttatgtctaaaacaacaaaaaaaattaactttataaaaaaactatatattttatcctctgtggctaaaaatttattcagaataccccctctatcttactccttaatatatttgaatgtcaatagctatttcaagaggaagagagggcaaaagtaaacattcttgaacattaatatatctgaagctttcctgtagtaacattccatccacagacaagtctgtaaagtaaggccatgccagtttatagatgagaaaaatgagcgctcctctagcaattctgcctcagcaatggtttctctaatcctttccactctgctgtcttctctgacctaaagcaaacccatttcttaggatgaccttcttccttttaagtgaatgaacaatttctgtcctcttcatggccagctataaagaaaaaacttgccttgactttctgtcttcagactctcatttcctttctctcctcatcattgcttctgaaacaccccagaaactcctacttgtcaacttatcctaaattccagagaactgatgtgagttggaaaggaacggtgggttcgagaagattgcagaaggctgggaacaattaaaaggatggaagtggcagccagggtacaaactgggtcaaaccaagaggggcccgtccctgtgagagggtcaaggtttcacagaagcacaggtgagtgcagaggtgcaagctgtgagttgttgcaagaaaagcaaatgagcatgtgtagaaggcaaatgcactggaaacgttgtctctgttgaatgtgcttatgatcagtgagagcctgcatggctcttggaatgctggaaacagttcccctgacagctgcctggtagtttttgttattcaaattgcacatcaaattgttctttgactggtctcatggattttattcctacacaggtgcaggctaatatgcagccacagactcgaagggaccctgcatgcaatttctggagctctttctctcacatcatcctttctgccactctgctcacaaattctagttgcctcagtctcccaaactccaacctctgtttcctgagctcagcagaactgctgcactatgcttgcagtctcctttcacaagtctttatagtcttatacactagctgatatattgtgtattatttgtttattttctgatattgtacagctatagtaggtcctcaatgtgttaaattaatacacgaatgcatcaacagaagggttcggttagttgctgtttttactattttatttcagtttagttttatttcattttactattttatttattttattgagacaagatctcactctgtcacccaggctggagcgcagtggcaccatcaaggctcactgcaccttcaacctcccaagctcagcctcctgagtagctaggaccacagatgtgccaccatgcccagctaactttttatattatttgaagagatgggatttcaccatgttgcccaggctggtctcaaactcctgggctccagtgagcctccctccttggcctgacaaagtgctggtattataggtgtgagcccccactcctggctttcagctggtttttattcaggttgtttggaggaggttgagtatggtgcaacctcagatgaagactccaaattctctttccctcaccctcttttctgggacccacagtccacccacatactattgatcttctgaatgccaaaccagactaattatcgtcttccttctattcccaagtctgccttccttagatattccttgtctggaaaaataatactatatacatgttttactttattcatggtaaattacctgctgtcctgaacttactctttcaaccacaacattaattgaaaattttttgcatctcctatgtgccagccactgtcctaggagctgggctaataaaagcactgccctctaagagcttacatttcagacagggagacacgcaggcatgcaggtactactacactgtaataaatcacaacagaggcagaaaacaagatgctcggagacttaacaggaaggtaaggtctccttgtttcgcccatgtctctgactctccccaaccactatctctagacttcgagaagtcccattcattctctgttattcagcacatatatatatctcttgggcatagttcaaggtccctggctttatgttgctccagtgtgtttatacagctaccataacacttactgcttgtaaggctaggatcatggttttttgtgcctctgtagtcaaatcaaaagcatagctcctagcacatcataggtgccgaaagaatcaagaggccaatgtgacatgccattttccttatgcagggcccaaatctcatgcccctgtatagatattttgtagggtttggtgacaggagtactggtggtggttatatactgtacggtatcactagagcatgggattttttttccataggttattggggtacaggtggtattcggttacaagagtaagttctttagtggtgctttgtgagattttggtgcacccatcaccagagcagtatacactgcaccctatttgtagtattttatcttttgcccccctctcatccttccccccaagtccccaaagtccatcgtgtcattcttatgtctttgagtcctcatagcttagctcccacatatcagtgagaatatacgatgtttggttttccattcctgagttgcttcacctagaataatagtctccagtctgggcacgatggctcacgcctgtaatcccagcactttggaaggtcaaggtgggtggatcacctgaggtcaggagttcaagaccagtctggccaacatggtgaaatcccatctctactaaaaatacaaaaaaaaccaaacaaacccaaacaacaacaacaacaaaaaaattagctgggtgcggtggtacatgcctgtaatcccagctactcaggaagctgaggtaggagaatcacttgaacctaggaggcagaggttgcagtgagtcaaaattgtgccactgtactccagcctgggcaacctagtgagactgtgtctcaaaaaaaagaaaagaaaagaaaaaagaataataatcttcagtctcatccaggtcactggaaatgccattagttcatttctttttatggctgagtagtattccatcatatatatatacacatatgcgtatatatatacacacatatgtgtgtatatatatacatgtatatatatacacacatatgtgtgtatatatatacgtatatatacacacgtatgtatatatacgtatatacatatatacatacatatatatacatacatatgtgtgtatatatatacgtatatatacttacatatgtgtgtatacatatacgtatatatacacacacatatgtgtgtatatatatacatgtatatatatacacacatatgtgtgtgtatatatatacatgtatatatacagatatatatatacatgcatatgtgtatgtgtgtatatatatacacatatgtgtacatatgtgtatatatgtatatatctcacagtttctttatccactcgttgattgatgggtatttaggttgtttccatgattttgcaattgcaaattgtgctgctataaacatgagtgtgcaatgacttcttttcttctaggtagatacccaatagtgggattgctggatccagtggtagttctacttttagtcctttaaggaatctccacactgttttccataatggctgtactagtttacattcccatcagcagtgtaaaagtgttccctgatagctgcatctatgccaacatctactgttttttgattttttgattatggccattcttgcaggggtaaggtggtattgcattgtggttttgatttgcgtttccctggtcattcatgatattgagcatttttcatatgcttgttggccatttgtatatcttcttttgaaaattgtctattcatgtccttagcccactttttgatgggattgtttgtttgtttttcttactgatttgtttgagttcattgcagattctggatattagtcctttgtcagatgtataaattatgaagatttttctcccagtctgtgggttgtctgtttattctgctgactgttccttttgccgtgcaaaggttcgttagtttaattaagtcccaactatttatctttgtttttattgcatttgcttttgggttcttggtcatgaaatccttgcctaagccaatgtctacagggtttttccaatgttatcttctagaatttttatagtttcaggccttagatttaagtctttgatccatcttgaattgatttttgtttaagatgagagatgagaatccagtttcattctccttcatgtgattagccaattatcccagcaccatttgttgaatggggtgtcctttcccccactttatgtttctgtttgctttgtcgaagatcggttggttgcattgcaagtatttgggtttatttctgtgttctcttttctgttccattggtctaggtgcctattttttataccagtaccatgctgttttggtgactatggccttatagtatagtttgaagtcgagtaatgtgatgtctccagaattgttctttttgcttagtcttgctttggctatgtggggtcttttttggttccatatgaattttagaattgttttttctaattctgtgaagaatgttggtggtattttgatagagattgcattgaatttgtagattgcttttcgcagtatggtcattttcacaatattgattctacccatccatgagcatgggatgtgtttccatttgtttgtgtcatctatgatttctttcagcagtgttttgtagttttccttgtagaggtctttcacctccttggttaggtatattactaagtatttaaattatttttgcagctattctaaaagggattgagttcttgatttgattctcagcttggttgctgttggtgtatagcaaggctactgatttgtgtacattaattttatatcctgaaactttgctgaattcatttaccagttctgggagctttttggatgagtctttagggttttctaggtatacgatcatatcatcagtaaacaacaaaagtttgacttcctctttaccaatttggatgcccttgatttttttcttttgtctcattgctctggctgggacttccggtactatgttagatagaagtggtgagagtgggcgtccttgtcttatgccagttctcagggagaatgctttcaacttttcccgtttcagtataacgttggctgtgggtttgtcatagattgcttttattacattgaggtatgtctcttgtatgccgattttgctgagagttttaataataaagggaagctgtattttgtcgaatgctttttcttcatctattgagatgactgtgtgtttttgtttttaattctgtttatgttgtgtatcacattttttgacttgcagatgttaaaccattcctgcacccctcggatgaaacccacttgatcatggcggactacctttttgatgtgctgttggatttggttagcaagtattttgttgaggatttttgcatctatattctacaaggatattggtctgtcgttttcttttttgattatgtctttccttggttttggtattagggtgatattggcttcatagaatgatttagggaggagtccctcttcattccatggaatagtgtcaataggatttgtaacaattcttctttgaatgtctgatagaattcagctatgaattcgtctggtcctggactctttttttgttggcaatttttaaattaccatttcaatcttattgcttcttatcggtctgtttagagtttctatatcttcctggtttaatctaggagggttgtatatttccaggaatttatccatctcctctacgttttctagtttgtgtggggaaaggtgttcgtagtagccttgaataaacttttgtacttctgtgttatcaatagtaatagttctcatttcatttctaattgagcttatttggatcttctctcttcttttctcgaaaattgtctattttcttggttaatctcgctaatgttctatcaattttatttatctttcaaagaaccaaccttttgtttcatttatcttttgtaatttttttggtttcagtttcacttaattctgctctgatcttttttatttatttttcttcttctgggtttgggtttggtttgttcttgtttgttcagttctgtgaggtgtgaccttagattgtttatttgtgctctttcagattttttgacataggtatttaatgctatgaactttcctcttagcaccgcttttgctgaatcccagaggttttgataggttgtgtcgctattatcagtcagtccaaataatttttaaattttcaccttgatttcattgttgacccaacaataattcaggagcaggttatttaatttgcatgtatttgcatggttttgacggctccttttggagttaatttccagttttattccactgtggtctgagagaatactcaatataatttcggttttcttaaatttactgacatttgttttgtgccttatcatatggtctttcttggagaattttccatgtggtgatgggtagtagcagatctttttgtaaatgtcctttataaaaggttaaaaatgttcccttgtaaccccagtttgcagataatttatatcaggaatggatgataatttttgccaaagttttaaattttcagtatctgttgagatggccagtttttaaaagtttgatattattatgaattaatttatttgcaaatcaacattagttgattttcaaatgttaagccagccttgtctaactaggctaaaccatacttggtcatgatgtcatttaatatgttgttgaattcaatttgctaaaattttgtttggaatatttgcattcatgttcataggggatattggtctgtagttttacttttgtgtaaaatctttttctgattttggtattagggcaatactagcttcatataatatgcagtgaaaaattcactcttctttcatttttggaggaatttgtgtagaatttgtataattcctccttaaattttttggtagaattcaccagtgaagctatttggttctgtagtttttttgtgggaaggttttaaaagtataatttcaatttctattaaacatttagggctttgcaggcaatttatttcttcttgagtgagctttgctaatttgtgtctttcaagaaatttatcaattttatctaaattgtcaaatgtatcagcataaagtagtttctaatgttttattatctttttagtagaacctgtagtatcacccctctcatttctggtattggtaatttgtgtcttctttttctttctaatcagtttggctagatgtttatcaattatattgatcttaaagaaccagcttttgatttcattgtttttttctactgtttttctatttttctattttacagctttttacttattttttgttatttattttcgtgagcttactttaggtttcattttctcttctctttctagtttcttaaggtaaaggctaaaattgagttgggaactatcttcttttctaatataagcattaagtgctataaattttcttctaagtactgatttaatggtcttttgacaaattctgatgggatatatttttattcagttaaaatactcataaatttttgttttgagcatttagtaccataaattttcttctaagtactgatttaatggtcttttgacaaattatgatataatatattgttatttttattcagttaaaatactcataaagttttgttttgatttttttggttcatgggatatttagaaatgtattatataatttccaaatatttggagaatattccaaaggtctttctgtcattgacagaggggcattcaaatctctgactacaactgggaatttatctatttctccttgatgttactgtagtgcctgctaatccatggttttactttctgtggtttcatttatccactatatagtacaataagatattgagaaagacagagagagagagagagagagagggtatactcacaaaactcttattacagaatgttgttataattgttctattttattattagttattgttaatctcttactgtgcttcatttacaaattaaactttatcgtaggtatatatacacaggaaaaatcatactacatatagtttggtactatctgtggttttaggcatccgctagggttcttagaatgtgttctccatggataaagagggactactgtctatcagtttggttgcatttgtttgtttgtttgttttgagatggggtctcactctgtcacccaggctagagtgcagtggcgtgatcttggctcactgcaacctctgcctcctgggctcaagcagttctcctgcctcagcctcctatgtacctgggacttcaggtgtgcaccaccatgcttggctaactttttgtagagacaagctttcgccatgttgcctaggctggtctcaaattcctggactcaaggaatctgcccaccttggcctcccaaagtactgggattacaggtgtaagccaccttgcccagcctgtatatatcatctatttttgattcatctattttgaagcaatctgttaatacatgcatattcatttagaatttttatgtacccttgatgaataaattctttattattatgaaatgacattcttcagtcctcataatattttttcctctgaaatctactttttctgatattcatataagccttttcagatttatttttattattgttagcatgatatctacatttccatcttttcattttttaacctgtttgtatttaaagtgtatatataaactcactttatatttatatatttataaatatatatacactttatatatatttataaacataaagtgtatatatatttttatatacactttatatatatttataaacttataaagtgtatatatatttttatatacactttatatataaatatatatacacatatatttatatatatgtgtatatataaatatatatattatatatatataaaatatatatatttgtatatataaaaatatatattgtatatataaaatatatatatttgtatatataaatatatataatttgtatatataaaatatatatatttatgtatatataaatatatatttgtatatatatttatatatatataaagtgtatatatatacactttatatttaaagtgtgttttctataggcagcatatagttgggcctggctttcatattcaatctgacaacctctgtgttttaattagtgtatttattcaatttacatttaatgggattatggtaaggttaggtatggctgtaacatcttcttatttgttttcagtttgctttatttattattctttttctttctccttttttcctgttttttttgttttagttaatttgtttctatgattcagttttttctccttgtgggttcttagttataactcattgttctagtatgtaatggttgctttattgtttatggtatacatctttaattatcacaaactaccttcaagtgatatatcacttcatgtatagtatactttcatttctctgcgcttggtctttatggtgttgttgtcatgtactttacttttatgtgttataaacccaataatacattgttatttctgtttaaacaagcacatatcttttaaggagacttaagtaataagaaaaaatttcttatatatttactcatgtagatatatttttggtggtcttcattcctttgtgtagatccagatttccatctggtatcatttttcttctgcccaaggatgttatttggcatttcttgtagtgcagacatttcttctggtggtggtaaattattctagcttttatatgtctaaaaatgtctccacttcaccttcatttataaaaaatattttttgctgggtactgaatactgagtgacagtcacctgccccccagtacttcaatgatgctgctccaatgtctcttgcttgcctgcaatctttggtgaaaaatctgatgtcagccttatctttgtttctctggatgtaatacgggtatattttctggctgtcagatttttctctttgtcattgttttttagtaacttatgctgtaatttggggtagttattttcatgtttatttttcttggtgttcattgagcttagatctgtaggtttatagcttcactaagtttggaaatttttcagccattatttctaaaaatatatttttcagtctttcttcttcagggactccagttactcatgtattaggccactgaaactatcccacatatcacttatgctttttcattttttggaattttattttctgcgtgttttattttgggtagttttcattgccacacttttaatttcactgatctcgcctttcttctacaatgtccaatctgcctttttcttcctccagtctatttttcacctcagacattatagttttcatatctagaagtttaggttaagccacggtggctcacgcctataatcccagcactttgggaggccgaggcaggtggatcacctgaggccaggagtttgataccagccgggccaacatggcaaaaccatgtctctactaaaaatacaaaaattggtcgggcgtggtggcgggcacctgtaatcccagctacacaggaggctgaggcaggagaatcacttgaacccgagaggcagaggttgcagtgagccgagatctcaccattgcactccagccttggacgacaagagtgaaactccgtctcaaaaaaaaaaagaagtttaattttaattttcatctttgtaatattcttgggccaggcacagtggctcatgcctgtaatttcagcattttgtgaggctgaagtgggaggattgtttgaggtcaggagttcaagatcagcctgaaaaacatagcaagaccctgtctctacaaaaatttttaaaaactaggtgggcatagtggtatgtgcctgtagtattagctactctggaggctaacagagaagagtcacttgagcccaggagtttgaggtaacagtgagctatgatcaggccagtgcactccagcctgggtgacagagtgagacactatttctaatatataattagatatctgtaatatctaatatatatatatatttataaacaaataatgtatatatatttcctcaatatttctacttaacttcagaggttaaacaatatggaaaacaattctaataatggctttaacatctactttgttaattctaattttatcagttctggattggttttgattgattaataaatgtcttcatttgggtcatattttcttgcctctttgaatgcctggtaatcttttattggatgccagacttgtaaattttgccttgttggtgctgggtgttttcgtatttctatacagcttgaactttgttctgtgatgtggttatgttccttaaaaacagtttgatccttttgggtcttacttttatgatgtgttaggtcagtccagtgcaatattcagtttacccttgtataaccgaggtaagacctctactcaatactctgtgaattatgattttgtttttactctggctagtgggaacacacactgttcctcatcctatgtgagcatgctgttccttcagatacttttgggtgagtttttccataacctcaactatttttcttagatgaatccgttgatctgcattctactgaaaaatccagatggaccatgtcactggcaactctcttttctcttgtcctctgtcctgtgaatttttgctgccttggtctctgtggaatcaaggacatggaacaggatggagaacttagagaagctgttggattccctgagtcctctttcttgtcacttatagccatactagtacattctttttttctccccagagacagggtctcactgtgtgcccaggctggagtgcaatgtcatgatcgtaactcactgcaacctcaaaatctcgggctcaagtgatcctcctgcctcagcctcctaacgtactggcatgaaccaccatgctcagccactagtacattcttataagagttttgttgccttgtttgcaatagcaaaaagacctttaaataatttatatagaaatcattagaatacactataatagattattgtacaactattacaagtaatgtgctgatatggaaaattctatattaaatgaaaaaagtaaagtattttatacttattatatacaattgtttgtattgttaattaaaaatcatctgtgtatgtgtatgtatatgtatatgcatatatgtgtgtataaatttgcatagacacaagaaatttaacagttatcttagcagacatccagtgttttgtgtgtgcagtttgtcttttcattgtttgaattttcttttggatatttttgttccacagtcatgtcatctgtgagtaatgatagttttatattttcttctctaatcctcatgccttttatttctttcacattgttgataacagtgtcttgttcccaatctcaaagggaaaatcttcagcatttgacctagaagtctggtgctttctgtagaattgttgtttatataaatacctttctcatattaagttagtttcattctatagtttttattttaattttaaaattgtttaagattttaaataattataaatgtaaatttgtaaatattagatattttaaattttaaattatgtaatttgttgattagattgacattagatttaattgggatctttttctgaatattttgaagtgatttgcatttttttcaccttttgtcctgtaaatgtagttattatactgattgatttaaattaactttgcattcctgggataaatctaattggtttgtccacgatgagataccatctcacgtcagtcagaacggtgattattaaaaagccaagaaacaacagatgcaggtgaggtcgtggagaaacaggaacacgtttacacagttggtgtgaatgtaaattagttcaaccattgtggaagacagcatggcgattcctcaaggatctagaaccagaaatatcacttgacccagcaatcccattactggatatatacccaaaggaatataaatcattctactatgaagacacatgcacatgtatgtttattgcagcactatttacaatagtaaagtcatggacccaacccaaatgcccatcaatgatagactggataaagaaaatgtagtacatatacaccacggagtactatgcagccataaaagggaatgagtcatgtcctttgcagggacttggatgctgctggaaaccatcatcctcagcaaactaacatgggaacagaaaaccaaacaccacatgttctcactcgtaagtgggagctgaacaatgagaccacatggacacagggaggggaacaacgcacactgggaccgtggggggtttgggggcgaggggagggaacttagaggacaggtcaataggtgcagcaaaccaccatgacacacgtagacctatgtaacaaacctacacgtcctgcacatgtgtcccggaacttaaagtaaaataaaatcaaagaaaaagaaaagaaaaaaagaaaaaaagaaaagaaaagcatatacatagcttgaaaaaaaaaaaaaaggaaagaaaatgtaatcccagcatttttggaggctaaggcgggcggatcacctaaggtcaggagttcgagaccagccttgccaacatggtgaaaccctgtctctactaaaaatacaaaaattagccaggcatggtggcaggtgcctgtaatcccagctacttgggaggctgaggcaggagaattgcttgaacccgggaggtggaggttgcagtgagctgagattgcaccattgcactccagcctggacaacaagagtgagactctgtctcaaaaagaaagaaagaaagaaagaaaagtaacatacttaaaaaaaaaagtcttaaaagttctccatcaggaactaggaatactaaaatatatttttattagttacaaacttagtaagatattaaaataagagggatagcattgaaagttgagagaaaagttgggtgtattttaatgccgtgctgtcctgaaatgtcagaactatgtactagcccttcctgtaagggtaagagtcctagcaaagaattcagagtaaggtttttgtttgtttgtttgtttgttttaccaaactgttccaatatagtcctagaatgctgtaaaagccatgttaaattaaaccaaaattgataaagttaaaaaaaaacaccaattggtttatgatatatatatatatatatatattgatagattctgtttgctaatatcttgcttaggatttttcatctgtgttcaggagtagattggtctgcactttccttttttatagtgtccttgtcagatttagaatcaaggttgttagcttctttttctattatctcaaaaggattgtgtgaaattgttatttttattttcagcctgtttcaatctactgttaatccatatgatgagttcttagtttcagttactgcatttttaagtcctagaatttttgcttgatacttttaaaacagtttctaattatctgataacattttctatcttgtttcttattttcaaataattagcatagtgattttaaagtctccaatctagagaatgttttcagtagtttttgttacttttttttttttttcttgagacaggatcctctgtatgttgcccaggctggtccaacttcaggcattgagataatttgaacctaagttccttcagtgtctataggccttccagtttaccctcattccagaggtgattcctttaaattcaaactcagtgcacagtaggagtgaggggcattcactaaggcctgatgggacctggattctaaaacttttccctctagacccatgagtccttcaaaactgcagctcagctcttcagcttctcagtctttctttctggaattggcaacattccctagggcagaaatgtcccagcgcaggactcaattccctggtcctccaactttcttggtttctgtcttggaaattcttcactattttagcactctgttgccttcaagtagaattgctatttccctcttaactagtttgcgcttactagaaatggacacagtaactaccttctttccaaaaccgggacttcaaatagaaagttctgctgttggtgaccagaagcttggccgccctgcctctgctgtccagggggaagcaggtggagagaggggccctccatgcctgttctttccgggaggcaggcctcttctaggtgaacatccttatatttgcttagctgacagtgggtatttctttaaatgggctgtttggttataggagacaattagattaaaaaaaattctgaaagctgctgcttgccaaattttattgatgatgagtgagctttgcagaaaatttccaaaataggttcattgttcaagtcacctgcctttctgcttttgaatcctcaactcacacctgagcagtggtccaccaagtctgagccccccaagcctgaggcctgacagaggcagagtggatgggataagagggtgagcgcggaggtcagcacttctgaggttcattcctgctctcagatgtgatgcttctgggtaacaggagccaggccgggagtcatgtctgctgggatttaaccatgctctgccattcactggctgtgccagaaagagaaaaagcatctaatctcattttaaaaacaagggattaagagattattagctgattccagatgtggctgctcattcaaagtacccaaagaggttgtgaaaaatacagatgcttgagtcataccccacactgtctctaccccaggacctgagctgctgaataaaacctggaatatatatgtgtgtgtgtgtgtgtgtgtgtgtgtgtgtgtgtgtgtgtgtgtgtgcctgcatatgagtggcataaaataatcattcattattattaccattatcgcctgtcacagttccaggggttgacggggcctagtgaggcagggcctgctctgggtctatcatgcagggcagtagcagaagactgaggctggagtcattctgaaagcatccacttactttctttcttgctttctttctgttttttgttttgttttgttttgtttctgtttttattttttttatttttttgagatggagttttgttcttgttgtccaggctagagtgcaatggcacgatctttgctcactgcaacctccacctcccaggttcaagcatttctcctgcctcagcctcccaagtagctaagattacaggcgtgcaccaccatgcctggctaatttttttgtatttttagtagaaatgggttttcaccatgtaggtcaggctggccttgaactcctgacctcaagtgatccacccacctcaacctcccaaagtgctgggattacaggtgtgatgaaggcattcactttcgagtgtctgagctgtgggtcagaatacctgcacttagcttctcccggtggcagggacagaatctacatttttaacaagcccccaagatgattatcagttggctaggcagtggtctctgacaacattttaggaattactggacaacatgaaacttttagtcccttaaagttgtacagttccagaattcaagtttttcttttgaagtaaaaaataacttctgttttaagagaatacaggtgtttctcaaagcaaaatgtcaagaccacttttcagacataggattatcagaaattctaacaaaaagctggtagaatactgcccaatagaactctgtttattcagttggatgtgctttaatcgagttctcactctgtgcaagttactgtttgggaaggtgtagacttgtattatttttatggctactaacaaagattacacataatccagagtagcagtacatttaaggtgagtctacatttccttgagactcaaactcctgctgttgtttgtggaaaatgagtatctggggcaaaagaggaagtgagagcccttaaagagagcagaccttcctgcgaagctgcccgctgtgcttggcttggggacagccttgtatattgggccaaaaatgtttgcctccaatattgtagggtagggtgcatgtgactgccacactggcttcttggtgttcatcaccagacaaacgtctgttttcctgccatgatgctaaccatgtttagcatttgtgtccacttggtatgataactggctagacattttgctcctttctcaaaaacaattttaactagttcataattaatatgccacaagacaaactatggttcagcattgggtcttctgggtgtttcaggcattaaaaagaaaatttatttcggggaatcatactagtcaattgttacttttcatcattacagtttccagaggtttattggtggcagatgttgcactcttttttaaaaaagaaaaactaaaaaacaaatggacatctccccgatggattcttagtgaaatgagtctttaaaaagagaaaccaggggctttctcatagtaagcagaaatagaccaacttaggttttaggccaagtgatgaataacgatatggggggacatcatgtaaacaaactactctgtcttttaatgattcttatttcctaatttaaaactgcaacaatatccaggaattctcactttctggtgaagagtgagaaatctttatgggctctcatgattcagttgaaagcaagaggaaatgtgcctcagacattttccttgaacattctccttctgggcaggaagtggaagtgggcagtgttcactgaagacgtggccgtcagatgggaggaaaagctgatggtgtgacaaaatatctacctccccttcttggtgtgtttccttcttccctagtatttctttgctttttttttttttttatatacaacagaaatttatttctcacagttcccacagaccttgaagtccacagtgaaggcagattgagtgtctggtgagggcttgcttatggctcctgagtgggaccttcttgttatgtcctcgcgtggaaaaggaacactctggttgcttcggacacttgtaagggctctaatgccattctttttttctttttcttttccctcttctgtgttggattttctgtttattattattattattattatactttaagttctagggtacatgtgcacaacgtgcaggtttgttacatatgtatacatgtgccatgttggtgctttcctggtatttctaacttagaaactaaaccaaagctcagtgacatgtaagtattgggagaaagccaatcagatgattactgaaagtgattagggagtaaacctgtgtgcacagagctaaactgagcccttcttactgagaggggagcatcaggaactgccttcctttgcgacgatgaaaggctgtcccatctataggagaaaaggttagagaagagtcaagctttgttgtttagttattgggtgcctttagataaatctcaatttctccacagaaatttctgtaatactaaagtgtcaaaatttgctggaaaattttttaaatgttcaaaaaaatattgtacaaatctaagacagtggtgctaaaacaatactagttaaaaatggactttattttatttggtaagaatgcccatatttacaaataactccgtataaatccaggtctctgaaagcaatacagtctctgagaggagctcgatttgagtgttatatgtgtatatctttgcattcttgagtctgtgttttttcataaatttcattttcttttactgttaaaatataactactaattaaataaataattattatttactaatgtgcaagcactatacagttctttgtatggtgcataaaaaatgataaaacactgtctcagtcctcacagaatttacactgctcacattatcttgaaaatatgcattttgagatcagactgatttgtggattttatacgtgtgcttcctgagatcattgggtgatgaacaaaattgatcatggcctgagtatcaacaagattttcaatgtaacagccttcatcagataacataatgtgtttcttagaaaggaagttcaaaaggaccaattctgttagattgctgaccttgacctcctgtggccaaaaatcctgtttccctatgttttgaaaggaaacacgtttgagaaaagctccccatcccagatttggtgattttccttaaaggctgtttggagagacaacaatggaattctgggagagatctgacatcagcaggttcatctgatctctctcaggagagagaagtgtttgtttactctgctcagagtgctatattcctatgcatgtgctattattagagtcctttgaagtagaagagtcatatgtcatagacctctttgtaattaaaaactgtaaggctgtttttctgatatgtatgtagagtagatggagaaggagaaacacttgtttgttgaaaatgaattctgaggaatttgggagcagagctttgcaagtttgggttttctgtacaatgtcacatttatttatcttaccttttcaaatgtttttggagagatggtactaaagagaaaaacatgattggacctttgcatctggacctcaagaaatttataggaaattgagtggtatccagaaactgtgctgggccgaagttaattgggagtaatacttgccctgagtacatacattgtgaatatcaaatgaaataagtcatatgaaatagcttccagaccatagctattgaaaactgaaacatttgttatttatttggctcagcataacttaaaattcaaaatttaagaaaatcacaatttaaaaaaatgatatgcaatttaattattgttactctatagcaatataccctagagttttttacatgtgtatctaattttttaagtggctgcatagtatcctcttgtatgaaagtaaaatacatattctgtgttgatagacatttaaataattttctgtttaactattttgaaaaagccacagtgggtacccaagttacacatacttttatacattctcaagcatttcttattgatggtaaaatgtgtgaaaagagaagaaacgcacaaaagatgatatgctgttgaagatgtggactaattatgtttatatttattaaggaatgaaattttgcatgaggcaattaagacaatagagtgtaagagtaaagccatttaaaaattgtaaaaaacgggccgggcacggtggctcacgcctgtaatcccagcactttgggaggctgaggtgggtggatcacttgaggtcaggagtttgagaccaacctggcaacatggtgaaaccgcatctctccaaaaaacaaaaattagctgggcgtggtggcacgtgcctgtaatcccagctactcaggaggctgaggcaggagaatcacttgaactcgggagtcggaggttacagtgaaccgagatcgcaccattacacttcagcctgggcaacagagtgagacttcgtctcaaaaacaacaacaacaacagcaacaacaaattgtaaaaaacaagccgtcttggctcctgcctccaggaagatgcaatagatatacttttctctattcctcttgctaactacagctaaaaactgtgggcattacacaaaaagtaaatatcagaagactttaaaagatgagaaacaaaaaggactggctagggatcatgggacctgggtttttgtgttgcctcaggtattctagattgggtattcgagaaacgtaatgtggaaatgccaaaggatttagactaaaaaagcccaaaggtgaatctgtttcccaaatgaccaagaaaagtgtacttgctatggtttaaatgatggcatctcctgcaaaatttatactgcaacttaattttcagttcaacaatattaagaggtatggtctttgggaggtgactaagtcatgaaggcttttccctcgtgaatgagattagcacccttatcaaagggctgtaggttgaaagaagtgctctcttgccctttctgtcccttccagcatgtgaagacacagtgtttctctcctccagagaatgcagctacaagatgctatcttggaagcagagagcagccgttaccaaacactaaataccaatgccttaatcttggacttcccagcttccataaccaaaataaataaatatctattgtttataaattacctggcctgtgatattttgttatagcaggacagactaagacaccaatctaatgagacaacttttagataatatctgctctattccatcaaaatatcacagaagctgacaatatcccaaatttggcaagagacataaacctgtagattcaaggagctgcggaaaccacaataggataaactcaaatatttctgtgtcaagacacttcataaccaaacttctaaaaaccaaagaccaagaaaaaagccttgaaagcagcaagcgagagattacttgtaacaattcaagtgatagtggagttttcatcagagacagtggaggctgaagacaaagtggcacatttttcaagtgcctaaagaaaagaacaattaacccagaattctatattcagagaaaatatcttccaggaatgaagggaaaatcaagaccttcttagtgagtcaggctgaatagttactctcctccaaatgctcatgccctaatccatagaatttgagaacatatcaccttccatggcaaaaggacttttcagatgtgatttggttcaagatcttgaggtggagaagttattctggactatctgggtgggtccaatgtaatcacagggtcattataagaggaaggcaggaaggtcagtgtcagagaaaagaaaatgatgatagaaacagaggggaggtagagagtggagagagagagtttgtgacagatttgaagatgctacctgttggctttgaagaagaaagggccacaagacaaagaatgtagaaaaggaaagaaacagatcctccctagaacctccagaaggaactagaactgctgacaccttaactttagtccagtgagactcattttggacttctgacctatataacggtgagataatacatttgtcttgttttaagctacttagtttgtggtaatttcttacagtaacaacaggaaactaatatactcagataaagaaaaactaagagaggtatgttaccagcagacatgccttaaagaaatggttaaagagattctcgaaatagaaaagaaattacatttaaaaaaagaatcttggaacattgggtataaagaaagaacatggcaagcaaaaatagaggtacatgcaataggttttccttctcttgacttttctaaattatgtttgacagttgaagcaaaaatacaacaccatctaagtggttctcaatgtatgcatagggaatatttaagaaaattatattataaatggaagagagtaaaaaatgtaacagtagataaagtttctgccttcatctgaactgctaaattgtcaacacccattgtattgtatacatataatggaatacctagagtaaccacttaaaaagctatacaaagcaatacgccccaaacacatagagaaatcaagtcagaattctttaaaatcttcaaataatacacaggatagcaagaagaagatataaactgaaaaataagcaggaaacagaaaatgaaataacatatttcagccttaacatatcaatatttgcaaggaactgtccacaagaaactaatttcaaatataataataaaaggaggttgaacgtaaaaggatggtatgacatttcattttataggtcagcttgactgggtcagatggtgtctggatatttggccaatcaatattctgggtgtgtctgtgagggtgtttctggatgagattcacctttgaatcagtagactgagtaaaatagatttactctaccttccctaatgtgggtgggccttatccaatcatttaaagaccccaatagaacaaaaaggctgtgtaagagggaacgccttctccctgactgagctgggacattggtccttctggcctttatctttaggttgaaacattgggtctcaagcctaatggctttcagactggagcttacacccttagctctcctggttttcaggcctgtagacttggactggaagtatatatcagctctcctgggtcttcagcttgctagctgaagatctttcaggacaatgtagaacttgttagcctccattattgcatatctttctatatctatatctatatctatatcatctatatctatatctaaatagatctatctcctagatatatagatataccacctgttagttgtgtttctctggagaactctgactaatataaatgggaaaatattaatatatactatgtaaacaattgaaagtgcaaataattgatagaacacttgatagaaaatcagcaaggatacaggagaacttagtaacattatcatccaacagaatttagtggacttttacaaattattccacacaataagagcaaaatacccatccttttttcaactgcccatgggctatttaccagtatagaccatacgctggggataaaataagcttcaataaatttttaaaaatggaaattattcagagtatattctctgacttacaaaggtttcaaactagaaatcaatattggaaatataataggaaaaatctccaaacacttggaaactgaacaagacatttgtaaataattcataggtcaaagagaaagtttcaagggaaatttaacaaatatattaaactgaattaaaatgaaaatacacatataaaactctgtgggacacaactaaagcaatactaggaaataacttcatagcattaacacttacattagaaaaccagaaaaatctcaaatcaataatctaagctcccatctcaaaaacctagaaaaagaagagtacaaacccaaagtaaggagaaggcatgaagctataaatgttaaatagaaaattaataaaattaaaattgaaaacagaaaattaatggagaaaggcaatggaaaaaaaagttggtcctttgcaaagatcaataatactgggaaaagtctatcatgacaaagagaagacacaacttactaatatcaggaatgagacaggagatagcactatcaactttgcagacatcaacagagttaacaaatcaagactatgaatacctgtacatacataaatttgacaacaagactgtgtgtggtgttggcagagggatagacataatgatcaatagatcattctcaatagagatacacccatccaatttatgagaggtgcaaaagccattcagtgaaggaaagaacacttttcaataaatgctgctggtgtaactggttatccataggcaaaaaaaaaatgaacctcaatttcaacttcattccttaaacaaaaataagctaaaatgaattatggatttaatgtaaaatctatgaatcaaatatagataaaatgtaaaggtgtaaaactgacaagttaacataagagaatatctttgggatctaatgcttgtgaagagttcttggacatgatactgaaggcataaatcataaaagaaaaatcaataagttggactttattaaagttaaaaaccttagctctgcaaaagaccctgttaagaggatgaggaacaacctacagggtgggagaaagtatttcacaccacatataaaataaaggattcataactagaatttataaataaacctcaaaactgaacagtaaaaaacaatctgattagaaaacgggtcaaagatcttgagacatttcatcaaagatatacagagattgcaaataagcacatggtgttcagcattactagctatcaaggatattactacacatctattagaatgcctaaaatttaaaaaaatagtgaaattatcaaatcctggcaaaggtgtataaaaacttcctctctcacacatggctggtgggagtgaaaaatggtactaaccactagaaaataacatggtagtattggtattattattatttttaaactagacatacactacctcatgacccagcaattccacggctgtgtatctatcccagagaaatgaaaatgtgtgttcacacaaaaacctgtatgcaattattgatagtggctttgctggtaatagccaaaaactagaatccaccaaaatatccctcattaggtacatgggaccggatgtgatggctcaatcctataatcccagcactgtgggagggtaaggcgagaggatagcttgagcccagtagttcaagaccagcctgggggagacctcatctctaaacaaacaaacaaatgtaaggtaaattgttaaacaaactggtgtatccataccacataataactacccaggaataaaaagaatgacctgttgatgcatgaatcaagttggatggatctcaagggcattacgctgactgaataaagccagtctctacagatcacgtactgtgtgattgtatttatatatcattatggaaatgacaaaaccatagacatagaaaacagattcatggttgccaggagttaggggtggtggagtggggcggaatgtgggcgtaactaaacggggtagtgtggggaaaatctttgcattgatgtacttattatgtctctttattgtggtagtggttacccaaatcaaaatatgtagatgtgtttctttgggaactaggaacagaaatgggctagatactcagaatggcaaggagaattttttaggaatcttatctattttttttctcatcaaagatattaatttgaccaacaagtatttattaaatgccagttaccgaaatagctgatggaatacagagataattaaaatatgttctttgccttcaaatggctgacaatctagtacatgtgtaatctccggtgcaatgtgatagatggatattaacaaaactattgttggagggctcaggtgggtctcctgatgccagtgagaccccacccctagctgatgtgagaaagaattcagggacgagtcagaatgaagtgcagggcaagaagcctccattgctaagtgaaagcacacccttacagaagaagtgtgtgtgtgctcgtgagaatgacttgtgcacaatggagtttgggtttctaatttatgggtgtttaactaatgggtggaataatcattaggtattctggaaaaggaggggattgcagggagctgcctggttatcatcccctttctcccttgtttgggtttgtctggaagagtcatgaacatgtcaccctgactggcgttttggccattttctcccttattttgggttttctgttatcctgtgatttctttgcctagttcctgtttttgctgttgtttgggtttttccatcctcctgcgaccacccagtgctattcctatctcaaaaactggcgagaatgaggcattgaaaaggtgttgctatttctgatctgggaggaacctgcagagcctgctgctgtgaggatgaggaagttgtctcagtttggcacaaatgcctccatcctcttatctgttgtccaccactgatttatcacgtccctttctctgtgcacatggtcttgacctcagaatccttctgaaacacattctaggcagccagtaccaagcaagcagagtggcttcttgacatagaagaaaagtttcagttgagtaatcttagattgtaataatcactccccctacgagctttaaggttaacactcagggtgagcaatctccaaattaacagccttcaacatgtggtctgtgtttttttcatgtttgtgattctatttagatgtaaggtgtttaaaacattttaaattttattggttgtaaatatcatgaactattttatggataacaataaaattgtatgacatacagaccttctcacgatttctaaatgtggaattacacataggcaaccacaagctgtcatgagagttttttaaccatcttggtactctcacttcagtgatgctttaaacacacaggactcctttgcatgcagctcactccttgttctcaagtcctgcaggattcccagccttcatggcctccttacaagtctcagccctgctccagtctccaagaccaatcctgatttctgccgaaggcatttaggcaactttagcatatgctgagcctcagtatctggtcacctgcagcttttatctgagattttacaaccaagcttctacttagatcctatttgaaattgaaactcagaattagatattgctattaaagagttaatatttgtatcctccaaaatccgtatgttgaaacctgatccctaatgtgatgatatttagaggtagagctttgaaaggtggttacatcatgagggtgaggtcctcatgaaagggattagtgcccttatgaaagaggtcccagggaaatctctttcccttttttgtcaggacacagagaaaagcaaacaaaaagacagcagtgtatgaagcagtttcccaccagacactgaacctactgatgccttgatcttggactttccagcctccaggatgatgagaaataaatttctgctgtttataagccatcccatctatggtattctgttagcagcctgaacagattaagtcaagtataccgggcctggcccctaaatctctttttataagctttaagtaaactaggaatacaagaaaatgacattggaagaaaagaaacacatttatcagttgtagatgacatgacaatatacctaaaaatataataaattcaacaggacaggtgaggtacctcacgtctgtaatcccagcactttgggaggccgagtcaggcaggtcacttgagctgagaagtttgagaccagcctggccaacatggcaaaaccctgtctctactaaaaatacaaaaattagccggatgcgatgacaagtgcctgtagtcccagctacttgggaggctgaggcaggagaatcacttgaacttgggaggtgcagattgttgtaagctgagatcaaagccactgcactccagcctgggcgacagagcgggactccgtctcaacaataacaacaaccacaacaacaacaaatttacagactgttagactattaaatttttaaaaatggctttatataagatggaatacagaaaaaagtattactttcttttactagcattgaacaattagaaattaaaatgggaaaaatcacattcaagataatgtcaaattagtttgtaaagcatctaagaataacttaataagagcactatatatatttttattaaaggacataaaataggactaaaataaatgagacatagtaataattcctcacgggaggaagactaaatgacatacagatgctgttccttcccaagtaaatttacaaagataatgcaaatctgattaggatcccagtgaattgttttgggaaatagacaagttggttttaaaatttgtttgtaacaatgaagttagcatttgaaaagaagaatcagaaggggaaatttgctccctaagataacacataattacttagataaaaatggttgggtaatggtatagagatagagaaatagatcagtggtacataagacagaatgtagaaacagacacattgatatatgtgggtttatgtagtgaatcttataattttatgttgcctgaacatgcattttgaacatttaactttctcttatcagtagcagagttagtctgtcttgacagtctccagttttatgctccccccactcccacacccagttgctcagtgttgttgattcagctatctgccttatataactgcctcctggtaaccccctccctatgggacagctggatacaacttacctgactggccctgctgatccccatatcctacatggacagtgcagatgtgctacagtgaccacctctcagtcacggtgtgacctggaatttgtgcctgctgctttgaacctactaactaaaactcctcttgggaaatctgtttgaataatgtcctggactccaataaagggactggcccacggatccctctcccaacacactccctgacctgtgtgtgtgtgtgtgtgtatgcaatgtgtgtgtgtgtggcctccaggcatgctgtgcaccccatgaacctgtaagtagtcaaatatttatttccatcttatatctcatctatctaatcattgaaggagtggtctccatccaaaaaaaaaagagaagattctaagtaaaaacagtttaatattacgataatgacagtattttgaaaaaacaaacttactctcacattgcatgatgtaaatataaattgtaggtgaattaaacttctaaatgtagagaaaaaacattgctaggttaactatgctgcaatatcaaaaatatcttaagatcacagtagcttaacataggaaagtttctttttttttcttttttttgagactgagtctcactcttatcacctaggctggagtgcaggggcatgatctctgctcactgcaacctccgcctcctgtgttcaagcaattcttctgcctcagcctcctgtgtagctgggattacaggcacgtgccaccatgctcagctaattattgtatttttagtagagacagtgttttgctatgttggccaggctggtcttgaacttctgacctctggtgatctgtctgcctcgccctcccaaagtgttgggattacaagcatgagccaccacacccagccaggaaactttcttgattatgtgaagtctgaagtgagcctggagattcttccaaggaagcttccttccatgtggtgactcagggattaaggctgcttccattttgttcccacaaaatttgaaccatttggtttcaaggtgtactgctgaaatggaagagaaatctgaaggttcacacaggggtcttcacgatcggggtgaaaatgacatagaactgtctatgtcacctctgctaacatctcattggctagaatgagtcacatccatgtaacttaattccgaaaaaggttggaatatggtaacatacatggatattaagtcagcattaaatatctcaatcgtaaaaagtataattatcaagaatagatatacatttttataaacttggggttgaggaagcttccttaggattatttagaaaagaaaaagcaataaaggaaaaactaaatttaacaatagaaaagcttaaaataattaaacagtgaaggatgccaaaaacaaagttaaaaggcaagcaacagattgagagaatatatttgccacacatacgaattacaaatgttaaaatttctaaagtgcagagtttctataaagaaaaaataggccaggtgtggtggcttacacctgtattcccagcactttgggaggctgaggcaggaagattgcttgagctcaagagtttgagaccagactggacaacatagtgaaacctttgtctctacaagaaataaaaaaaatcagtcaggcatggtgatgtgtgcctgtagttccagctactcagtggggcagaagtgggaggatcacttaagcctgacgggttgacattgcaaggaactgtgattgtgccactgcactccagtctgggtgacagagtaagaccctgtctcaaaaaaaaaaaaaaaatatatatatatatatttatatagatggtcagtgatataaataatatatatattatatgaggcagtccattgtagtattgtggtaatggcataaaattgaacacaatttaattttcaataagagtctgactaaatcacttacagtatggctatacaacagaatatcacgtagtcattaaaaaagaacaatgtggatctctatacactgacatgaacaaatattcttgatgtataagtgaaaaaaatgagatgtagatcactacggacaatggtgattgtaatttgggaaaaaaattaatgatatataaataaatagataaataatataaaacaataaaagtattaaaatatgacaaaatagggaaggatatggataaaactttacattgttaatcgctaaaaagtaggaaggcattcactttgtaattcatagaattttcttttttttggctcaatcttttaatataaaaaattcactgctgtatacaaaaatgtgaaagtgtgacaatgacaactatgaaatcctgtgaatgaaagtcccctcaaatgcactctgtggtgcacatgcggccgcccacaaaaactctggcgtggaaacaaactcatgcaaaccagtgctgccaagaagcgccaacacgtgtgttctccattccaccaatcacagaccaatatctactccaaacatccagtaacaaaaaatgtggcatcttcccaggaacagcaaggcagacttcttactcacgatggaccagcacaaataaacccagcaaaaagagcacttcatacttatgtttaggatagtcattcatgaggctcgtcccaattccaatataaggaacaaatcccctggctctccccacgacatcttttttctctagccaatgttgatcttgtttatagaggcctctgtcatcaaccgcattattatctcctttggtcaaaaacttgatatgcccattttgcttttcatgaatcttcaagactcggtgaactataggaatctttcttccttctatccttagaacagcgatttctcccactcgtatgggatcttcaactcgatttgttagaaagagaagatatcctctatgaaatgcaggttccatgctgccactgagcaacacaattggactttcacttccagttattaccattaaccccttccagatcatgagtgctgatgagacaatcattccaaaatttaggacttgataatagagccgccacttgttcatccactgcacatcatccaaaaagactagagacagtatggtggggatggcgagcaggacaccggcaagggagagggtgcgaggaccagcgggcagaacgactggcctgtaattcagagttttctaagtgataacttttgtctttttgtgttctgggcatggtttaaatagaaaaccttcaataatattcactcattcatttatttatctacccatctatccaaccatccatccatcgttccatccattcattctatcatacctaagaaacattgattaaaagtctatttgtaggcattgtgtttgccatgcacattcaagtcacatttagtttggcacagcttggaataagaagaaaaatgcccatgtgttttttcctttttcttctagttgactattttaaaaccaatcaacaaaacgtaaagagtctggccctgggcttcttgcacacaacatctgttttggcttccctggcctctggcctttgtctgccctgtagatgacagattagtcggggacatccttcatagtaggaaatggaggtcaataaaatttgcaccaggcttttcaatttagtatcatcccagtcaggacatcccaaaataaaatttgttttaaaaatagatctaggaggagaaaaaagattgaaaacaaacaatcctcttatgtcactaattctgtgagaaaacctgattgaaaaacaaatcagtttcttgttcaggtgcaatgattttgcgggtagaaaaaaagcagaacaaaaatagtgtaaagagtccagtgtgataaaggatactatagagcaaaacaggaagttgtttaatggaagggagtaattgacctcagagcctgagacgtgaatagatccttggatgcagaggtttttgcatttgtaaagtgttgtatcgatgctttattgaccagatttgaattgtacaccatggattctttctttttttgagacagagtcttgctctgtcgcctaggctgaagtgcaacagcgcgatctcggctcattgcaacctccgcctcctgggttcaagcgattctcttacctcagcctcccgagtagctgggattacaggcatgtgccaccacacctggctaattttgtatttttagtagagatgggatttttccatgttggtcaggctagtctagaactcccgacctcaggtgatccacccatcttggcctcccaaagtgctgggattataggcttgagccaccgcgcctggctggacattgtaaattcttactctgataattcaagcaaaatttcttgaattaaagaggagtatgagggaggctgttgtgaggtaggtttaatttttatcttcattctgatcttacaggggaggaaatgaatgctcaaagagattctgtgattagtttgtgatagagccagtaaatagaagaacccatctcaaaccaggtgtaccaaccccagacactggcagaacgctctctttatgtaagacctcaaaatcttactggttggtgtctgctgacttgtttttctctgttatcttgcctgtctgcagtgacaaattcagtgcagctctaactcatgtggacagggaggaaatgattctaggattgaggacttaagggtgtctggaagagaagagaattgttttgttttgttttgttttgttagttgttgttttcctcagacaggaccttgtcaacgctttcaaatatgtaggctgtttgctgtttcctttatgttggtccctgagaaggatctgcccttctaccctgtttccctggggggtgtggacagagcctttgtctttggggaagggggtcatcttgggaaaaggagaacagggcatcctgaggacctgctccgtctaaggagagaaagccgaacagatggcagctgccacgcagagggcactttgtaggaactctggctggagcaggcttcctgcgctccaatgccaaatccttcccttccaaggcaatgcagaggaacctgatgatgtggcttggggccagtgggcttgtggccaaagagcactaaatcaaagcaaagaagaggtgacaccttaaaagcaaaagacatttcatgtttgtttgttttggaaggcagaaagaaataagttgtaattgcaaaagagtagaagatataaaacaacatggctgtaaaatattttaatgttatttgtttgtaaaaggcttttctttaatgaatatgctctattcttattaagcaactttcccatttcactaaatgaggatggtgagtttgtaatttctggttttacctgaaaaccggtgacctggtgttagggaggctcttatccctttaaaataaacataatgcactagtttgtaatctctgcaggtatattaaaatgtttgcagtgataaacatttctagctttaaaacttttatctcttatccgaattcaagatctatgtctttaatgaactctttcaactggacattcaaacatggaaaatgtttctagattctcatctcccataatcagctgagaatggctgtgaattcccagaggaagacctgcggaagacagggctgagcttctggaggcaatattatgggagcatagatcttggggtacgtttcctcagaacccaggggactcctaggcactcactcatttatcatgatcatacgtttaatcttttttacttatgtttcaggaatataagaaaatgtatgttttaaaagcatgaacactcatacttactgaatacaatgcctgactaagaaacaaggctttataccttattaataaggagaaaatgccaagctaccaaagcatacattggaaagcaatatgacagagtagaaataatgctagctttattgttcctttacatttattagtaacctttaatgagcttctgtttgtgtcaggaactgaagttgcagagatgaaactctgaaattacaggtgcccatcaccatgcccagctaatttttgtgtttttagtagagacggggtttcgccatgttggccaggctgttctcgaactcctggtttcacgtgatccacccaccttggcctcccaaagtgctgggattacaggagtaatgcagatgatgaaagataccctttcctgactcagatgtgatgagagacttgtaagacacacacacacacacacacacacatacacacacaccctatactatacttcaggaagtgctgtggcagatgaaagctctgggaactaagagatcagcagtaaagggaatctaacccaaagtgggagcagggttaagccagacaactccggaaagaaggatgcagcaggcaggaggaacagcatctgctaaactctgtggtggggcagagcacttgcacacaggcagctgccatgaatatgattggctggtgtaggctgtgctgttggtggtggagaggaattgtggggggcctgggtatccacaccaaagagctgaggctttcagcaggggacccaaaagttcacatctgtttactcagagactaaggtggagatttttgcctggaggggtctgaggagcacattagaagctatgcaaacctgtcgaaattgtgtgcaatatgttaggagtatgtgagggtgggtaggtgtgtgtgatgtgtgcgttttcccctgggaaggtttggttatgttcttccatcttaaaatgtgtcataactctcagaaagggtgaggagctcaactaggacagaagagggtgatcagattggatggttattgcaatacttcagatgactaataatgaagtcttgggctgataaagttgtcctcgggatggatgggccaggacaatttcagagaaaataaagatatggtgctgacaggatgtgttatctgattagatctgcagggggaaggggagagggaggaagctgcccagtgcaaggcctcttgaattgtgacctgcccatgagctacctggggctcctgctcgagtgtagattctgactagaaggcctggggaggacccagagattccacatggctaacaagttctctggtgatgtccatgccatgccattggtgctgagtagcattttaagtcacaaaagtggaggtagcatactctaggtccaattctcaaccttggctgtcgacgctttctctgtttaatgattatggggcttggcattgtgagcatggtaggtggttggacagcatcactgacctctggccatgagatgacagtagcactcttgggagtgctgaggagacaaacaaccaaaaacttctccaggtattaccaaatatgcaagggcgggagtgggggcgaggcactgatctagaggttaaccactctggcttcacgttaaaatcatctgaggagttttaggagctatcagtgcctggcctcgcccagactgattatattctaatctctgcttgggggttggggagggtgcccacccagctttcgggaagtccagtgtgcaaccatctccgtggttgatggggcagcccggctgataaaacccaggactacacctgaacgcaggaagaggagcagtgtgggtggggaggtggcctgaggagtgaagataagacttcagatttacatgttgatacgagggaaatgcctggggctcatttagatggagatgctcactttgattttcttggttagtgacaagctctgtggcctcgtatctatgaaatatattttcaggtttttattttactcgtcaattctgatagtatctactctatgaatagagcagattgatgaaaaggtaaaataaatgaatggatgtgaaagaaagtaatagctgtcttacactattgcacacacacatgctcaagagttcttcagaattttatttgaaaaatcgtattttgaaagttttggaaaacacagaacaacattctataatatcagggcaagaactgatttctagaaaaaagaacaacaaacaaaaagcacaaatcataattgatgcattcaagtaaattaaaaagcaccatcaggaaagttaaaagacaaagactgaatgaaggtatttgcatagcatataattgacaaagctttagcataaagaatatgcaataaacccctaaaaatcagttacagaaagttgaacaacccaagagaaaatagacataagatatcaataagaaagctacagaagaggaaacagaaatagccaatatacataatactacaagatgctcaacctccacaatgatccggcaaatggcagctggagctgcaatgtatactatttcttacctaccagataggcaaaattttacaagtctgatacaatgaaatgttgctgaaatggcaaggaagaggaaactcatgctgctggtagggatacaaattagtactacgattctgtgagcaatttggcaatattaaaaattaaaatgtctaataacctgtgacaccgtaattccattcgtaggtaagttgtttacgtgcagagatgattgctgcagcattatttccaaaagtgaaaaattgtaaatgccctaaaggtctatcagtaagagaatggctaaataaattacattccttttaacataatggaatttgtgtatttttatgaatataaataaattagagctgtagatattaacatagataaatatcaaaggtgactgaaaaaatggtaagttacagaagctgtaattagtgtatcctgtttatttaaaatgtaaaaaatacaaaacaagactatattttatttacattggcatacattcttactttaaaaagaatcaagtgcatgcacggcaatgttgaaaaccaaattcaggatattggttctttgtaggggagagagaaatgagattggggagagtgacacagggtggagaagttaaatagtttgccctggtgtcaatagcttagagaacaggagagcctggattatacctcagcctccggccccagaacctgaactcttatgctctgtggttcatcctgaatttaaactctatctccatattgaaaaaaagtttcctggatgagctgttgtgctcaatctgctcatgataatttaattggagaaattattggttattgataaataatcttaaattttgtgattcaatcttaaaatatttctagcacagcatttcagtactagcaagtatcatagtataattgtgtgactacctgtattaccttttttaaacctacatttgatgtataatacattgactaaaataaaattcctcatcattgaaagtcaaagattcagtacaataatgattttttataaatcagctttctattcctttttaaatctgttttctactctcaaaagttctaaattttctactaaaaaaattctagtttgataagattttgtgaactttataaaaacatctctttatactgagaaggaaggagtccataaatcttgagtttgagcccatgatatggttgtttggctcctagaagtgtctgaaataggacccaacatgtacacggagctttcctaatttaaaagttccttcatgtacatgctcaatctttgtcttcgagctcagattgctgtaaccaagtcccatggacccagtgacttacaaacaggaatttatttctcatagttctggaggctggaagtccacaatcaggatgccagcacggttgagttctggtgagggcctcttccaagttgtagagtgctgacttcctgtgtatcctcacgtggcagaaagacagccagcaatctctttggcttcttttcataggggcactaatctcagtcacgagggtcccagcctcatgactttatcacctcccacaggtcccacctccaaacatcatcacattgggattacagtttcagcatatggatttttggggggacacagacattcagtccattgtacccttgaacccaaggattctgtggggtgggtagatgctatttgttacactcatcaatttgcaattgataccaaagagcagtagtttaagtgatttgctctgagacccagtgaccctgtggggattggagccagaattgcaatgtaaagcccttggtgttatcacttgtgtttggttcacttggacctgctcgttatcatgcacagaaccattgctcactgatttgacccctttctcttcactggagcagctctccagaccaccatggccttccctgcacatcctccttctgtccagagcagcaacaattcttggctcagttcatcacttcccccttgaaatgctctctggcttctgggacctcctctcttgctctttctcagtcactttgcaatctccacacttctaaatattggaggtctcaggactatgaagttctcttgtatctacatgcatttgttattttttaaaatttaaaatatcataaagacatacataaatcaacagagaagtaaactctaggaaagaccttggcttttgatctatgtacctgatcactactcttagagtgagaattaaactattttcagagaacagttattggctgatttttattacactttggatgatgttaataccagaagtgtcagtataagagctaggcttacacagcaaaggcttcggaaaaccatttcccccccatcctcaagttatgaggcagattaggagctagaaggataatgggcagtgttcatagcaatgggaatttagcaattttatcggcaaattaagaggaggagagatggtgagtattaaatgtggccatttcaaaatccttgggatactgtgttaaccctcaagagaagcagcagataaggaaccagaaatacatttggcaccgagaggctggggacacatagccaacaaaacaggtgaagttggaagagacatgatgaagtagtgaagtaaatttattgtatatcagttgatgatatgtgctaagaaaaagaaataattagtgggatagagagtgatggtgtgaaagtgccattttttacataatgctcagggaagtgctaaagataatatttgactaaaggcttgattgaaaagaggtcaagctagctttggagtttctagtaggcagtttgagatgtacaatgattggtaaggggtgggatgtgagctggagtccagattcaggacttgttggcacatagcgggtattgaaaaccatggggcaagatgaggtcatctagtcaatgtttaatggccatgaaaagagcaaggcccccaagagatgtgggatatctcaaaggaagtgtaccaaagctgactgggatggatggtctaagcagggaggtggataacccaggtggggtgatatggtttggctgtgtccccacccaaatctcatcttgagttataactcccacaattcccacatgtcgtgggaggaactggtgggaggtaattgaatcatgggggtgggtctttcctgtgctgatcttgtgatggtgaataagtctcatgagatctgatggttttataaaggggagtttctctgcacaagctctctcttttgcctgctgccatgtcagaagtccctttgcccttccttcatcttctgccatgtttgtgagacctgcccaaccatgtggaactgtgagtcaattaaacctctttttcttcccagtctcaggtatgtctttagtttccacagtgtgaaaacagactaatacatgggttgtcatggaatgcaaaataaaagtctttcaagaaagggggtgggtgttagtatgtcttttgctgctatgaagtcaagtaaagaaaggattgtgaagttgctattatggtagatcctcttcaaagatggccccaccaattccttcttctccgtatgatacacatgcctatggggtgatagctgaagctggatctagaggaaaaaggaatttttttctttttaaagataggaaattctagagcatatttgaaacaagacagaaggagaaatagatgatataggttgtaaatggaattccgaagtgaaaaagcataaggcctttgataggacatttcattgctagcagtagaatggggtgcacagtatgggaaaagaagcaagtggattgttctttggtggatggaagatgaagggcctcctagtgatagttcctagcttcttcgaaaggcaatgctaacatctgatggggccaggggtgtgtatttttatgagaggtttgagccaagaggaacaaacaaaagggagaaaaaaaaaccctctgcccctcctattttgttttcactatatgagctgcccaggttcataaactattagtgactatttttatattaagcacaaaatattagaatttaagtcagaattgaattttttcttacaatttcactaaactacgttttaaagtttacttctctgtttgtaagacccatttatcttcaaattttatgttcaatataaacatgtaaatgtaatttattaagaaattattaaatggaaatacttatcatttatgtttagtaattagaatctgtctttaccactcttttttaggaagaaaagtgaaaaccatcttgataggttttagaatgagattttcatgagagccaatgcaatgtccatgcttgtttatgacatatttgaagtgcttaaaggaaatatccatggattatcaggattttaaaaagtcatttgtgttgtcaaactctctaatgcacaatattggagtgccaccacaaagtcagctaaaatatgctaaaggtaattaaatatgtcttagagttgttttttctcttttggggggtttgagttttagagctttgtttgattgtttgtaagggttag

SEQ ID NO: 41 - DNA, 36318 bp, Artificial sequence
  recombinant PDX1 IRES-GFP BAC
caggcaagggttgtttaagttactagataacaaagttgttattgattctagtatttttactcttcctgattccctgcagtccaaagggagtttgtcagaccaggagtgatttttattaaaaaaaaaaaaaaaagagtagttgctattgttgtaactggcctcattgtgacagatgggatcctagtgttttctcgctgccctttactcaggagctaggagaacagaaagcaaataaccaagaaaccaacacactcagtaatctggatttctcagagttgagccacagcacttggaaatcaaatattggctcctcctgaacgccccttttagcctggtgttgttaaccagtttaacattcccttatcacatgctcatgtgggcagaattaaatggaattagctgcaaattatataaaattcatttacctttaaaggaagctatttggtcatgttcagtgtagacagagcattgcattaagacacaagttaatggtactgcctggagatgaatcaatttgctttggttttattacctccctttatttgttcttatgtggtagctactgtgactggaaatgctcagctcaggttcacagagcccatgtcagagccacattaacatctcaaggagagtcccactctttctaaagagctcagtccaagtaaacacagtagcaaagtaagatcatgctgatcctcccttaatacttagtcacaaagaatggatgctgaacaaggtggcttatgcctgtaatcctagcactttaggaggcctaggtgggaggatcgcttgaggccaggagttcaagaccagcccggacaacatagcaagaccttgcctttacaaaaaaaaaagaaaaaagaaaaagttagccgggcatggtggagcatgcctgtagtcccagctactccaaaggccgaggagaaaagattgtttgagcccaggaggttgaggctgtagtgaggtaagattgtgccactgcactccagcctgggtgacagagggaaaccctgtctcaattaagaagataaataaattttaaaatgggtgatgtctaagagagaaaggcaaacctatgagaatgttgaggattgataagcatcttgtccatataggggttcaaataacatctattgaacttctgctttctgcactgacttaggcatttttctaagatttcttcatttcgacctcaccacaacctcatgatgcacaggtatatttttatttgaaagtgcatgcttcatgagttctttaagagagtatataaatctctatataacaaataaattatgcttgaggtgtctattgttgttctcaatttataatgttgataagaatgactgtgggcaggcgcagtggctcacgcctataatctcagcactttgggaggccagcgtggacagatcaagagatcaggagttcaataccagcctggccaacatagtgaaaccccatctctactaaaaatacaaaaaaattagccaggcatggtggcatgtgcctgtagtcccagctacttgggaggctgaagcaggagaattgcttgaacccagcaggtggaggttgcagtgagccgagattgggccactgcaccccagcttaggcaacagagtgagactttgtctcaacaacaacaacaaaaaaaaaaacaaaaaaaagaatgactgtgtacatgtttaaaatgcagactccccagtctcactcacccccatatcgttattcagaaggtctggggttgggctcagatattttcattttataagcatcccagtgattcttgatatacacagttcatgagtcacacttccaggaacacttccctataaatccatgttacttcattgattagtaagagtttgtatttttctgagatttgcctgaaggtaaatgtgttgcaatatgtaactggagaaaatataaaaaataaatgtatccaaatactgtgtctctgttcacaacaatacactcctaagagatatctaccacaggaagaattcctaattggcaaatatgataaagttgagaccacagtcagttagccttttactttaatctttgcaagagaggctgtggacctagcctaggctgtcaaaagagaaggcttcacttgtgctgctctgagtttagcattgactctcccatcttaaccccatcgatttctaattttaacgtggatttgatttggggggacacacagaggaatcactttgacggcagtgttcctgcaccctcacaaagacaaccagggttgaccatgaccgtttttctgatgtggaaaaagcaggaatggggcaggattccagctctgctctggcctagagactagaatgactcctttccctccctagacattttaaggtttcctctgagtttatgatgacagcttcatctccaacccacgaaagcaagaaccacagacaatgctagtgggggtgctctctggccagaacacactacttagatgctgggttccacacctactgggatagctaaggcattttgagttgtgattagttcacctgctcaagtctttattttggctttcctggctgtgaaaaagaaggccctgccccttctccacacctgtggggtctctctgtggtgtgctgatggcggacatgagagttctccagcaatccacctcctccagcccttttaagcaggactgtacctgggggcacattcccctaaaacactgagtaatatacctactaagtacttcctcccagtgttcctgaatatacctttccaggtctacccatctggaaatatctttagacatcagctcatggtgatagtctgtcattcttctggatgcagtaatagccaatagttcaatgtttatatgcacattaaaagcaatgctgggggagaaaggaagagatgaccatttattgaatgctttcaaagtgccaaaaacattagatgttttgtctcattaaatcctcacaaaaacaataaaaaatattttttgagtgcctactatatagtaagatagtacagtgtcacagccaacagaatggattttaaggccacatcaaggccaggtgtggtggctcatgcttgtaatcccagcactttgggaggccgaggtgggcagataacttgaagtcaggacttcgagaccagcctggccaacaggaaaaaccctgtctctactaacaatacaaaaattagccgggcatggtggtgcgtgcctgtaatcccagctactagagaggctaaggcaggagaatcgcttgaaccccagaggcagaggttgcggtgagccgagatcatgccactgcactccagcctaggcgacagagcaagactcagtctcaaaaaaaaaaaacaaaaaacaaaaaaccaggcatggtggcctgtaatcccagtactttgggaggccaaggtgggtggatagtctgaggtcaggagttcgagaccagcctgaccaacatggtgaaacccgtctctactaaaaatacaaaattagccaggcatggtggcacatgtctgtaatcccagctacttgggagtctgaggctggagtatcgcttgaacccaggaggtggaggttgcggtaagccaagatcatgccatggcactctggcctgggcgacagagcaaaactctatctggaaaaaaaaaaaaaaaaaagccacatcatctctgcttggatctaggctctgccacttactagctatataattctaggcaagtaacttaccatcactgggcctcaatttcctccactggaaaatgggataacagtaattggctcatggggttaacattggaaaatatttaaacaacgcctggctccatgcatttgccattacgattactatgtgcaacggggccagcttatggaacagtgctagtatttccattttacaaataagggcagggaagcttagtgaagtcatgtaacttggcaagggacacacagcttgtgcagggcagagcctgatgtggaggacaggtgtatgcagctcctgacctttctatggcccgccaaagccagcgcatatttctaccaatgagttttggttactcaaagagtgtgcaggcaggtgcacagtgagagatctacaggcatttgatcagtatatgttaccgaaaatctgggtccttcaaagcataaaccatgtgaaatgtaggatggttgaggaaggaagctggagggtagtgtgggtcaagccttctttaggctgcagcaggaacctggaggtaaggagaggctcctaggagaacaaaggattagtcataggaaatggtggtgggaggaggaggtggaaggcaaagaaaaggaactgtgtggaagcaaggagctggttacctaggactaagctcagaagggaagcagcagggatttctggagactgcacatctggaaggtagaaccagagatgagacaaccaaaggggtgagtccagagctgtagggggtgagccaccgggaacaccaggagtggggagcaacagctgacctcagatcctttggagcctgaaagtcctttcatacttttcctttcatcagcagagtgaactgaggaccacggaaggattaaaccaaaagtggaaagagctcgtgcctgggggccccactcccagggaggaagcgttgagcagtggctggaggaagcagcagacagttctggggcacacggagtcccccctcctgcccttctactcctcttacaccagagagagctaacaaggtagggaataagacaattacccaattcaattcggtttttaagctgcttttatctttacagttcagggatcactgaatcatctggaaaataatttcagctctctgcttattttcactagattgcttagccctaggaatattggaaaacccttcattcaaagtctgaggtcctttcctctctccaatccccacaacccaagctgggtttccctggcccctctcagacctggataccaaattctgggtatttatttatatatatatatatatttttaattttttgagacggagcctcgctctgtctcccaggctggagggcagtggcgcgatctcggatcactgcaagctccgcctcctgggttcacgccattctccttcctcagcctcccaagtagctggaactacaggcgcccgccaccacgcccggctaaatttttttgtaggtttagtagagacggggtttcatcatgttagccaggatggtctcgatctcctgacctcatgatccgcctgtctcagcctcccaaagtgctgggattacaggcgtgagccaccgccctcggccaattctgggtattcataaaccagcaggagggaaacattgattcgacttaggaaaatgaaaacctgcctgcattagtgctcattgaaggaaatgctaatgaactaaagtgcaatcaattatagaagtattctcattccacacatcacatcgtttgctttacagaattttccaactcaagaaacaatttttattttcaacagagatttaattataaaatgaatataaattccacgtgcattcatgatgtataccttggagttaagtgggattcatctgtttttttcatttataatgggatgcagtggcttaaaaatcctatcaccaagccaaattcagcccttagcatgcctctgaaaccaccgaggaagacttagccacttaccaagaacaaggtaacctgtgttctcccgggtgtaaaccgcgtctctgtgaagggaaagggggaagagggccggcaaggacctccagtatcagcgaggactatcaggacgtccagctaataaacgactttttcactgtccacactttaattggtttacagccttttttgtttatttatccataagagctgctgttaaatggctcgggaaggtgctcgcctaatggctcggtatcgctgccgggcctgttgtgggcgaggcggcttggagggggcgcaggcgtcagcggggattcagagcggaaacgcatttcgcctgtaatggactcggcgattttacgataccaggagctagatccacggggaagtacaacacacgaccttactaagcggagggttccgcttgatgcgttttttatacggctgtacgtgataaaattccagataactttgtttcatctaataataataataacaataataaatggttgtttgacctttgctccctgggtcccttctataggtcgcaggcagcagaaaatgctaattgtgaaagtgagaacgcgcctccatggaatacccccggcgatcccctcctcctcccccacagccgcgggtacccgggtttttgccggcgaccgcaaccggcggatttgctttctgctgagagcctcttttctttctgcagggccgagcaaaaatattaaatggaagcaaatgaagcatcgaaatggagaccaatttacagaaatgtgcaattagttgagaagtgcaaagtaaacactccgggggtggcaggcgaggcagggagcaggggagggagagtggggcgcagactgagtccagagtgggtgtaggggtgcccagggaggaggggaagggggaggaaaaggagggggaggggaaaagtggccgatctttgtcctgagcggagcttgccgtccgctcataaccgcgtcgccaagtcaaccctcggcgactcggcagattatctccaagggtcaacacgccgcggccaggcaaccccctccagcctgccctcctgatcgatgtggtcactcgcggccagggtgatagggtagagttctccgcggccgcagacaatggactcattgacgcgggcgcacagagattaggtgcccgggccccacggcctttcactctctgcccccaccaaaactgcaggtggcacttttccctgaagaaatcaccgaaactctccccgcccgccgccgtgcttcccttggcctgtcttcggtgacagcaagggcatctacaagccagggagccacacatcagagccacacacatgaggccacaggccaggaagccacacacatgagttctcacacatcgaagcaaatgctgagactataccggcctcccgcaagagaaggaatctgcagagaagtccacattcccgactggcttttttgtcttttaataaaaataaagagtcctcagaatagagcactcaatccgcacttaaaacacaaatatttccagtaggaagaaagaaatacattaagattgactctcaaaggtctggatgttggtgcgttgtttaggaaaggcggagcagtgatttttctctggcttggttctttgtggttcaagctctctcttgctgagacgtttctgcaaagctgtctagtttttctaaaacccacggtggcgtttcgagaaacgtcctcatttcgggagtatccagtcagaggctggtcaggccgccaggcctagcggatcatgcccaggcagggggttggacgtcaccgccacccggaggtcatccatccgcgtcagtgggtgcagaaaaagtggccctgtttaagtcaggaccccagaatgcccagaagttactgaatggtttgaagccaagcacagatgttatcatggaaaatgcagcgtttttatttctttttctaaatatgtaactcttcctccacttccccctctcctgcttgccttatttcaattgcaagcagaagagagtgagtgttctctgccggcaaactccgccagggtcccggcccgtagagagtcgtcaagggtctggaacccccgtgccaacacctgcccctgcttcgcagccccaagaggaaggccgcgtctttccccctcgctgtattgggaagctacgttccgggctggccaaatgggccccaattttccaaaacccaaatttgtaatacccttcaattttttaaaaaaaagaatttaaaaaagtctctgtgaatgcttcagaagttaccgtttacaccccagaagtacttgcagcacatccacaagtaaaaacacacaacgaatgccagagtttcgtgtgttttttaaccgacatctttgtggctgtgaacaaacttcataaataaaatagaatcaaatgcttctgacctagagagctgggtctgcaaactttttttttatcgtattccgcaacagttaaataaaaaattaaaaactcaacatgtctccttgtaaactacatcaattaacaaacacactatgtccattatcaaatataatagaaaaaatataggaaaatagaaaatagaaaaatataggaaaatagaaacttttaagccacggtgaaaatgtttctataaatgagtggttctaatgttttcgtgagcgcccattttggggagcaccgccagctgcccgttcaggagtgtgcagcaaactcagctgagagagaaaattggaacaaaagcaggtgctcgcgggtacctgggcctagcctcttagtgcggccagccaggccaatcacggcccccggctgaaccacgtggggccccgcggagcctatggtgcggcggccggcccgccggtccgcgctggctgtgggttccctctgagatcagtgcggagctgtcaaagcgagcaggggtggcgccgggagtgggaacgccacacagtgccaaatccccggctccagctcccgactcccggctcccggctcccggctcccggtgcccaatcccgggccgcagccatgaacggcgaggagcagtactacgcggccacgcagctttacaaggacccatgcgcgttccagcgaggcccggcgccggagttcagcgccagcccccctgcgtgcctgtacatgggccgccagcccccgccgccgccgccgcacccgttccctggcgccctgggcgcgctggagcagggcagccccccggacatctccccgtacgaggtgccccccctcgccgacgaccccgcggtggcgcaccttcaccaccacctcccggctcagctcgcgctcccccacccgcccgccgggcccttcccggagggagccgagccgggcgtcctggaggagcccaaccgcgtccagctgcctttcccatggatgaagtctaccaaagctcacgcgtggaaaggccagtgggcaggtaagcctggctccccacccctttctcctttccggttctcacccggccgccttacctccaagcgctcccaggagccttctctctgttcccggcgccttggattatcccgggtcggactaaactacatcagggagctaccgagcccatccctcacagcagtgcttctctagtccagtttgaagcatctttcccacccagctctcctgggagtgtacactccttccttccctgttcgctgagcccatcttcgccccaggagcccgcgctcccagcgccatccttagagagccgaggctgagtcctgctcagggcttcggacactacagatcctcctccagcaggggatccgggaacccaggactccttggtagtgcacatcgaggaagccgagtagggacatgggtgcctcggacccaggccccagatcgccttcggagccccggagcccctcacttcccgcgcttcgttaaggaagggcaggcatctaggggcgccaggtaggtgcagaaaggcagggagggaaaggaaactgcacccaacccagcagtgtccggctgccctggttgtggaaacaggataggagtaaagaggaaggggctggggcaaggcgggggctcaccgcgaggctgaaagccggcctctcaacgtcagagcctggcagctaggagagcaatctgagaagcgaattcgtttttcaccaaccgaaagcaattgaagctgtctccccgcaccgcttcccaggaagtaatttttcaggagatgggcgctccctgcctagctggtggggaggcgagaggcctggttcctgcggccctccgcgccggcagagaacagaaggtctttcccggagccgggagccggaggcacggggtagcccccgggtcctttgcggccccgcgcgagcggcaagttccggcgcggcctgtgtcgtcgccgctactcactgtcatcgctgccgtgcctcagccacttctggtcacacctgcaccgcaaatagttgccttttcctttcaactggcagccgggagtagggggaagcagctcgagccggcgtcccccggcccaccccgaaaatcctcagcgcccatctgcggggtctggccagccctgcctgacactgaccccaggcgcagccaggaggggctttgtgcgggagagggagggggaccccagcttgcctggggtccacgggactctcttcttcctagttcactttcttgctaaggcgaaggtcctgaggcaggacgagggctgaactgcgctgcaatcgtccccacctccagcgaaacccagttgacaggggcgccagaagctgccgcggcgcctctgcaaatttatccagctcgcgcagcccgggccaaaggccttgaagtctccggaaatgcggggttcttaggaggcgggaggacagtccctcgaacaaaggtggggggctcctcgtcctcacccagttttcttccagggctgcctcccctccagacctctcttctggcctcctaggccctcggagctcctgctttcccaccctgggccttcctcaggaaatgggcgacatcagggtcccgaaagaggatttgtgaggtggagtaacttccctatcccaacccaaggggtgatacctctgctctggaggacttgggcttaggctgacccaagaagccagaaagtaaaaccagaaggcaaatcagcagccttggcgagggttcggggacccaaggagggcgacactctcgggctggagttggccccaggcctttgctggcgccctctaacccgctgcatgctcgactctcggggaaggagacgacctcccctctcttcccctggaagccgtctgcggggccggctgctatccccgcgttcctctaggggaaacttcgatggagccgaaattcaaaaattgcaaacccacctgcccctgggaagagcgaagtgacaaaagggctctcactggcagtacgaatctgaatgctaatgacaacagaggttttgaaaaacattgacccccaaatgcttcagcagcgctgtccagctggcacctaaactgcatcactctgcgccttggggaagggcccaggcttggcgaccttgaccttttcccaccatcctcaacctccacccctgccgcgtcgcgctgagcacaggtcccccgggaatagtgcaccccaggaagtctctccctgagcagtctctcgcagggacttcacgaagccctctcgcagggactatacgaagcccgcagcctaaggcaggaacccagagacatgtcggtttaatgtaaaaactttggagagcctttcaaaatgtttattgaaggcccgtctcgcttctctcccaggcgtgggatgccaggtagattcggggatgcccccagggagtagaactctccctggactagggtttgagcctctgcttcagcttctggcgcctcttctcgacctggggggaaacccagtagggttccatcgcgaaattaaacccgcccccaacacacacacactcgcctttcaattccttaaggcttagccaacattcacaggagaaatgtcccctgcctttgctctaagacaagcctctccccggaactttggtggaacttcccgcgccagcgtccacagcctgggtgcagtcagtattttccacagaaaagaaaagattgggacctggctgagcgcagcggcaaacagtgaatgtgggtctccaacctcctgggccagggcgtcctgttgcctcttggagacacgagaggcttgtttctgcaccactaccacctcctccgtagggctgtcggttctgcagctgggctagggcccctgtgtctcccctcaacacctctgagggcatttgggatccagggcgtagagtctggagctgccagagttctgccctggccaacgtgacccccagaacaatattccttcacttcgcgggcagaagtccggctgaagttaaaacaattatggagaatttgctggctctcaggttgggactaattacgatataactatagagagaggaaacacatggtcagatataacaaaatgtgtcacagtctccattagcacaaagattttcaaactgcaggttgcacccattcgcaggtcataaaatcaatttactaggttgagattagtattttttaaacgaaatagcagataatggagagaaaagtagatagcatcatacgtggtaaacgtttgttttatgtccttaagatttgtcagtataactgacctgcagtgtccgtgtgtgaactacacaacgatccgaaatgtatttctcacatttgtgggtcaccatcaggaggttttttttagccctggattaaaggcgttttattgcctttgtaggatccagccggtttaactattatatacatttaaatcaacatcaatcagttgattaacaccgattatatgagcgcattcaaggaccactcattggcagagccaagcttaggctcacggcgagagctgactcgagtttggtctccaataaaaaggctatctttattaggaagggcttgagttactagggaagagcttcgcgcgcctacactaggcgctgaaatgggatgctggggcttggtggctccggcgggagcagctggtagggctagggctccctggccccccttgaaggggttgggctgcgtgggtgggggctgtgcggggctccgggggccacactcacgccctgtgtcgcccgcaggcggcgcctacgctgcggagccggaggagaacaagcggacgcgcacggcctacacgcgcgcacagctgctagagctggagaaggagttcctattcaacaagtacatctcacggccgcgccgggtggagctggctgtcatgttgaacttgaccgagagacacatcaagatctggttccaaaaccgccgcatgaagtggaaaaaggaggaggacaagaagcgcggcggcgggacagctgtcgggggtggcggggtcgcggagcctgagcaggactgcgccgtgacctccggcgaggagcttctggcgctgccgccgccgccgccccccggaggtgctgtgccgcccgctgcccccgttgccgcccgagagggccgcctgccgcctggccttagcgcgtcgccacagccctccagcgtcgcgcctcggcggccgcaggaaccacgatgagaggcaggagctgctcctggctgaggggcttcaaccactcgccgaggaggagcagagggcctaggaggaccccgggcgtggaccacccgccctggcagttgaatggggcggcaattggatccaattaaccctcactaaagggaacaaaagctggagctccaccgcggtggcggccgctctagaactagtggatccgcccctctccctcccccccccctaacgttactggccgaagccgcttggaataaggccggtgtgcgtttgtctatatgttattttccaccatattgccgtcttttggcaatgtgagggcccggaaacctggccctgtcttcttgacgagcattcctaggggtctttcccctctcgccaaaggaatgcaaggtctgttgaatgtcgtgaaggaagcagttcctctggaagcttcttgaagacaaacaacgtctgtagcgaccctttgcaggcagcggaaccccccacctggcgacaggtgcctctgcggccaaaagccacgtgtataagatacacctgcaaaggcggcacaaccccagtgccacgttgtgagttggatagttgtggaaagagtcaaatggctctcctcaagcgtattcaacaaggggctgaaggatgcccagaaggtaccccattgtatgggatctgatctggggcctcggtgcacatgctttacatgtgtttagtcgaggttaaaaaaacgtctaggccccccgaaccacggggacgtggttttcctttgaaaaacacgatgataatatggccacaaccatggtgagcaagggcgaggagctgttcaccggggtggtgcccatcctggtcgagctggacggcgacgtaaacggccacaagttcagcgtgtccggcgagggcgagggcgatgccacctacggcaagctgaccctgaagttcatctgcaccaccggcaagctgcccgtgccctggcccaccctcgtgaccaccctgacctacggcgtgcagtgcttcagccgctaccccgaccacatgaagcagcacgacttcttcaagtccgccatgcccgaaggctacgtccaggagcgcaccatcttcttcaaggacgacggcaactacaagacccgcgccgaggtgaagttcgagggcgacaccctggtgaaccgcatcgagctgaagggcatcgacttcaaggaggacggcaacatcctggggcacaagctggagtacaactacaacagccacaacgtctatatcatggccgacaagcagaagaacggcatcaaggtgaacttcaagatccgccacaacatcgaggacggcagcgtgcagctcgccgaccactaccagcagaacacccccatcggcgacggccccgtgctgctgcccgacaaccactacctgagcacccagtccgccctgagcaaagaccccaacgagaagcgcgatcacatggtcctgctggagttcgtgaccgccgccgggatcactctcggcatggacgagctgtacaagtaaagcggccgcgactctagatcataatcagccataccacatttgtagaggttttacttgctttaaaaaacctcccacacctccccctgaacctgaaacataaaatgaatgcaattgttgttgttaacttgtttattgcagcttataatggttacaaataaagcaatagcatcacaaatttcacaaataaagcatttttttcactgcattctagttgtggtttgtccaaactcatcaatgtatcttaaggcgtaaattgtaagcgttaatgggctgcaggaattcgattcaaggatccataacttcgtataatgtatgctatacgaagttatctcgagcgtcaggtggcacttttcggggaaatgtgcgcggaacccctatttgtttatttttctaaatacattcaaatatgtatccgctcatgagacaataaccctgataaatgcttcaataatattgaaaaaggaagagtcctgaggcggaaagaaccagctgtggaatgtgtgtcagttagggtgtggaaagtccccaggctccccagcaggcagaagtatgcaaagcatgcatctcaattagtcagcaaccaggtgtggaaagtccccaggctccccagcaggcagaagtatgcaaagcatgcatctcaattagtcagcaaccatagtcccgcccctaactccgcccatcccgcccctaactccgcccatcccgcccctaactccgcccagttccgcccattctccgccccatggctgactaattttttttatttatgcagaggccgaggccgcctcggcctctgagctattccagaagtagtgaggaggcttttttggaggcctaggcttttgcaaagatcgatcaagagacaggatgaggatcgtttcgcatgattgaacaagatggattgcacgcaggttctccggccgcttgggtggagaggctattcggctatgactgggcacaacagacaatcggctgctctgatgccgccgtgttccggctgtcagcgcaggggcgcccggttctttttgtcaagaccgacctgtccggtgccctgaatgaactgcaagacgaggcagcgcggctatcgtggctggccacgacgggcgttccttgcgcagctgtgctcgacgttgtcactgaagcgggaagggactggctgctattgggcgaagtgccggggcaggatctcctgtcatctcaccttgctcctgccgagaaagtatccatcatggctgatgcaatgcggcggctgcatacgcttgatccggctacctgcccattcgaccaccaagcgaaacatcgcatcgagcgagcacgtactcggatggaagccggtcttgtcgatcaggatgatctggacgaagagcatcaggggctcgcgccagccgaactgttcgccaggctcaaggcgagcatgcccgacggcgaggatctcgtcgtgacccatggcgatgcctgcttgccgaatatcatggtggaaaatggccgcttttctggattcatcgactgtggccggctgggtgtggcggaccgctatcaggacatagcgttggctacccgtgatattgctgaagagcttggcggcgaatgggctgaccgcttcctcgtgctttacggtatcgccgctcccgattcgcagcgcatcgccttctatcgccttcttgacgagttcttctgagcgggactctggggttcgaaatgaccgaccaagcgacgcccaacctgccatcacgagatttcgattccaccgccgccttctatgaaaggttgggcttcggaatcgttttccgggacgccggctggatgatcctccagcgcggggatctcatgctggagttcttcgcccaccctagggggaggctaactgaaacacggaaggagacaataccggaaggaacccgcgctatgacggcaataaaaagacagaataaaacgcacggtgttgggtcgtttgttcataaacgcggggttcggtcccagggctggcactctgtcgataccccaccgagaccccattggggccaatacgcccgcgtttcttccttttccccaccccaccccccaagttcgggtgaaggcccagggctcgcagccaacgtcggggcggcaggccctgccatagcctcaggttactcatatatacttagattgatttaaaacttcatttttaatttaaaaggatctaggtgaagatcctttttgataatctcatgaccaaaatcccttaacgtgagttttcgttccactgagcgtcagaccccgtagaaaagatctcgagataacttcgtataatgtatgctatacgaagttatgtcgacctcgagggggggcccggtacccaattcgccctatagtgagtcgtattaccggggcccaccttagaccgaaggggaaaacccgctctctcaggcgcatgtgccagttggggccccgcgggtagatgccggcaggccttccggaagaaaaagagccattggtttttgtagtattggggccctcttttagtgatactggattggcgttgtttgtggctgttgcgcacatccctgccctcctacagcactccaccttgggacctgtttagagaagccggctcttcaaagacaatggaaactgtaccatacacattggaaggctccctaacacacacagcggggaagctgggccgagtaccttaatctgccataaagccattcttactcgggcgacccctttaagtttagaaataattgaaaggaaatgtttgagttttcaaagatcccgtgaaattgatgccagtggaatacagtgagtcctcctcttcctcctcctcctcttccccctccccttcctcctcctcctcttcttttccctcctcttcctcttcctcctgctctcctttcctccccctcctcttttccctcctcttcctcttcctcctgctctcctttcctccccctcctctttctcctcctcctcctcttcttccccctcctctccctcctcctcttcttccccctcctctccctcctcctcttcttctccctcctcttcctcttcctcctcttccacgtgctctcctttcctccccctcctcttgctccccttcttccccgtcctcttcctcctcctcctcttcttctccctcctcttcctcctcctctttcttcctgacctctttctttctcctcctcctccttctacctccccttctcatccctcctcttcctcttctctagctgcacacttcactactgcacatcttataacttgcacccctttcttctgaggaagagaacatcttgcaaggcagggcgagcagcggcagggctggcttaggagcagtgcaagagtccctgtgctccagttccacactgctggcagggaaggcaaggggggacgggcctggatctgggggtgagggagaaagatggacccctgggtgaccactaaaccaaagatattcggaactttctatttaggatgtggacgtaattcctgttccgaggtagaggctgtgctgaagacaagcacagtggcctggtgcgccttggaaaccaacaactattcacgagccagtatgaccttcacatctttagaaattatgaaaacgtatgtgattggagggtttggaaaaccagttatcttatttaacattttaaaaattacctaacagttatttacaaacaggtctgtgcatcccaggtctgtcttcttttcaaggtctgggccttgtgctcgggttatgtttgtgggaaatgcttaataaatactgataatatgggaagagatgaaaactgattctcctcactttgtttcaaacctttctggcagtgggatgattcgaattcacttttaaaattaaattagcgtgttttgttttgttttgtttttgtttttgtttgagagggtctcattctgtcgttcctgggttcctctttttttcagggattctcctacctcagcctcctgagtagctgggattacaggcttacaccaccacgcccggctaatttttgtatttttagtagagacagggtttcgccatgatggccaggctgatcagggtctatttttttcggtactaatcaggaaaaatcaggtaattaagaaatagtgcacttgagttttgagttggagcaccctgtgaggggatgaatatccagttttgttttatttttaatttaagaatatcttctcatgatgactttctcgggtaatatagtctagagcgtgggagacagctcggagtactgctggccaatactgcttcctggcagagccaagcgccgcccacctgacgcctcagtgctgcgggtggtgagacccgtcgctggctcccaccatggtcaggtctcctctttcctcccaaagctgaggacgcaggcgaggccgttttctgtgacccttccaaaagaagcgttgttttggatgagtctctgtccccggaggccgagggccaaaagtgtcttatgttagaggcaaagatgcccggatttagagggcttccaacccctaggaccactttgctcttccctgcaggaagctctcagatgggcgccttagcccggtggtgcacccgacggccctccccggcgctccctgtgttcagtaccagtacctcactcccaggcgtcgctgcttttcttttactttttgcaaagatagacgctgtttgttgttgccgttttgttttgttttgttttactggagagagatatcgagtccctcgggataaaattaagtcccttggatcagaaaggggaacttgcgcatccttgagagtgctctttccttgcggttctccacacccgcctgggctctggggtggggcaaatctgcgctcgcatccttggtccctcaaatattggcccagcccgaagtcctgataaaatgattcgaactctcagtgactcagtttcttcatccagaaagtggaggcaaatactacttcatggagttgctgtgaggtttaaaccaagaaatacctgtaaaatgctaattcggcatctaggaatccctccacaaacagtagctattgttttaggctgtcatcgtcgtcgtcgtcagaggcaatcgggagctgctgttgtggagtttctaaagtcccccaccagtcccccggcagcccctcccctctggcaaacccccacactgtcgctgttgatatgagttttattcctctacccactcatctttcccgaacactgcctagtttcaggatgcccttcctcataaataaactccctaggttttccacagcaaacttcaccaggcaaagaactgcagctccgccgaccagttagttggtggaggcgcagaaacttgtcctcggaccccacgcagaagccgccgccctctccaaggctccggccccgacttcgctctgcgaattgggccagccgctgcttttccgcgagacccgagggttcgccaaggagaggagaagaggcacaggctgcctgagactggtcttcgggcagccgagggcgcgggatgactcgggcaggcgtgtggcctccgactgaccagggttgggcccgggatcagagctttgcttggaagttctctgggtggcagagactcgggcaaccggagcctgagcctcccgcggggaagagctcggactccggaggtcgcgccgccttgggcttgaattcagtccttccttactactcgtggctttgcttacatcatttaactctccatttccttgtctatacagtgggctcataaggaggcggtaaggagatgatgatgtctttgaagagtttaggacaggacctggtgtctcccgtacgcttggtgggggtggcggaggtgatgcgttgttaacaggagaaaccgaccttccagggaggcccagggaggcagcggagagcgaagtcctgctcggcggagagacctcgaggagagtatggggaaaggaatgaatgctgcggagcgcccctctgggctccacccaagcctcggaggcgggacggtgggctccgtcccgaccccttaggcagctggaccgatacctcctggatcagaccccacaggaagactcgcgtggggcccgatatgtgtacttcaaactctgagcggccaccctcagccaactggccagtggatgcgaatcgtgggccctgaggggcgagggcgctcggaactgcatgcctgtgcacggtgccgggctctccagagtgagggggccgtaaggagatctccaaggaagccgaaaaaagcagccagttgggcttcgggaaagacttttctgcaaaggaagtgatctggtcccagaactccagggttgaccccagtacctgacttctccgggagctgtcagctctcctctgttcttcgggcttggcgcgctcctttcataatggacagacaccagtggccttcaaaaggtctggggtgggggaacggaggaagtggccttgggtgcagaggaagagcagagctcctgccaaagctgaacgcagttagccctacccaagtgcgcgctggctcggcatatgcgctccagagccggcaggacagcccggccctgctcaccccgaggagaaatccaacagcgcagcctcctgcacctccttgccccagagaccgtccgagctggagccacaagccctccattcctcttggaatcttcaaccccaaggtaaggtaagttcaccgagcaccgcccagcgatgcgcaggatccgggggggatcacgcgcggcgaccctaccgagcgctccgtgcgcgcccccatctctcggatcgtgttcctggctctgtcgaagctgctgagtcccgcgattcgggaaatccggcacttgtttctcaccctacaccatcacgtggaaatcattgaaaatgggaaccctggtggagtatctgggagagcacgcttgtgccgaggggcctgagctatgggacttcctccaggtccctctgtttcctgccggcgtaggggactcgtagtgtcggatcgcatagtgccaaaaaatagtgcatgggaaacaaacaaaaacacctctcattttcttccgcaatatagtttttcctgtaggtgggctaacatagtacctgaagaagttctcaccttgaagagctaaatccataccatacaatatctgagagttggtgatgatttcgggtcatgcatattgtttttaacagggatgatgtccataaataacttgctcttcgctccagtactggggcgtgaacgcattcagcaacatatgttggattcctgctttgctgcggcacgcaggaagcctcacagtgcttgccctggaagcactcacagtttttacaagacaaatcacatcttcccacttgatggtcaataccgtcatggagattgaattgattatcagtgactgaatttaccagagtaaacagaagtcactatgattccccaaaatgaatgctccttttgaacaagggcatttcatttcttaattttggcctccttagtctagcactgccaccctctccatatcctctccttcaaccagttcagttcaatgcatttaagtttgactgaaatttaagtattgtactttccttttcaaattggtgaatctacctgttctattttcatctccccaccacccattctctgtctcattctctctctctctctctctctttctctctctctctgtctgctctctctctctctctctgtaggtgtggtttgtgtctgagggtgagtctccccatctttgtgtttctgaggatgcctgtgtaacctatgtgcctatgtgtgtttgtgtgcatgggtttagggtggtcttattgggttgccatagtgataatgatcagctgtgtctagggaccaaggaaaccttcctatatactttttgttttatgtgtgtatttatttacttgtttatttttgcgacggagtcttactctgccgctcaggctggagtgcagtggcacgatctcgggttactacaacctccacctcccaggttcaagtgattctcctgcctcagctccccgggtagctgggattacaggcaccagcctccatgcctggtgaatttttgtattttagtacagatggggttttgacacattggccaggctggtcttgaactcctgacctcaagtgatccacccactttggcctcccaaagtgcttggattacagcacagccatctcacaggtgtctgatggcattgctgatgatgaaaactgtccgctcaggttactgtctcaattctttgaattggcacaacgttagaaggcaagaagtgctgtctttagaataacacaaagttgaaactttggtagaagctgacagattgctaaagtactaccataaggaactttaaaatcttctctgtctaaaaaagaagttcacaactaaggtatttcatgacttcaacaaatttacctataaagcctcctgaaaattaagtagttacaaatgtcagaagaaggaaattctgagttgatattgaatcaagctttactccaacccagctctaacaggctagatgtgggaacaataaacctaatgggaaactgaggcagggcagcaggaagcagaaggcctccttgcaaaagaaatgggaatgatgcatcctcttatctggcagccagccatcaagaaattgcttcccatggtcagcttgagcagtgggaagagactggcaggaaacactgggtaggaaggggaggtcaaggtctgcagataatagcagctaaaaataggtgatttcagagtgaaagtggctggctgaaagggatgaggctcataggttacctagtgataacctgtcaatgccagattcccatattaaagtatggtatatttacacatctgtaagatggaatgcacatgataaaattatattccttccaggtgcggtggctcatgcctgtaatcccagcactttgggaggccaaggcgggcagatcacctgaggtcgggagttcgagaccaacctgaccaacacggagaaactctgtgtctactaaaaatacaaaattagccaggtgtggtggtgcatgcatgtaatcccagctactcatgaggctgaggcagaagaatcgcttgaacctgggaggcacaggtttcagtgagccgagattgtgccattgcactccagcctgggctacaagagtgaaactctgcctcaaaaaaaaaaaaaaaaatcatagtcctgatgtttcattaaaattatttcctctgtaaatgagatcccatggcttttgaaagcataaatagctctaactttaagcagtattctatcattcaacttcaagttgaacaccttggagtccttccctgaacatagagcatatagaaaccttaaatatatgccatatcatcagcacgcattcaagattcttgtctacattgtggaatactctgaaatctcacttctaatgataattacacatctaaaaagcgtaaagaacctgatctgatcatcacacataatatggagtaaaacatcactatgtaccccatgtatatgtacaagtaatacttgtcaatttaaaaaaatttatgtgtaacaatatttttgctgctaattatttacatcattgaataaattctatctctcctctttcagaattctcaatgagcctgatttccaaaaggtatgacattttgaaagtaatttctcttatttacatatgctcttagaaaattcagaagtcccacacttctaaatctgtctggaaatactgctgatttgaaatcgacatattacatggaattatttccacttcatagttctagaaacaaacaaaaaaaaatgtacaaaataaggccgggcactgtggctcatgcctataatctcagcactttgggaggccgaggtgggtggatcacaaggtcaggagtttgagaccagcctggccaatatggtgaaacccggaaaccccgtctctactaaaaatacaaaaattagccaggcctagtggcaggtgcctatagtcccagctacttgggaggctgaggcaggagaatcacttgaacctgggaggcagaggttgcagtgagccaagatcacatcactgcactccagcctgggccacagattgagattctgtctcaaaaaacaaaaacaaaagtacaaaatagagttgggcaaggtggctcatgcctgtaatcctagcactttgaaaggctgaggagagaggattgcttgagcctaggagtttaggactatgattgtagtgagctatgattgtgccaatacactccagcttgggtgacagagcaataccttgtctctaaataaagcatttttaaatgttcaaaataatctctaagaaataaacaattggccagcagggtggctaatgcctgtaatcccagcactttgggaggccgaggtgggcggatcacttgaggtcaggagtttgggaccagcctgagcaacatggtgaaaccctgtctccactaaaaacacaaaaattagtcaggcgtggtggcgagcacctgtagtccctgctagcagggaggctgaggcaggagaattgcttgaacccggagaggttgcagtgagccgagatcgcaccactgcactccagcctgggcaacaagagccacactccatctcaaaaaataataaatacatacataaataaataaatataaaatattatataattggatttattgcaatcaatgaacatgtggtttatttttatttaatattgaaagactacgtttctaggccagaaggacaggagagtggataatttctcctgtggatgattgggcctttccacagaaacacaaacagagattgtataaagcacaaggcattattcatgctaccctttgtcctccagtccagtggaggagaaaaggaacaatccctggccaaatgtgcaaattgaaagtgctgtttttcactaccttgggcagggtttagcttccggttttgtgttccctatttactgcccttctgaactagggcaaataacttgatccatttgagcttgtctactcccctgtgaattagggataatcccatctcatgtgactattgtgagagttaagtaagataaggtatgtgaagagcacatacttgggtgagtggaaacctttatttttatttattaggtacaaggtctcactctgttgcccaggcttgagtgcagtggtgtggtcctatcatctcactgtagcctcaaaccctgggctcaaagcaatcttcccacctcagccccacaagtagctgagactacaggccagtaccaccaagcccagctttttacattttttttttagacatagggatcttgctaagttacccaggctagtctcaaactcctgggcttgagcaatccccttgccttagcctcctgtggctgggattgcaggtgacagccacctcacctggctgagtgccacctcacctggctgagtggagccctttagaaggatgtggtttttccagaagctgaggtctttcttgccctactaaatcacagacagctctttgctcaatggacctcagggaaggcaacaactgccacaccaattgaatgtatgcccttttccctggagccctggagtcctccctcagatggggacagctaggtcttgtcctggctcttcacaagagaatttctggactgcaaagtcacattgaagttgaccaggtaggagcaaaaataagctaccactgtataaagcagagaggcaaaagccagctgtactgactgaagtcacacgtcaaacagcattgatacccacatgcaactagctttacttgtaaggcacaagcatttcagccaatttaaggatagtctgatgaccaaagatagaaagtctcttgacaaactagaatttttttaaggatctctaggcctccgctcaaagaataggagattgttctaagaccttcttaataagtcatttccctagatgttactatattgattagtattaatacatatttatatatagatgtattatgtataatatatatttatataatacatattattataaataatatatattgatgcatattgacatgattaatacatatttatatataaatgtattatgtataatatatatttatataatacatattattatacgtaatatatattgatactaatcaatatagtaacatctagggaaatgacttattaagaaggtcttggaactgtctcctattctttgaggaggggctagagatccctaaaaattcctactatgtattatacataatacatataatatgtaatattctattgtgtattatatatattatatataatatattatatattatgtattgtatataatatattatgtattatatattatatgtattatgtattatatatgtattatatataatgtattatgtgttatatattatgtattatatatattatatgtgtaatatatatttatgtatatatatttatatataaatgcattatgtataatatatatttatataatacatattatacaaaatatatagatacatattgatatgattaatacatatttatatataaatgtattatgtataatatatttatataatacatattattatacataatatatattgatactaatcaatatagtaacatctaaggaaatgacttactaagaaggtcttggaacaatctcctattctttgagggggggtctagataatatgttatatattttgtattatatataatacataatatgttatatattatgtattatatataatacataatatgttatatattatgtataatatattatatattatgtattatatataatacataatatattatgtattatgtataatatattatatgtgtaatatatttatgtatatataatacatatattatatattatatattatatgtataatatattataagtataatatatattatatgtataatttatgtataatatatattatacataaatatgtataatatatattatacataaatatgtataatatatatgtaattatatatattatatgtatattatattatatatatgtatattatatgtaattatatatattatatatgcatataatatatgtgtaattatataatattatgtaaatatatattacacataaatatatattatacataaatatatattatacatataatatatattatacataattatgtataatatatattatatgtataatatatattatatattttcaaaaagtaggttgcaactgattagtcaataaagtcaagttagccaggctcggtggttcacacctgtaatcccagcactttgggaggccgaggcacttaaggtcaggagttcgagaccagcctggccaacatggtgaaaccccgtctccacaaaaaatacgaaaaaaattacccgggcgtagtggcgcgcccctgtaatcccagatactcaggaggcagagacaggagaatcgcttgaaaccaggaggtgaaggttgcagtgagccaagatcactccagcctgggcaactccatctcaaaaaaaaaaaaaaaagtccatttagtgggttgttaccagatttttattttatatatatatatatttattgtatataaaaaatatatatgtggaacccaagaggttttgacatttgattctgccatccctaagtgttgtggacctccctagtcccttagagcactccagccaatacacttactttctcagcagcaggggaaaagagacaaatcagaaggatatgcatctatggtagacagaataatggtccctgaaaagttgaaaggtgtctacattgcaattcctgaaacctgtgtctatgttcccttacagggcaaaagggatttttagagatataattagattaggtacttaaaataaacagattattctagattatccttgtgggcccaatctaatcatacaagtccttgaaagcaaataactttctctagctagaattcaagagctacagcagaaagaaaagttgaagagattccaaatatgaggaggctttactgagccattgctgcctctgagatgagggagtccattgacaaggacccaagagaggctggtaagggctaacgaccacccccaggcgacagacagcaaggaaactgggggcagccacaaggacgtggcctctccaacactggaccagagaaactgctgagccaagggggactttgacagacagaaacagtgaaataataaatttaataaccctagaagaaaacctaggcaataccattcaagacataggcatgacaaggacttcatgactaaaacaccaaaagcaatggcaacaaaacccaaaatagacaaatgggatctaattaaactaaagagcttctgcacagcaaaagaaactaccatcagagtgaaaaggcaacctacagaatgggagaaaatttttgcaatctacttatctgacaaagggctaatatccagaatctacaaaggacttaaacaaatttacaagaaaaaaactaacaaccccatcaaaaagtgggcaaaggatatgaacagacaattctcaaaagaagacatttatgcagccaacacacacttgaaaaaatgctcatcataactggtcatcagagaaatgcaaaccaaaaccacaatgagataccatctcacgccagttagaatggcgatcattaaaaagtcaggaaacaacagatgctggagaggatgtggataaataggaacgtttttacactgttggtgggactgtaaattagttcacccattgcggaagacagtgtggccattcctcaaggatctagaactagaaataccatttgactcaactggggtattactgggtatatacccagaggattataaataatgctactataaagacacatgtacacgtatgtttattgcagcactattcacaatagcaaagacttggaaccaacccaaatgtccatcaatgatagactggattaagaaaatgtggcacatatacacaatggaatactatgcagccataaaaaaggatgagttcatgtcctttgccgggacatggatgaaactggaaaccatcattctcagcaaactatcacaaggacagaaaaccaaacactatatgttctcactcataggtgggaattgaagaatgagaacacttggacacagtgtggggaacatcacatactggggcctgtaggggggtgggggggctgggggagggacagcattaggagaagtatctaatgtaaatgacaagttgacgggtgcagcaaaccaacatggcacatgtatacctatgtaacaaacctgcatattgtgcacatgtaccctagaacttaaagtataataataaaataaaaacgaaaaaaataaatttcatgttgtgtttagctgctgcatttgtggtgattcgtaattgcagcaattgaaaatgaatatagtttcctttacttgaatgacacttttggagttacacgatgcctgcttacacctcattcacagaacttagctgcatgaaagcatctagctacacagcaggtgggaaaatgtagcctttattctggacaaccagttgtctaatgaaaaatgggaggaagtacatcactaaaaagggaagtgtccagtggatactggggacaactagcagcctccatgacagttaccaaggatctatataaaaaattgtcctaataggcagggcgtggcggctcacgcctgtaatcccagcactttgggaggccaaagcaggcagatcacttgaggtcagaaattcgaggccagcctggccaacatggtgaacccccatctctactaaaaatacaaaattagccgggcgtggtggcacatgcctgtaatcccaactacttgggaggctgaggcgggagaatcacttgaacccagaaggcagaggttacgatgagccgagatcacgccattacactccagcctgggtgacagagcaggactccatcttaaaagaaaaaaaaaattgttataataatctggtgttttctgaaaagccacagatgaaaacaatactcattattatacaacagccatatatgaagcccatgtcctggaatttaattctagaaggaagtttgttcagacaaacttgtgtgctttcatcaaacgatgtacatgatacaacatccagtgttagccttttctatcagacaactctgaactaaagttagtattcaattaacactcaactatgtgtctcatcctagcataggctattgaggaaggccgagattttcaatcagaaacattggcttccagttctgcattgaccatttatgccccttctgaactagggcaaatgacttagtgtctttgacagtctatttttcttattagtcaattgggagaaatatcaacctcataggactgttatgagggttaaataaggtatgtgaaagatactttttgagatgaaaaagagccctatacatgtatttatagaattaaaacatataacatttatacatttatatgaaatgtataaaacattggatcttcccttcctctaagtcagtgtttttcgaacagtaggttgcaactgattagtcaatgaagtcaacttagtgggttattaccagatttttttaagttagataaaatataatagaaaatatcagagtgcattatgcacagcgaggataaagattgcttcatgtaactttttttagttatacatgcatatgcctaacagatcaaaatacaaaatatattttgactttgtaactttgttagaaagttttgaaaacactgctttaaaaacactgcttggaatggtgtgatcttcattttatctgtgttaaacatttggttttttgttttgtttttagcgctctattcatcatgtgcttttattagaaaccaactcacatctattttggagagagaaagttgagctaggagagagagagactgagggccagggtaaaactcatgttaaatgcttttcaaacaagatataattgttaaacttttatttatttatttatttatttttttttttgagacagaatctcactgtcgcctaggccggagtgcagtggtgcaatctcagctcactgcagcctctgcctcccgggttcaagcgattctcctgcctcagcctcccgaatagttgggactacaggcacacgccactgcgccaggctaattttctgtattttcagtagagatggggtttcaccgtgttagccaggatggtctcaatcttctgacctcgtgatctgcccgcctcggcctcccaaagtgctggattacaggcatgagccaccgcgcccaacctaattgttaaactcttaatctcagcctcagagtcagtcttccactctttgtgatgctggaagtgggctgaggcgctgaaaatgacattctcctttggcaacgggctattggtcaggctctgctactcagcacgggccaggagggaggcttcaaggtgcaaggccagtggaagaacttgcttcttcctttctgcttccagttcgcttcagttgcgagccaggccgtgtttctcccggtagtggcaatttattccattagcagcagtttattctggtttgcagtttcttccgaatcggcaccacctcaaagatatcaacaccagttggccagcaaccccttctcagcggtgtgagtcccagctctgtggagcccctccttcaagcttctacattttcatatttacaacctctttattttgttgcctcagccctgggggctggtagctgcattttgcaatcactccctgatgccttagtacaagcttgtccaatccctggccgtggccacatgtggcccaggacagctttggatgtggcccaatacaaattcgtaactttcttataacattatgagatttttttgcaattttcttttttaattcatcagcttcattagtgttagtgtgttttatgtgtggcccaggacaattattcttcttccaatggggcccagggaagtcaaaagattggacacccctgccttagtgcctctgactggaagggcctaccagcttatacttcctatgtttgcctgcctgccttttttttcttctgtcttgccttctcttaaaatgtactgagtggagagccgcagtggctcaggcctgttgtcctggtgcataaggaggcgaggctaggcgttccaggccagcctgggcaacatagaaacctctcatctatgtaacaaaaaaataataataataaaatgtactgagtaactgtactaggatctggactgggctctgggtcctctgtaaagtctgtgagcacacaaccatggaaccaatgagtttcatgttctctgtgaaacttcccaaacatcccaagtacccctctgtggtgtctaccttctaagatggcccccaataaattgtgccttttggtttccacacctttatgtcctcccctcccacaatgaatctgggctgagcctgtgactcactttaaccagtaaactgcagcaaaactgatgctgtgccccttccgggcctaacatcttttttttctttttttgacacaaggtctcattctgttgcccaggctagagtgcagcggtgcaatcacagttcgctgaagccttgacctccctggctcaagtgatcctcctatgtcagcctcccaagtagctgggaacacaggcacacaccaacatgcccagctaatttttttttttctttttttgttgagacaggttctcactatgttgcctagactggtctcaaactcctgagctcaagcaatccacctgccttggcctttcaaagtgctggcattacaggcatgagtcactatgcccagcctgagcctaaaatcaaagaaggcctcatatcttccacatttgtgctttgggaatcctggaccaccacgttaaaataataaaaaaacccagctgcctcgctggagagactatatcacgatgtcctcacaggaagatactgcatggagaaaagaaaccctgagaacacctgagaagagaggcccaggcatcccagcatctcatcccagcatctcatcccagctctagccatcatctgactgcaattatatgaagccagcaaaggaactgcccagctgaacccagttaatctacaaaatgtgagagataattaacccctaagttttggaggtggtttgctatgcagtaacagataattgaaatgccccttccctgttctatgttcttactctttaatcccataacaccttgtccctttgtacctctatcatattcttactcaagttgcattgtctgtctcccctaagagatggcaagtttctaaagggtggtgattgcatctttatttattttatcagaaaaagttcagtaaagaaaacagaaaccactcaaggcatttcaagcaaaaggagattaggtattcacaagattattgaaaggcacagcacgaggcttttggcttcaaggtcatatcaccatggttgtaatgcataggtctaaaaactgctgctactaccacagctctgccctatatccaagaaaatgatgtccggacagtggaatgtggatttggccatgcaaatacatctgccagaaccagccagccactatgacaagaacaatgacttctgtcttctttctgtcctccagatatttcatgaattcatctaattgacagaaccttcattgcacctagaagtcttgtgctaaaaggtctggaaaagccaggcttggcagcatacaccagtagttccagctactcaggaggttgaggcaggaggataactggaatccaggagtttgaggccatagtgagctatgatcacaccactacacttcagcctgggcaacataggaagaacttgtctcaaaaaaagaaaagaaagaaagaaaccttccagaaactatagctttcagcattccagttaattctatacaggggagaatatagatggagtgagaaatggatgataagggccgattaacagcatgtagtgcatttctgaatccctagccctaacacaagctctgataagtaggaagtctgataggcctgttgaatgaattgatgaatgtacaaattaatttgttatccatcaggtagtgtagcatgcaattatagtcccctcctatcctagatgctaggaagacaaaggtgaataaatggtatttccaaaaagcaaaatccaggggtagagctgagttgtgagagcagtgggatacaagtatgaattttgtaagattctcagtgttatctgtggagcccttgtctttcactctctcatgaaagtaaataggcaaatacagaatccatctcagatgttaaccttttcaacatgttttgcaaatgtaagttgtttctccaggaaataataaggctgcttttccaaggtcagccctgtagctgagtcaagaaagcattcctaaagcatatgtaaagaaaagaactcagacacagtctacacgcttgagaatagacacaactaaggccatcttgacaggtaaattctatggcttccccttgctattcacacatactatttattttcccagctattacttaaagcaccacatagctctcaatcctcagtgatgagaaaaagtggaatagagaccagaaataggaactcgagagtccagtgttctttacttaggccagcaattaacttgtaaaggctgtcacaatctcattttcagctgtattagttttgccatttacaaaatacaggcattatgtaaataaccaaacaatgctgataaagtgctgagtcctcatcactacagttatccctgtctgctctgtactaaatctatgacaggatttgtgtaattatagggtgtgttccccttgctaagcatatctcccacacaatccatttagccactcataaaccaaacactaggatttttttaaaaaagaaattagttgatcttgctagggttagtggaatgttttttatttgtttccattcctattgttgagatttggtgctttttcaaacagttgcttatagtttaaaaaaaaaaaaagactagacaaagctacaaccaagcattaatagtagtagtgaactctggggagtccgactggctgttccttttattttactttatgtgctgcattgtttgtatttttcacaatgggaatgtattgattttaaaattaaaaataaactttgtggcctggcgtggtggctcacgcctgtaatcccagcactttgggaggccgaggcgggtggatcacgaggtcaggagatcgagaccatccaggcaaacacggtgaaaccccgtctctactaaaaaatacaaaaaattagccgtgcacggtggtgggcacctatagtcccagctactcgggaggctgagacaggagaatggcgtgaacctgggaggcggagcttgcagtgagcaaagatcgcgctactgcactccagcctgggcgacagagtgagactccgtctcaaaaataaataaataaataaaaagcaaactttgtaaatattaccaatgattaactttgagtagagggattacagatgattttttttattatttgaatatttatattgagaaaaataaccattatttaaaagaacatcgactacattgttgacactttttctgcagaaagtgcaacaagtgtatcaagtgacacgtaggcagtagaagacaacaggatacagaagaggttttcacag

SEQ ID NO: 42 - DNA, 2336 bp, Homo sapiens
ctggtgtgagccggggctctgcgcgagcgagggacgacggaagggacgggcaggtgtgggcgcggggccacgcagcccgacggcgggagtcgcaggtgctgggtgcatgggccagtgaggacgcacagagatccctcgccgcgcggaggaggagcagcgcgggagccaggcgctgccccaagaccctgcctgcgtccgagcgagcggaacctcgcgcttcgcccggggacaatccgaagtccgcgctatggaagaggagaaatatttgcctgagctgatggcagagaaagatagcctggatccatcttttgtgcatgcgtcgcgccttttggcagaagaaattgaaaagtttcaaggttctgatggaaaaaaggaagacgaagaaaagaagtatcttgatgtcatcagcaacaaaaacataaagctctcagaaagagtactgattcctgtcaagcagtatccaaagttcaattttgtggggaaattgcttggaccaagaggaaactccttgaagaggctacaggaagaaacaggtgctaaaatgtctatcctgggcaaaggatcaatgagagataaagctaaggaagaagaactaaggaagagtggggaagccaaatatgcccacttgagtgatgagcttcatgtattaattgaagtgtttgctccacctggggaagcttattcacgtatgagtcatgcattggaagagattaaaaaattcctggttcctgactacaatgatgaaattcgtcaggaacaactacgtgaattatcttacttaaatggctcagaggactctggtcgtggcagaggtattagaggcagagggatcagaatagctcccacagctccttcaaggggccgtgggggtgccattcctcctcccccaccacctggacgaggtgttctcacccctcggggaagcactgtaacccgtggagcgcttccagtgccacctgtagcaagaggtgtccctacccctcgagcccggggggcaccaacagtgccaggatacagggcacctcctcctccagcccatgaagcttatgaagaatatggttatgatgatggctacgggggtgaatatgatgaccagacctatgagacttatgataacagctatgcgacccaaacacaaagtgtgcctgaatactatgactacggtcatggagtaagtgaggatgcctatgacagctacgcaccagaagaatgggccacaacccgctctagcttgaaggcaccaccgcaaaggtcagccagagggggatacagggaacacccctatggtagatattgaaggtccttcccacctgtgacctcacctcaaagacaattcatagcctgtggtctccacataaacagcaacaagacaagtaatagtcctttttttgtttgtttgtttctattctagggataactgctcatgattactcccatatatttctagtatttccctctgtactgttggcgtgacattgacactagtattattttacaaaacagactgaaaaagacattagcaagcatagtctataaacctttcagtaggatgatattctcttggttgtttttcattgttgtgtgtaatcttttttttttctttttcttttttttttttttgaggaaaagcatgaatttgttaacagattttgagtctcaaccaactagcagaaactttgtttagggttgctaaaagactgtaatatgatttttgaactagctgataataaagttgtagataagatgttttaacctgtcttttaatatctgttagttagacaaagatgtttgatattaagtttgtaaatttaattttaatgctgttttaatggggttgaaaacaagcagctactgtatgtatgtagctaactgaatttgttcagtgttttaacctgtatttgttaaaaaagaaaaaaaaacacacataaagttccatgtgtaagcttctctaaataggaaaccacaatttgtcaaatatgtttgccataatttgtcaataaagctgaaaacttttgtaaaaattaaatttggaattacttgttttctagctttaaatgcctgctttatttcttcttcaagagatgcctaaaatgttttctatttaaaaattacaaaaatgaacccaagtctgttttaagatatttgtgtaatacttaaaaatgtattaataacttatggttgttaaataatttaaaagttaacaaactaaactgttacatgaatcatggttagtaaacactaatgtataacatgttaatggaaaaaaatggatttagaataataaatggattttaaactataaaaaaaaaaaaaaaaaaaaaaaaaaaaaaaaaaaa

SEQ ID NO: 43 - DNA, 8223 bp, Homo sapiens
gaaacttcggcgtgaagtgcagctccgctccggctccctctagctttctttccttctctggaatccgaggcgcggatcttcctcgccccaccgccctagttttttcgggagctcgccggtgccctctagggtgtcggctcgtgctgggaagtgccctccatcctggtaatggggggcggcgaggcaccgtaggagtggcgaggcggcgcccagggtggcactgccccggaacggggcgctgggtgcgcgcgggagggtccccgcgcgggctccgccgctgccgcagctgcgagcgcgccgcgccaccgagcctcctgcagcaatggctcgtccgtgaaacgcgagccacggctgctctttttaagagtgcctgcatcctccgtttgcgcttcgcaactgtcctgggtgaaaatggctgtctagactaaaatgtggcagaagggaccaagcagtggatattgagcctgtgaagtccaactcttaagctccgagacctgggggactgagagcccagctctgaaaagtgcatcatgaattccggagttgccatgaaatatggaaacgactcctcggccgagctgagtgagctccattcagcagccctggcatcactaaagggagatatagtggaacttaataaacgtctccagcaaacagagagggaacgggaccttctggaaaagaaattggccaaggcacagtgcgagcagtcccacctcatgagagagcatgaggatgtccaggagcgaacgacacttcgctatgaggaacgcatcacagagctccacagcgtcattgcggagctcaacaagaagatagaccgtctgcaaggcaccaccatcagggaggaagatgagtactcagaactgcgatcagaactcagccagagccaacacgaggtcaacgaggactctcgaagcatggaccaagaccagacctctgtctctatccccgaaaaccagtctaccatggttactgctgacatggacaactgcagtgacctgaactcagaactgcagagggtgctgacagggctggagaatgttgtctgcggcaggaagaagagcagctgcagcctctccgtggccgaggtggacaggcacattgagcagctcaccacagccagcgagcactgtgacctggctattaagacagtcgaggagattgagggggtgcttggccgggacctgtatcccaacctggctgaagagaggtctcggtgggagaaggagctggctgggctgagggaagagaatgagagcctgactgccatgctgtgcagcaaagaggaagaactgaaccggactaaggccaccatgaatgccatccgggaagagcgggaccggctccggaggagggtcagagagcttcaaactcgactacagagcgtgcaggccacaggtccctccagccctggccgcctcacttccaccaaccgcccgattaaccccagcactggggagctgagcacaagcagcagcagcaatgacattcccatcgccaagattgctgagagggtgaagctatcaaagacaaggtccgaatcgtcatcatctgatcggccagtcctgggctcagaaatcagtagcataggggtatccagcagtgtggctgaacacctggcccactcacttcaggactgctccaatatccaagagattttccaaacactctactcacacggatctgccatctcagaaagcaagattagagagtttgaggtggaaacagaacggctgaatagccggattgagcacctcaaatcccaaaatgacctcctgaccataaccttggaggaatgtaaaagcaatgccgagaggatgagcatgctggtgggaaaatacgaatccaatgccacagcgctgaggctggccttgcagtacagcgagcagtgcatcgaagcctacgaactcctcctggcgctggcagagagtgagcagagcctcatcctggggcagttccgagcggcgggcgtggggtcctcccctggagaccagtcgggggatgaaaacatcactcagatgctcaagcgagctcatgactgccggaagacagctgagaacgctgccaaggccctgctcatgaagctggacggcagctgtgggggagcctttgccgtggccggctgcagcgtgcagccctgggagagcctttcctccaacagccacaccagcacaaccagctccacagccagtagttgcgacaccgagttcactaaagaagacgagcagaggctgaaggattatatccagcagctcaagaatgacagggctgcggtcaagctgaccatgctggagctggaaagcatccacatcgatcctctcagctatgacgtcaagcctcggggagacagccagaggctggatctggaaaacgcagtgcttatgcaggagctcatggccatgaaggaggagatggccgagttgaaggcccagctctacctactggagaaagagaagaaggccctggagctgaagctgagcacgcgggaggcccaggagcaggcctacctggtgcacattgagcacctgaagtccgaggtggaggagcagaaggagcagcggatgcgatccctcagctccaccagcagcggcagcaaagacaaacctggcaaggagtgtgctgatgctgcctccccagctctgtccctagccgaactcaggacaacgtgcagcgagaatgagctggctgcggagttcaccaacgccattcgtcgagaaaagaagttgaaggccagagttcaagagctggtgagtgccttggagagactcaccaagagcagtgaaatccgacatcagcaatctgcagagttcgtgaatgatctaaagcgggccaacagcaacctggtggctgcctatgagaaagcaaagaaaaagcatcaaaacaaactgaagaagttagagtcgcagatgatggccatggtggagagacatgagacccaagtgaggatgctcaagcaaagaatagctctgctagaggaggagaactccaggccacacaccaatgaaacttcgctttaatcagcactcacgcaccggagttctgcccatgggaagtaaactgcagcaggccactggggacagaagggcccatgtacttgttgggaggaggaggaaagggaaggctggcaggtaggtcggcacttggacaatggagtgccccaactcaacccttggggcgactggccatggtgacattgtggactgtatccagaggtgcccgctcttccctcctgggcccacaacagcgtgtaaacacatgttctgtgcctgctcagcagagcctcgtttctgctttcagcactcactctccccctcctcttctggtctggcggctgtgcatcagtgggatcccagacatttgtttctgtaagattttccattgtatcctctttttggtagatgctgggctcatcttctagaatctcgtttctcctctttcctcctgcttcatgggaaaacagacctgtgtgtgcctccagcatttaaaaggactgctgatttgtttactacagcaaggctttggtttccaagtcccgggtctcaactttaagatagaggcggccataagaggtgatctctgggagttataggtcatgggaagagcgtagacaggtgttacttacagtcccagatacactaaagttacaaacagaccaccaccaggactgtgcctgaacaattttgtattgagagaataaaaacttccttcaatcttcattttggaggcagggctgggaagggagcgctctcttgattctgggatttctccctctcagtggagccttattaatatccaagacttagagctgggaatctttttgatacctgtagtggaactaaaattctgtcaggggtttcttcaagagctgagaaacattattagcacttcccgccccagggcactacataattgctgttctgctgaatcaaatctcttccacatgggtgcatttgtagctctggacctgtctctacctaaggacaagacactgaggagatactgaacattttgcaaaacttatcacgcctacttaagagtgctgtgtaacccccagttcaagacttagctcctgttgtcatgacggggacagagtgagggaatggtagttaaggcttcttttttgcccccagatacatggtgatggttagcatatggtgcttaaaaggttaaatttcaagcaaaatgcttacagggctaggcagtaccaaagtaactgaattatttcaggaaggtcttcaatcttaaaacaaattcattattctttttcagttttacctcttctctctcagttctacactgatacacttgaaggaccatttactgtttttttctgtagcaccagagaatccatccaaagttccctatgaaaaatgtgttccattgccatagctgactacaaattaaagttgaggaggtttctgcatagagtctttatgtccataagctacgggtaggtctattttcagagcatgatacaaattccacagccttctgttcgctggaggatactccagccaccagttcggagggcagacagctgtatcctaaaagcaaccactgagaggccagcagtgaggctgcccatctccaaaacgaaacaacagatcaactggtatcagtctagaaggaccagctttggggtgctttgatcactatgaaaatgttcactggtttctgtcaatcatttggtcaaagttagttcctgtgattttttttttttttttttgagatggagttttgctcgtcaccaggctgaagtgcagtggcgtgatcttggctcactgcaacctctgcctcctgagtagctggaattacaggtgcccgccaccatacccagctagtttttttgtatttttagtagagacagggtttcaccatgttggccaggctggtctcgaactcctgaccactgatccacccacctcggcctcccaaagtgctgggattacaggcatgagccaatgtgcctggccattcctgtgattttttagaatttttcacttttcatataaagttgcattttatcatgaggaaaatgttttggctgaaaaacatatgccccaaaaaaaaaaaaatcagttttcactatttttccagcttgcctagggaaacgtcctcccctgagcaaagtgggatgtgcatggctcttttttgtgattaagcaggcatcaaatgggcagttttcattttcactgacacagaaacatgtggctgaagcaggaataaaatcctgcctactgacttctgtctccattcttgctccaggtaaaatcagagaacctccccttctctgagaattcccccaggcagaggcggctccagctcctgttaagggccccagttttactcatgctacctgaccttagttttagtactttcaaatgtgatttgggtaaaaactattttgcaggcaaaagtgttaattttttataaatatgtataataaaaaagctataaaagtttttccttttcttgtatttttcaaatactccccaagacacaatccttgaaggtgaactaggtggcacttgattatgctaattgtgggagctactgaactaaactatactgattaaattaaatgcttgcaggttcctgggtaattttcctttgtgaataacctggcgctacctgaatttttctctaacaaacatctccaatgagggtaaacaatgatcttgattctaatttatatgaggttaaaaaccttcagatttcgtattttgaattgttctccctagtttcctcagtggttacccccttttagtcagtaaccatctctgttcagaattcagtctttggcttttgaagaaatgggcacagagccaaaggacccatttcacagttcccttggaatatatttcccattgttggactgaggcaaacaaaaccaactgtgcaaatcacaagcaaaagagacttctgtccgtagttgcgagtgccatcagtgtgagcttaccagctacaaaaatctgtcatggactggggaacagtatgattccttattgaaactttcatcctcatcggctggcttgtcagcgttctgaagttaatatccatgctgcctgaaacaaatgttatgtttaactagcacttaacttttaaaattgcttaattctcctttcagatgcatgcactaagtcttctctgagcctgcagcaatattttagagggacctcttctaagtcagagccttgacattctactccaaaaggaagtccaaattagagcccataggctttttcttaaaagctgttaaggagtagtaaagaaagttaccactctaaggaaaacatgaaactatctgaaagtcttctggttcctaactggatacagattagattattttaaatgagaaaaaagtgcaccgtagttacccgatcaagattggactgcctgtgtccctggcatgaattaaagaacctccatagttgcttgttcccttctgaaggtgtttcctatggcccacgagaattataaagcaatcactttttaagtctatcagtcaaccttaatagctctcaagagtttcgattatcaagctttaaagtgataacatatcaagatgactattaaaaaataaacatctctgaaagtgtcctttcctccataaggctttaaacaatttgcaaattcttaattgggagtatgtcccaatcattctattaaactatttacagctctacctacttctagattcagcaaacagagctactagttagagtattttgagagccaaaatagtaagagacttctgtaatggttgagatttctgcactgaccttaattagggtaccgccatagggctaccaaagtttttagtgagggctggggaggtggagcataagtaacattttttttctgcagaaggtgatggctttgtagaacactataaaatttttcaggaaaacatacagcaaattttcttatccagtgggaacagcctatttgacaaggaatgatatacaagtttgattcacctttgagcactcttatagagtttacagaagaggcgtaactggttacaaaacaaaagttacgccttcactatccagttcttaaagtttatccacatcctacaaatcttatgttcatgtaggtcaggttaaagtaagctccaaacttgtggccttcagaagcatctcctgtttaacacacctgaaattactctaacttaatacatttgtattctctaagaaataatgctgactgctgtcaccacagcatcactgatctctcagtggctgttaaaatataaacaagtggaaaaaaagtatacaagttgatagcagctgttcatgtattcttgttttgctaatacctgtgtagagaaagacagtttcacatgcagatcaccatacatttttgcttaaaggttacactgggtaaactgtttgtttatcacattacatctgggtgagattttgcatgtgaccaagaggaagaaatcattcagtcccggaaatagcaactgctatgtaaaaccacatccttgactagtacttcatctttccacagtcatccatctgctaatcaggtgaaatatcagctcagcagaacaaagcaagttatacacaaatttcccccacattcacactgatgccgtacttagtaattctggttctaccattcccttttgcactttttgcaagtcaaattcatgtggaaaaatgttctgtttgtagaactcatagtattcacttatagtgctcatgtcaggaatggcaagtgagtaagagcccctgataatctgcttttgttagaacgtaatgcaaagataataaaacatgtccacttcttttctagttctaatcagtttttagacatcaagatttatttactttgcatgagatttgtttcctattatttgaatatgtgctatacacttgaattagaaaaacctgcttgaatgtattgtcagttattaaagcacatgtgactaagtttgcatttgtcagtattgttctactgtttgtactgaaagtctcattttaaaattgctacttaacactgtactataccttgtaattttttagattctccacttgtattctttaaatgtttccagatgcctttagttttagctgctgtaaaatagctactttgcgttatttgatatagaattgttttttaaaaactccatttatttatacagagacatttataatattttacaaacattcttatattctgaataaatatttctaattccacagtgta

SEQ ID NO: 44 - DNA, 5190 bp, Homo sapiens
ccagaagttctccagggcttccgcagagcgactttttcgctgcctgtgagctgcagcgcgggagagctcgggctcgcgcggaccccagcgcctggcaggctgacagcgctctctcgccccaggtgcccgcgcgcgtggtgagcagctgcaccaggtggcgtccggggtggggtcaatgaagcgcagcctgaggaagatgtggcgccctggagaaaagaaggagccccagggcgttgtctatgaggatgtgccggacgacacggaggatttcaaggaatcgcttaaggtggtttttgaaggaagtgcatatggattacaaaactttaataagcaaaagaaattaaaaagatgtgacgatatggacaccttcttcttgcattatgctgcagcagaaggccaaattgagctaatggagaagatcaccagagattcctctttggaagtgctgcatgaaatggatgattatggaaatacccctctgcattgtgctgtagaaaaaaaccaaattgaaagcgttaagtttcttctcagcagaggagcaaacccaaatctccgaaacttcaacatgatggctcctctccacatagctgtgcagggcatgaataatgaggtgatgaaggtcttgcttgagcatagaactattgatgttaatttggaaggagaaaatggaaacacagctgtgatcattgcgtgcaccacaaataatagcgaagcattgcagattttgcttaaaaaaggagctaagccatgtaaatcaaataaatggggatgtttccctattcaccaagctgcattttcaggttccaaagaatgcatggaaataatactaaggtttggtgaagagcatgggtacagtagacagttgcacattaactttatgaataatgggaaagccacccctctccacctggctgtgcaaaatggtgacttggaaatgatcaaaatgtgcctggacaatggtgcacaaatagacccagtggagaagggaaggtgcacagccattcattttgctgccacccagggagccactgagattgttaaactgatgatatcgtcctattctggtagcgtggatattgttaacacaaccgatggatgtcatgagaccatgcttcacagagcttcattgtttgatcaccatgagctagcagactatttaatttcagtgggagcagatattaataagatcgattctgaaggacgctctccacttatattagcaactgcttctgcatcttggaatattgtaaatttgctactctctaaaggtgcccaagtagacataaaagataattttggacgtaattttctgcatttaactgtacagcaaccttatggattaaaaaatctgcgacctgaatttatgcagatgcaacagatcaaagagctggtaatggatgaagacaacgatgggtgtactcctctacattatgcatgtagacaggggggccctggttctgtaaataacctacttggctttaatgtgtccattcattccaaaagcaaagataagaaatcacctctgcattttgcagccagttatgggcgtatcaatacctgtcagaggctcctacaagacataagtgatacgaggcttctgaatgaaggtgaccttcatggaatgactcctctccatctggcagcaaagaatggacatgataaagtagttcagcttcttctgaaaaaaggtgcattgtttctcagtgaccacaatggctggacagctttgcatcatgcgtccatgggcgggtacactcagaccatgaaggtcattcttgatactaatttgaagtgcacagatcgcctggatgaagacgggaacactgcacttcactttgctgcaagggaaggccacgccaaagccgttgcgcttcttctgagccacaatgctgacatagtcctgaacaagcagcaggcctcctttttgcaccttgcacttcacaataagaggaaggaggttgttcttacgatcatcaggagcaaaagatgggatgaatgtcttaagattttcagtcataattctccaggcaataaatgtccaattacagaaatgatagaatacctccctgaatgcatgaaggtacttttagatttctgcatgttgcattccacagaagacaagtcctgccgagactattatatcgagtataatttcaaatatcttcaatgtccattagaattcaccaaaaaaacacctacacaggatgttatatatgaaccgcttacagccctcaacgcaatggtacaaaataaccgcatagagcttctcaatcatcctgtgtgtaaagaatatttactcatgaaatggttggcttatggatttagagctcatatgatgaatttaggatcttactgtcttggtctcatacctatgaccattctcgttgtcaatataaaaccaggaatggctttcaactcaactggcatcatcaatgaaactagtgatcattcagaaatactagataccacgaattcatatctaataaaaacttgtatgattttagtgtttttatcaagtatatttgggtattgcaaagaagcggggcaaattttccaacagaaaaggaattattttatggatataagcaatgttcttgaatggattatctacacgacgggcatcatttttgtgctgcccttgtttgttgaaataccagctcatctgcagtggcaatgtggagcaattgctgtttacttctattggatgaatttcttattgtatcttcaaagatttgaaaattgtggaatttttattgttatgttggaggtaattttgaaaactttgttgaggtctacagttgtatttatcttccttcttctggcttttggactcagcttttacatcctcctgaatttacaggatcccttcagctctccattgctttctataatccagaccttcagcatgatgctaggagatatcaattatcgagagtccttcctagaaccatatctgagaaatgaattggcacatccagttctgtcctttgcacaacttgtttccttcacaatatttgtcccaattgtcctcatgaatttacttattggtttggcagttggcgacattgctgaggtccagaaacatgcatcattgaagaggatagctatgcaggtggaacttcataccagcttagagaagaagctgccactttggtttctacgcaaagtggatcagaaatccaccatcgtgtatcccaacaaacccagatctggtgggatgttattccatatattctgttttttattttgcactggggaaataagacaagaaataccaaatgctgataaatctttagaaatggaaatattaaagcagaaataccggctgaaggatcttacttttctcctggaaaaacagcatgagctcattaaactgatcattcagaagatggagatcatctctgagacagaggatgatgatagccattgttcttttcaagacaggtttaagaaagagcagatggaacaaaggaatagcagatggaatactgtgttgagagcagtcaaggcaaaaacacaccatcttgagccttagctcctcagaccttcagtgaggcttctaatggggggtgcatgacttgctggttctaactttcaatttaaaaagagtgaggaagaagcagaatgattcattttgctgcgtgtgaaatcatggttcctgcatgctgtataaaagtaaaccatcttttatcctctattcatattttctaccaatcactatgtattggggatatctttgcagatatgttcaaattggactggactttgatgagatataatctcattatttgaatgggtagaaaatgaatttgctagaacacacatttttaatgaaaagaagtaataaatgtaactattaagctaaaatgcaaatgtcagtactgaattcctgcttgttaattacataatatgtgatgctctagaaaatagtcacaagtattaataatgccttagatgatagtcttaaatattaggttgaggtctacctaacctaagctgcttcctggaaagcttcatgttgaaagaacctatgggtggcaccatgtggacttttctgtccctactgtgatgaatagccccacccttcttgctgtccccaacacacctgatgtcactttgagccatatagttgaagtacaaattaataggccttatgatatgcacgaattttactatagataatatatgttgtttctggttttgtttgccaatgagcataataaatgtaaaacctatatagtatccctgtgattattgtatgagcctttgtttgagatttgaaaacaacatggctccatcacatattcccttttttcttttgatgtctactcaaatcatgaattaatcacatacctcatcattaatcttttcaaggtccttctattgttttgtctgattttctccatcatcctgattagcatgtttattccctcactacccccaggagatattcactgtaatgaatatgtctttggctatgtatgtgtccttgtgttatgttgtacagtgttgttttgagtctgttattatttacacagatgttattatgctatagcttctatttctgtttttgcttcttatttctcttataattctcacttatttcctattttttctactcatttctatttgttactcctttttactggacatgatgtttacaagatacaactgtgttactgtattccatctagtacggggcctttggtgtggcttactatttcattgtgtgcacccacccacccaccacactggacttttctagagatggacagcttggttacctccaccttcctgcactcattctcaaacatactgatgttcatacaaaccagcagagtgctgagggacgatatgtactattacaaaaccagacacttttacattcatggtccaacagatcacatggcctagaggcaatgttgcatataccttaatctttgatatgaataatatctttgttctttatatttcttaaaacagaaagggtggaaaatcactatacagaagcaatatccaaagatctcctgatcataaagacaaggggtcttttcagtcttccctctcctcaaaccttgtgtagcattgcacaatatagatctcagtcaacattcactgagtgccaagaatgtgagaaacactgtaccatgcctgtcatgcgaaatatttaaataaacagattgtcttaca

SEQ ID NO: 45 - DNA, 3431 bp, Homo sapiens
gggacgcccgggcggccctgaaggggacggggcggccccagtcggaggtcgcagggagctccgcccccgactcggtataagagctgggcccggcccacggcggcggcggcggcggcggagagagctggctcagggcgtccgctaggctcggacgacctgctgagcctcccaaaccgcttccataaggctttgcctttccaacttcagctacagtgttagctaagtttggaaagaaggaaaaaagaaaatccctgggccccttttcttttgttctttgccaaagtcgtcgttgtagtctttttgcccaaggctgttgtgtttttagaggtgctatctccagttccttgcactcctgttaacaagcacctcagcgagagcagcagcagcgatagcagccgcagaagagccagcggggtcgcctagtgtcatgaccagggcgggagatcacaaccgccagagaggatgctgtggatccttggccgactacctgacctctgcaaaattccttctctaccttggtcattctctctctacttggggagatcggatgtggcactttgcggtgtctgtgtttctggtagagctctatggaaacagcctccttttgacagcagtctacgggctggtggtggcagggtctgttctggtcctgggagccatcatcggtgactgggtggacaagaatgctagacttaaagtggcccagacctcgctggtggtacagaatgtttcagtcatcctgtgtggaatcatcctgatgatggttttcttacataaacatgagcttctgaccatgtaccatggatgggttctcacttcctgctatatcctgatcatcactattgcaaatattgcaaatttggccagtactgctactgcaatcacaatccaaagggattggattgttgttgttgcaggagaagacagaagcaaactagcaaatatgaatgccacaatacgaaggattgaccagttaaccaacatcttagcccccatggctgttggccagattatgacatttggctccccagtcatcggctgtggctttatttcgggatggaacttggtatccatgtgcgtggagtacgttctgctctggaaggtttaccagaaaaccccagctctagctgtgaaagctggtcttaaagaagaggaaactgaattgaaacagctgaatttacacaaagatactgagccaaaacccctggagggaactcatctaatgggtgtgaaagactctaacatccatgagcttgaacatgagcaagagcctacttgtgcctcccagatggctgagcccttccgtaccttccgagatggatgggtctcctactacaaccagcctgtgtttctggctggcatgggtcttgctttcctttatatgactgtcctgggctttgactgcatcaccacagggtacgcctacactcagggactgagtggttccatcctcagtattttgatgggagcatcagctataactggaataatgggaactgtagcttttacttggctacgtcgaaaatgtggtttggttcggacaggtctgatctcaggattggcacagctttcctgtttgatcttgtgtgtgatctctgtattcatgcctggaagccccctggacttgtccgtttctccttttgaagatatccgatcaaggttcattcaaggagagtcaattacacctaccaagatacctgaaattacaactgaaatatacatgtctaatgggtctaattctgctaatattgtcccggagacaagtcctgaatctgtgcccataatctctgtcagtctgctgtttgcaggcgtcattgctgctagaatcggtctttggtcctttgatttaactgtgacacagttgctgcaagaaaatgtaattgaatctgaaagaggcattataaatggtgtacagaactccatgaactatcttcttgatcttctgcatttcatcatggtcatcctggctccaaatcctgaagcttttggcttgctcgtattgatttcagtctcctttgtggcaatgggccacattatgtatttccgatttgcccaaaatactctgggaaacaagctctttgcttgcggtcctgatgcaaaagaagttaggaaggaaaatcaagcaaatacatctgttgtttgagacagtttaactgttgctatcctgttactagattatatagagcacatgtgcttattttgtactgcagaattccaataaatggctgggtgttttgctctgtttttaccacagctgtgccttgagaactaaaagctgtttaggaaacctaagtcagcagaaattaactgattaatttcccttatgttgaggcatggaaaaaaaattggaaaagaaaaactcagtttaaatacggagactataatgataacactgaattcccctatttctcatgagtagatacaatcttacgtaaaagagtggttagtcacgtgaattcagttatcatttgacagattcttatctgtactagaattcagatatgtcagttttctgcaaaactcactcttgttcaagactagctaatttatttttttgcatcttagttatttttaaaaacaaattcttcaagtatgaagactaaattttgataactaatattatccttattgatcctattgatcttaaggtatttacatgtatgtggaaaaacaaaacacttaactagaattctctaataaggtttatggtttagcttaaagagcacctttgtatttttattatcagatggggcaacatattgtatgaagcatatgtagcacttcacagcatggttatcatgtaagctgcaggtagaagcaaagctgtaaagtagatttatcacacaatgactgcatacagacttcaaatatgtcaatagtttggtcatagaacctagaagccaaaagccacacagaagggcaagaatcccaatttaactcatgttatcatcattagtgatctgtgttgtagaacatgagggtgtaagccttcagcctggcaagttacatgtagaaagcccacacttgtgaaggttttgttttacaaatcacttgatttaacacactcaggtagaatatttttatttttactgttttatacccagaagttatttctacattgttctacagcaagaatattcataaaagtatccctttcaaatgcctttgagaagaatagaagaaaaaaagtttgtatatattttaaaaaattgttttaaaagtcagtttgcaacatgtctgtaccaagatggtactttgccttaaccgtttatatgcactttcatggagactgcaatacgttgctatgagcactttctttatccttggagtttaatcctttgcttcatctttctacagtatgacataatgatttgctatgttgtaaaatctttgtaaaaaatttctatataaaaatattttgaaaatcttaa

SEQ ID NO: 46 - DNA, 3650 bp, Homo sapiens
actgcccccgccactcctttagactctggacgtgcggggactggtggcgctcggcctcgcgttataaaaagcggtggggcagggccggcgagacaatctgggaggcgggtaccgggcctcacggatccgcgccgcgccccccacctgtggctgcgcgcggggtgggctgcgctcccctgggcggcgccgggcgcccggggctggtggcgagatgggccgctactctggcaagacgtgccggctgctcttcatgctggtgctcaccgtcgccttcttcgtggcggagctggtctccggctacctgggcaactccatcgcgctgctctccgactccttcaacatgctctccgacctgatctcgctgtgcgtgggcctgagcgccggctacatcgcccggcgccccacccggggcttcagcgccacctacggctacgcccgcgccgaggtggtgggcgcgctgagcaacgcggtcttcctcaccgcgctctgcttcaccatcttcgtggaggccgtgctgcgcctggcccggcccgagcgcatcgatgaccccgagctggtgctcatcgtcggcgtcctggggctgttggtcaacgtggtggggctgctcatcttccaggactgcgccgcctggttcgcgtgctgcctccggggacgcagtcgccgcctgcagcagcggcagcagctggcggagggctgtgtccccggcgctttcggggggcctcagggcgcggaggacccgcggcgcgcggcggacccgacagccccaggctcggactcggccgtaaccctccgggggacctcggtggaaaggaagcgggagaagggggcgaccgtgttcgcaaacgtagcagaacttatacacaacacaaggtttcttctttgaatgcaggtgattccttcaacacccagaatgagccagaagacatgatgaaaaaagagaaaaagtctgaagctctgaatatcagaggtgtacttttgcatgtgatgggagatgccctggggtccgtggttgtggtcatcacggccatcatattctatgtgcttcccctgaagagtgaggacccgtgtaactggcagtgttacattgaccccagcctgactgtcctcatggtcatcatcattttgtcatctgccttcccgcttatcaaggagaccgctgccattctgctacagatggtcccaaaaggagtcaacatggaagagctgatgagtaaactctctgctgtgcctggaattagcagtgtacatgaagtgcacatctgggaacttgtaagtggaaagattattgccaccctgcacatcaagtatcctaaggacaggggatatcaagatgccagcacaaaaattcgagaaatcttccaccatgcgggaatccacaatgtgaccatccagtttgaaaatgtggacttgaaggaacccctggagcagaaggacttactgttgctctgcaactcaccctgcatctccaagggctgtgctaagcagctgtgttgtccccccggggcactgcctctggctcacgtcaatggctgtgctgagcacaatggtgggccctctctagacacatacggaagtgatggcctcagtagaagagacgcaagagaagtggctattgaagtgtctttggatagctgtctgagtgaccacggacaaagtcttaacaaaactcaggaggaccaatgttatgtcaacagaacgcatttttaatctggtactcacataatcagaccatatagacgaggcactttggaaccacaagcttggctcacaaaaagagctttctgggttgtaggcccagactagacttgcagcatgcatgctctgtgttcactaggggttggctgtttgggattttagttaaacgtgtctgtgaatttttatgtaactaactcctttccattcccctgggtgtctcatgctgctctttgactgtttcagcttgaacatgcattttctaaagcaaactgcactagtgtatatatcagggacattaaagtctgggactggggctcaatagctgcggatacagtgttcaaagaagttcttgtttctaaactgattagaacttctagctaatgctcaggtgagatcatagcttaaatacattgaaaaaactaaagtaccacaatagctgtatttttcccaatccccttaacgatcataaaagaggcaagttaagtatttctggcactgaagaaatatcttttttctttgattcatttttgaataaatataaaatgaataactattaaggtagaaaatattctcagaacattctagaggaggtaaaggttagtaggagggcgttggccatctctacattttgtgaggtgagagaaaactaatgtttactttctgctgtgaactgaactgcagctatagaatgtttcaaatgcttaaatatataatacatttttttccatggaagtgagggaatatttcagtttcctgaagtatgacacaaatactcatatactgtcttttagagtcagtatagttggagctgttttcatttagtgctttgataatgatttacttatttttccaaatttcgtttgaattttctttcatatgattgcattgatctatgcagcatttaccagaaaagagtattcctgggatagcagaatgcataacactgagtgttaattcttgtgaaataaataagctagactgccttctctttaattagacatattttaaagtatttattatagttgtcaactagtaactcaatgaaaaagttgatgcccaagggagaaatgagaattagcttaattgctgcctttaatgtgtttttgaggaacttaaaattttctttcatgtcgctgatccatattaccaagttcaaataaaatttttataatcggattcagacccataaccaaactatgttggtagtagagaagcatctgtcatgtttttaacacattgctcagacatcagtatttaaatcagaacagtctcacaggtatgagaaaatgggaagtgcctcactagacaactagtatcatctctggtagactgcaagattgtctgaaaataaccatctcttagtgtgtaaagtcctgttcagaatctgcacagggtttttcagaggtgctgggttgataatgaaggcagcatccacagaacaaacatcatatttaaacaatgtatcttagtcctaaatttgaaggctaaaataaataagcagctatgatccgtaggataggaaattattatttttttctttttttgtagagacagggtctcgctatgttgcccagctggccttgaactcctagcctcaagtgattctctcgccttggcctcccaaagcactgggagaacagtcatgagccactgcacctggccaggaaattctttattccttgaaaatgtattatctgagtttaaattggctgtgaagtaggtaaatagaaaaatgcctaaaaatgtttttatttctaggagcttattgggctaggttatatgccctttataagctcaaaggggttaataagtaagaatttctatttttagtattaaaagtgtggcatgtactcacacaaaacagtgcatcctcttaagaaacttggcatggagatcagtgggccagattctcctacataaacattggttgaaattccttagagccaaaaaagaaa

SEQ ID NO: 47 - DNA, 2328 bp, Homo sapiens
cgggaacccaggcggggcgagccgcgggagagtggagggcaggcgcctgggctgggggcggggaccaggcggggcagggggcagggagaggagggcggcgggagcctgagccggaatcgcagcgtgagcaggtggagccgcgttgggagcccgccgggtcgagctgagtaaggcggcgggctcggcgggggccatggagctgctaaagctgaaccggagcgtgcagggaaccggacccgggccgggggcttccctgtgccgcccgggggcgcctctcctcaacagcagcagtgtgggcaacctcagctgcgagccccctcgcattcgcggagccgggacacgagaattggagctggccattagaatcactctttacgcagtgatcttcctgatgagcgttggaggaaatatgctcatcatcgtggtcctgggactgagccgccgcctgaggactgtcaccaatgccttcctcctctcactggcagtcagcgacctcctgctggctgtggcttgcatgcccttcaccctcctgcccaatctcatgggcacattcatctttggcaccgtcatctgcaaggcggtttcctacctcatgggggtgtctgtgagtgtgtccacgctaagcctcgtggccatcgcactggagcggtacagcgccatctgccgaccactgcaggcacgagtgtggcagacgcgctcccacgcggctcgcgtgattgtagccacgtggctgctgtccggactactcatggtgccctaccccgtgtacactgtcgtgcaaccagtggggcctcgtgtgctgcagtgcgtgcatcgctggcccagtgcgcgggtccgccagacctggtccgtactgctgcttctgctcttgttcttcatcccgggtgtggttatggccgtggcctacgggcttatctctcgcgagctctacttagggcttcgctttgacggcgacagtgacagcgacagccaaagcagggtccgaaaccaaggcgggctgccaggtggggctggaccacgtgagcaaaatctgggcgaggcggagctttggagggcgacggggcctgctggagtgggtgggactgaaatgaaggtgagggtgagaaggaagctggaaatggagttgagctgggagcggaggtcaggtggggactgggctggagactggggggactcgcctttttctctgaccgcccaccctttgtgctcaggggctgttcaccagaacgggcgttgccggcctgagactggcgcggttggcgaagacagcgatggctgctacgtgcaacttccacgttcccggcctgccctggagctgacggcgctgacggctcctgggccgggatccggctcccggcccacccaggccaagctgctggctaagaagcgcgtggtgcgaatgttgctggtgatcgttgtgcttttttttctgtgttggttgccagtttatagtgccaacacgtggcgcgcctttgatggcccgggtgcacaccgagcactctcgggtgctcctatctccttcattcacttgctgagctacgcctcggcctgtgtcaaccccctggtctactgcttcatgcaccgtcgctttcgccaggcctgcctggaaacttgcgctcgctgctgcccccggcctccacgagctcgccccagggctcttcccgatgaggaccctcccactccctccattgcttcgctgtccaggcttagctacaccaccatcagcacactgggccctggctgaggagtagaggggccgtgggggttgaggcagggcaaatgacatgcactgacccttccagacatacgaaacacaaaccacaactgacacaggaaaccaacacccaaagcatggactaaccccaacgcacaggaaaaggtagcttacctgacacaagaggaataagaatggagcagtacatgggaaaggaggcatgcctctgatatgggactgagcctggcccatagaaacatgacactgaccttggagagacacagcgtccctagcagtgaactatttctacacagtgggaactctgacaagggctgacctgcctctcacacacatagattaatggcactgattgttttagagactatggagcctggcacaggactgattctgggatgctcctagtttgacctcacagtgacccttcccaatcagcactgaaaataccatcaggcctaatctcatacctctgaccaacaggctgttctgcactgaaaaggttcttcatccctttccagttaaggaccgtggccctgccctctccttccttacccaaactgttcaagaaataataaattgtttggcttcctcctgaa

SEQ ID NO: 48 - DNA, 1110 bp, Homo sapiens
attaatcccctggcccaacccgtcatctactctaccatctttgcaggcacactcatcacagcgctaagctcgcactgattttttacctgagtaggcctagaaataaacatgctagcttttattccagttctaaccaaaaaaataaaccctcgttccacagaagctgccatcaagtatttcctcacgcaagcaaccgcatccataatccttctaatagctatcctcttcaacaatatactctccggacaatgaaccataaccaatactaccaatcaatactcatcattaataatcataatggctatagcaataaaactaggaatagccccctttcacttctgagtcccagaggttacccaaggcacccctctgacatccggcctgcttcttctcacatgacaaaaactagcccccatctcaatcatataccaaatctctccctcactaaacgtaagccttctcctcactctctcaatcttatccatcatagcaggcagttgaggtggattaaaccaaacccagctacgcaaaatcttagcatactcctcaattacccacataggatgaataatagcagttctaccgtacaaccctaacataaccattcttaatttaactatttatattatcctaactactaccgcattcctactactcaacttaaactccagcaccacgaccctactactatctcgcacctgaaacaagctaacatgactaacacccttaattccatccaccctcctctccctaggaggcctgcccccgctaaccggctttttgcccaaatgggccattatcgaagaattcacaaaaaacaatagcctcatcatccccaccatcatagccaccatcaccctccttaacctctacttctacctacgcctaatctactccacctcaatcacactactccccatatctaacaacgtaaaaataaaatgacagtttgaacatacaaaacccaccccattcctccccacactcatcgcccttaccacgctactcctacctatctccccttttatactaataatcttatagaaatttaggttaaatacagaccaagagccttcaaagccctcagtaagttgcaatacttaatttctg

SEQ ID NO: 49 - DNA, 4745 bp, Homo sapiens
cgcgcgcggcagccccgaggcagcagagcgcggagccgggagcgcggggagcgcgggccggcggcggcgagggaggacgggggcgcagacggccggcgcgcggcgcggctaccatgggcgtgcggtgagcagccgctcgggacgacttcctcggctgcgcggcgctcgcgcggagctccccggccggcggtgcgtccccacggtcaccatgaaagatgaaagacgacttcgcagaggaggaggaggtgcaatccttcggttacaagcggtttgggtattcaggaaggaacacaatgtaccaaatgtaaaaataactgggcactgaagttttctatcatattattatacattttgtgtgccttgctaacaatcacagtagccattttgggatataaagttgtagagaaaatggacaatgtcacaggtggcatggaaacatctcgccaaacctatgatgacaagctcacagcagtggaaagtgacctgaaaaaattaggtgaccaaactgggaagaaagctatcagcaccaactcagaactctccaccttcagatcagacattctagatctccgtcagcaacttcgtgagattacagaaaaaaccagcaagaacaaggatacgctggagaagttacaggcgagcggggatgctctggtggacaggcagagtcaattgaaagaaactttggagaataactctttcctcatcaccactgtaaacaaaaccctccaggcgtataatggctatgtcacgaatctgcagcaagataccagcgtgctccagggcaatctgcagaaccaaatgtattctcataatgtggtcatcatgaacctcaacaacctgaacctgacccaggtgcagcagaggaacctcatcacgaatctgcagcggtctgtggatgacacaagccaggctatccagcgaatcaagaacgactttcaaaatctgcagcaggtttttcttcaagccaagaaggacacggattggctgaaggagaaagtgcagagcttgcagacgctggctgccaacaactctgcgttggccaaagccaacaacgacaccctggaggatatgaacagccagctcaactcattcacaggtcagatggagaacatcaccactatctctcaagccaacgagcagaacctgaaagacctgcaggacttacacaaagatgcagagaatagaacagccatcaagttcaaccaactggaggaacgcttccagctctttgagacggatattgtgaacatcattagcaatatcagttacacagcccaccacctgcggacgctgaccagcaatctaaatgaagtcaggaccacttgcacagatacccttaccaaacacacagatgatctgacctccttgaataataccctggccaacatccgtttggattctgtttctctcaggatgcaacaagatttgatgaggtcgaggttagacactgaagtagccaacttatcagtgattatggaagaaatgaagctagtagactccaagcatggtcagctcatcaagaattttacaatactacaaggtccaccgggccccaggggtccaagaggtgacagaggatcccagggaccccctggcccaactggcaacaagggacagaaaggagagaagggggagcctggaccacctggccctgcgggtgagagaggcccaattggaccagctggtccccccggagagcgtggcggcaaaggatctaaaggctcccagggccccaaaggctcccgtggttcccctgggaagcccggccctcagggctccagtggggacccaggccccccgggcccaccaggcaaagagggactccccggccctcagggccctcctggcttccagggacttcagggcaccgttggggagcctggggtgcctggacctcggggactgccaggcttgcctggggtaccaggcatgccaggccccaagggcccccccggccctcctggcccatcaggagcggtggtgcccctggccctgcagaatgagccaaccccagcaccggaggacaatggtaagtccaagccctccctccagccagggggacagggcagtgcatgtgcttgagactgagccaacccccagtgtgtggccccacccatgttatttttgtttttgtttttgttttgagacagggtctcactctgttgcccaggctggagtgcagtggcgtgatctcggctcactgcaacctccacatcccgggttcaagtgattctcctgccttagcctcccaggtagctgggactacaagcgtgtgcccccacagccagctaatttttgtatttttagtagagagggggtttcaccgtgttggccaggctggtctcaaactcctggcctcaagtgatccacctaccttagtctcccaaagtgctgggattacaggtgtgagccaccacgtcttgtcccccgctgcatattatttaacagcaaaggcatcataggggctggcacaggagccctgctgccagaacaggcctccataccaggcatgtgtttctctctaaacgccattgggttctctagtgctcatttgttttatgtattatgtgtgtatgtatgggacagggtctcactctgtcacccaggctggaatgacgaagtgaagtagtgcaaacatagctcactgcagctttgacctcctgggcttaggtgatcttcccactcagactcctgcgtagctgggaccacaggggtatgccaccacacctggctaattttttattttcctttttgtagagacagggtcttgctatgttgcccaggctggtcttgaactcctggcctcaagcaaccctcctgcctcagtcttgcaaagtgctgggattccaggtgggagccactgcacctggctcttgcacttgtttatttataggagccagccctcagaagacaaacacaatgcaaaacatttccttcagggaagcctgctggccgccctgagcgctcttccctcgttttacatcctcactctggagatagatgggctccctcggttagctccatcaacatgtggatggaaccctctgctattgatgactacatttaatttctttttgagaaaggtgttagatgttacggtgccttctagtcttttgataattaaacctttggcaaaactcgaatgtttggttagcaaccaagcctatttttctctcctttgacccaaccgctattctacttgattttggtcggtgaggcccgggttatttttgttgatccgtgagcccagttttggtgctgggttctcacatccaagtgttcctgggttccgtatgattccagactgacgctgaacatctgtgcctgccctgcttcttgttgttgcttctgttatttctgtcattgtgaagacggatccagacacagaagaacaaagacccagtcaaagatcttttccagattatgtggttttggcttgtgctctgcagtccactttgggtcatgcttgctgcgagcacgtccgtgaacgtcagctgtgggcctcgtgcagggacgctcaggctgctcccagcgggaccacagttttggcctctgaaacacagctgaagaaaggcagagtgctttctgtgatcttttaatcaatgttttccacttttgcattcctaggctgcccgcctcactggaagaacttcacagacaaatgctactatttttcagttgagaaagaaatttttgaggatgcaaagcttttctgtgaagacaagtcttcacatcttgttttcataaacactagagaggaacagcaatggataaaaaaacagatggtagggagagagagccactggatcggcctcacagactcagagcgtgaaaatgaatggaagtggctggatgggacatctccagactacaaaaattggaaagctggacagccggataactggggtcatggccatgggccaggagaagactgtgctgggttgatttatgctgggcagtggaacgatttccaatgtgaagacgtcaataacttcatttgcgaaaaagacagggagacagtactgtcatctgcattataacggactgtgatgggatcacatgagcaaattttcagctctcaaaggcaaaggacactcctttctaattgcatcaccttctcatcagattgaaaaaaaaaaagcactgaaaaccaattactgaaaaaaaattgacagctagtgttttttaccatccgtcattacccaaagacttgggaactaaaatgttccccagggtgatatgctgattttcattgtgcacatggactgaatcacatagattctcctccgtcagtaaccgtgcgattatacaaattatgtcttccaaagtatggaacactccaatcagaaaaaggttatcattggtcgttgagttatgggaagaacttaagcatatactgtgtaaacagtgccatacatttctaaaatcccaagtgtaggaaaaatatgcagacatacagatatataggccaactattagtaataatatgaaatatacttaaagagcttttaaaactttgtatttttgtacaaaatatttgtcttttacaatttttttcctttttttttttttgtcattttaccgacataatacatggagccaaagaaaacaataatggtactaataaaaactcctagggtttcctgtcagatttaattctacccagtggcaaagaattttttcaattgtggctttaaaaaaataattaaatatacatgtgtatatatatatatatatatata

SEQ ID NO: 50 - DNA, 4986 bp, Homo sapiens
gaggtgggctgtgtgcagtaaactggaatgctctccctcgctcactcctcagtgtaggagtgatctgaagcaggacaagctcagcctgcagctgccgtgggctttgtgtggactggacgcagagcttgggagacgggggagggctattactccaattcactgtcaatggaattacagctatagcggcagtgtatataggattgctttttctcgtcttcctggagatgctcagtcccagtatattttaaggaagagaaatataaaggaaatttagtatgcctccttttctttaaatgaagaatttagtttcctttacttcttaaaagagaatacctgttcttgtataacgtgactgcaccagacattctgaaaaatcagcaagaagcaaaagctggaaatagctatttcacagcagggttctgaagtaacggaagctaccttgtataaagacctcaacactgctgaccatgatcagcgcagcctggagcatcttcctcatcgggactaaaattgggctgttccttcaagtagcacctctatcagttatggctaaatcctgtccatctgtgtgtcgctgcgatgcgggtttcatttactgtaatgatcgctttctgacatccattccaacaggaataccagaggatgctacaactctctaccttcagaacaaccaaataaataatgctgggattccttcagatttgaaaaacttgctgaaagtagaaagaatatacctataccacaacagtttagatgaatttcctaccaacctcccaaagtatgtaaaagagttacatttgcaagaaaataacataaggactatcacttatgattcactttcaaaaattccctatctggaagaattacatttagatgacaactctgtctctgcagttagcatagaagagggagcattccgagacagcaactatctccgactgcttttcctgtcccgtaatcaccttagcacaattccctggggtttgcccaggactatagaagaactacgcttggatgataatcgcatatccactatttcatcaccatctcttcaaggtctcactagtctaaaacgcctggttctagatggaaacctgttgaacaatcatggtttaggtgacaaagttttcttcaacctagttaatttgacagagctgtccctggtgcggaattccctgactgctgcaccagtaaaccttccaggcacaaacctgaggaagctttatcttcaagataaccacatcaatcgggtgcccccaaatgctttttcttatctaaggcagctctatcgactggatatgtccaataataacctaagtaatttacctcagggtatctttgatgatttggacaatataacacaactgattcttcgcaacaatccctggtattgcgggtgcaagatgaaatgggtacgtgactggttacaatcactacctgtgaaggtcaacgtgcgtgggctcatgtgccaagccccagaaaaggttcgtgggatggctattaaggatctcaatgcagaactgtttgattgtaaggacagtgggattgtaagcaccattcagataaccactgcaatacccaacacagtgtatcctgcccaaggacagtggccagctccagtgaccaaacagccagatattaagaaccccaagctcactaaggatcaccaaaccacagggagtccctcaagaaaaacaattacaattactgtgaagtctgtcacctctgataccattcatatctcttggaaacttgctctacctatgactgctttgagactcagctggcttaaactgggccatagcccggcatttggatctataacagaaacaattgtaacaggggaacgcagtgagtacttggtcacagccctggagcctgattcaccctataaagtatgcatggttcccatggaaaccagcaacctctacctatttgatgaaactcctgtttgtattgagactgaaactgcaccccttcgaatgtacaaccctacaaccaccctcaatcgagagcaagagaaagaaccttacaaaaaccccaatttacctttggctgccatcattggtggggctgtggccctggttaccattgcccttcttgctttagtgtgttggtatgttcataggaatggatcgctcttctcaaggaactgtgcatatagcaaagggaggagaagaaaggatgactatgcagaagctggcactaagaaggacaactctatcctggaaatcagggaaacttcttttcagatgttaccaataagcaatgaacccatctcgaaggaggagtttgtaatacacaccatatttcctcctaatggaatgaatctgtacaaaaacaatcacagtgaaagcagtagtaaccgaagctacagagacagtggtattccagactcagatcactcacactcatgatgctgaaggactcacagcagacttgtgttttgggttttttaaacctaagggaggtgatggtaggaaccctgttctactgcaaaacactggaaaaagagactgaaaaaaagcaatgtactgtacatttgccatataatttatatttaagaactttttattaaaagtttcaaatttcaggttactgctgcgattgatgtagtggagatgcctgaacacaattctatattttagtattttttagtaatttgtactgtattttccttgcaaatattggagttataaaccatttactttgtgttctactgagtaagatgacttgttgactgtgaaagtgaattttcttgctgtgtcgaacaatcaggactgcattcatatgagatccttgtagtataagcacaggccatttttcactttggtattaataaaatgtaaaaaaaaaaaactggctgaatggctgaatgagataaaatttaattttaaaaaatggttatgaaataatgttccaattattaaatttgtattatcccagtggtattcaataaatcaaaatgtgtgaagtaatgggcaatatcaaacttcctgcatatctccatttttgctctaggcaaattaattatccttaaaaaagttaagcatatcttctgaactgaatacatcagctggcataaaaggagcatgaagtctgttaaagccattgtcagcaaagctttgaaaataaaggacttcacaaaaacggtaatgtaaatgtgcttccaagttggggggaaaatgtgtacttaggaaaacatggaaacttagacttgtatagtgtaatgaacacaaataccaaaactgcattttggttttgcctataccatcctgatttttgaaaagtgaattataaacacaaaattgttagtgtttatgatgtttttatcataaaggatgtcagagaaactttatgcatattaaaaatgtaatgtaattataagcgattcccctcaacaatccagagaaagtagttctttaaataagagataatttaaagaaaaataaatactagacatcaaatttagatctggtttatgtcaaaggttttaacactgtacataaatgttcaatttacttttacaaagatcaagaatactgcccattactgtcacaattttccagatattatataatgaactcgtaatgtaacatttccttctagcttcctactgaattgtgagctgttacttgttgaaaaaccatatcacttttctgttgccatgattttttttttttcaacaaaaaaccaaagtgcattgtacgccctttggccagtcttgtatgtgccttgatccaacgctacatgtattcagcttttaaaactccacaaatttttcatactccttaaatatgaaaaattatggtcttattgctgaataaaacttttaaaaagtacagaataattgtgcttgctttttcaggattgtgttactatcactaagtagcaaattgcccagcacattagtcctaaacgtcccatgtatttttctaggcataaaaataaaagttggctaaaaattttaaaaaatcaacatcttgaggttgtgtatcattttacttcaaagagttcagtgtttcatgtataaatgtatttcctcttacttatacactgtatagatggaaaatttaagaaatggtttcaaagcctttctctcttaggcgcactgctgccactgtcctgatactttttaaggtggtctttgaaaaactgtttttttaaaatagccttttagtagagtgagttggcatttgtgatactgtgaaatacacactttctctttgtccctgtttctggcatacaactcctaaaatccttgcaatcttcaaagtgatatattttcatatgctaatgagttcactgatagctggcaggccctaggtagcttcaagataaagtctgatcattgaaaagaccaagacatgattatagggttgggacttacaaccccaaaccctaacctccagagagggcgaagtggatgaagattaagttgatcaccagtgaccagtggtttaatcaagcatgcctatgtaatcaagcctccataaaaaaacaaaaggtcaagatttggagagcttccagattgctgaacatgtggtggttcctgcaggatggcatgcctggagagggcatggaagctctgtgcccacctagacctcaccttatgtttcctgccatctggatcctttgtaacatcctttataatacgtcagtaaatctgtttccttgcattttgtgagctgttgtagcaaattaatagaacacaaaaaggggatcctgggaaaccaaacttgaagctgactagtcttgcaactggtgtctgaagaggaggcagttttgtgggaataagccctcaacctgtgggatatgacacaatttccaggtagacagtgttgggattaaactgaattggaggacacccagctggtatctgctgaagaactgattgcttgcgtggtgtatggggcaaaacttgttaagacaagtcttctatgttgattattgttgaatgagagaattaaacacacatacacactt

SEQ ID NO: 51 - DNA, 2929 bp, Homo sapiens
agaagcccacggagcggcgcccggcgcgccacggcccgtagcagtccggtgctgctctccgcccgcgtccggctcgtggccccctacttcgggcaccatggacacctcccggctcggtgtgctcctgtccttgcctgtgctgctgcagctggcgaccgggggcagctctcccaggtctggtgtgttgctgaggggctgccccacacactgtcattgcgagcccgacggcaggatgttgctcagggtggactgctccgacctggggctctcggagctgccttccaacctcagcgtcttcacctcctacctagacctcagtatgaacaacatcagtcagctgctcccgaatcccctgcccagtctccgcttcctggaggagttacgtcttgcgggaaacgctctgacatacattcccaagggagcattcactggcctttacagtcttaaagttcttatgctgcagaataatcagctaagacacgtacccacagaagctctgcagaatttgcgaagccttcaatccctgcgtctggatgctaaccacatcagctatgtgcccccaagctgtttcagtggcctgcattccctgaggcacctgtggctggatgacaatgcgttaacagaaatccccgtccaggcttttagaagtttatcggcattgcaagccatgaccttggccctgaacaaaatacaccacataccagactatgcctttggaaacctctccagcttggtagttctacatctccataacaatagaatccactccctgggaaagaaatgctttgatgggctccacagcctagagactttagatttaaattacaataaccttgatgaattccccactgcaattaggacactctccaaccttaaagaactaggatttcatagcaacaatatcaggtcgatacctgagaaagcatttgtaggcaacccttctcttattacaatacatttctatgacaatcccatccagtttgttgggagatctgcttttcaacatttacctgaactaagaacactgactctgaatggtgcctcacaaataactgaatttcctgatttaactggaactgcaaacctggagagtctgactttaactggagcacagatctcatctcttcctcaaaccgtctgcaatcagttacctaatctccaagtgctagatctgtcttacaacctattagaagatttacccagtttttcagtctgccaaaagcttcagaaaattgacctaagacataatgaaatctacgaaattaaagttgacactttccagcagttgcttagcctccgatcgctgaatttggcttggaacaaaattgctattattcaccccaatgcattttccactttgccatccctaataaagctggacctatcgtccaacctcctgtcgtcttttcctataactgggttacatggtttaactcacttaaaattaacaggaaatcatgccttacagagcttgatatcatctgaaaactttccagaactcaaggttatagaaatgccttatgcttaccagtgctgtgcatttggagtgtgtgagaatgcctataagatttctaatcaatggaataaaggtgacaacagcagtatggacgaccttcataagaaagatgctggaatgtttcaggctcaagatgaacgtgaccttgaagatttcctgcttgactttgaggaagacctgaaagcccttcattcagtgcagtgttcaccttccccaggccccttcaaaccctgtgaacacctgcttgatggctggctgatcagaattggagtgtggaccatagcagttctggcacttacttgtaatgctttggtgacttcaacagttttcagatcccctctgtacatttcccccattaaactgttaattggggtcatcgcagcagtgaacatgctcacgggagtctccagtgccgtgctggctggtgtggatgcgttcacttttggcagctttgcacgacatggtgcctggtgggagaatggggttggttgccatgtcattggttttttgtccatttttgcttcagaatcatctgttttcctgcttactctggcagccctggagcgtgggttctctgtgaaatattctgcaaaatttgaaacgaaagctccattttctagcctgaaagtaatcattttgctctgtgccctgctggccttgaccatggccgcagttcccctgctgggtggcagcaagtatggcgcctcccctctctgcctgcctttgccttttggggagcccagcaccatgggctacatggtcgctctcatcttgctcaattccctttgcttcctcatgatgaccattgcctacaccaagctctactgcaatttggacaagggagacctggagaatatttgggactgctctatggtaaaacacattgccctgttgctcttcaccaactgcatcctaaactgccctgtggctttcttgtccttctcctctttaataaaccttacatttatcagtcctgaagtaattaagtttatccttctggtggtagtcccacttcctgcatgtctcaatccccttctctacatcttgttcaatcctcactttaaggaggatctggtgagcctgagaaagcaaacctacgtctggacaagatcaaaacacccaagcttgatgtcaattaactctgatgatgtcgaaaaacagtcctgtgactcaactcaagccttggtaacctttaccagctccagcatcacttatgacctgcctcccagttccgtgccatcaccagcttatccagtgactgagagctgccatctttcctctgtggcatttgtcccatgtctctaattaatatgtgaaggaaaatgttttcaaaggttgagaacctgaaaatgtgagattgagtatatcagagcagtaattaataagaagagctgaggtgaaactcggtttaaa

SEQ ID NO: 52 - DNA, 918 bp, Homo sapiens
atgcctggccacaatacctccaggaattcctcttgcgatcctatagtgacaccccacttaatcagcctctacttcatagtgcttattggcgggctggtgggtgtcatttccattcttttcctcctggtgaaaatgaacacccggtcagtgaccaccatggcggtcattaacttggtggtggtccacagcgtttttctgctgacagtgccatttcgcttgacctacctcatcaagaagacttggatgtttgggctgcccttctgcaaatttgtgagtgccatgctgcacatccacatgtacctcacgttcctattctatgtggtgatcctggtcaccagatacctcatcttcttcaagtgcaaagacaaagtggaattctacagaaaactgcatgctgtggctgccagtgctggcatgtggacgctggtgattgtcattgtggtacccctggttgtctcccggtatggaatccatgaggaatacaatgaggagcactgttttaaatttcacaaagagcttgcttacacatatgtgaaaatcatcaactatatgatagtcatttttgtcatagccgttgctgtgattctgttggtcttccaggtcttcatcattatgttgatggtgcagaagctacgccactctttactatcccaccaggagttctgggctcagctgaaaaacctattttttataggggtcatccttgtttgtttccttccctaccagttctttaggatctattacttgaatgttgtgacgcattccaatgcctgtaacagcaaggttgcattttataacgaaatcttcttgagtgtaacagcaattagctgctatgatttgcttctctttgtctttgggggaagccattggtttaagcaaaagataattggcttatggaattgtgttttgtgccgttag

SEQ ID NO: 53 - DNA, 1012 bp, Homo sapiens
ataaaggggtggcccgtagaagattccagcaccctcccctaactccaggccagactctaaaggggagatctggatggcatctacttcgtatgactattgcagagtgcccatggaagacggggataagcgctgtaagcttctgctggggataggaattctggtgctcctgatcatcgtgattctgggggtgcccttgattatcttcaccatcaaggccaacagcgaggcctgccgggacggccttcgggcagtgatggagtgtcgcaatgtcacccatctcctgcaacaagagctgaccgaggcccagaagggctttcaggatgtggaggcccaggccgccacctgcaaccacactgtgatggccctaatggcttccctggatgcagagaaggcccaaggacaaaagaaagtggaggagcttgagggagagatcactacattaaaccataagcttcaggacgcgtctgcagaggtggagcgactgagaagagaaaaccaggtcttaagcgtgagaatcgcggacaagaagtactaccccagctcccaggactccagctccgctgcggcgccccagctgctgattgtgctgctgggcctcagcgctctgctgcagtgagatcccaggaagctggcacatcttggaaggtccgtcctgctcggcttttcgcttgaacattcccttgatctcatcagttctgagcgggtcatggggcaacacggttagcggggagagcacggggtagccggagaagggcctctggagcaggtctggaggggccatggggaagtcctgggtgtggggacacagtcgggttgacccagggctgtctccctccagagcctccctccggacaatgagtcccccctcttgtctcccaccctgagattgggcatggggtgcggtgtggggggcatgtgctgcctgttgttatgggttttttttgcggggggggttgcttttttctggggtctttgagctccaaaaaataaacacttcctttgagggagagca

SEQ ID NO: 54 - DNA, 3280 bp, Homo sapiens
atgaagccaggagcgcctcaaagtccagcctgctgttgaccaacactaacagatgagcaaggagctggcagcaatggggcctggagcttcaggggacggggtcaggactgagacagctccacacatagcactggactccagagttggtctgcacgcctacgacatcagcgtggtggtcatctactttgtcttcgtcattgctgtggggatctggtcgtccatccgtgcaagtcgagggaccattggcggctatttcctggccgggaggtccatgagctggtggccaattggagcatctctgatgtccagcaatgtgggcagtggcttgttcatcggcctggctgggacaggggctgccggaggccttgccgtaggtggcttcgagtggaacatgaggaaatcaaggtctggaggagacagagggatccatccaaggtcacacgggaggactggggtcaggtcccaggcaacctggctgctcctggcccttggctgggtcttcgtccctgtgtacatcgcagcaggtgtggtcacaatgccgcagtatctgaagaagcgatttgggggccagaggatccaggtgtacatgtctgtcctgtctctcatcctctacatcttcaccaagatctcgactgacatcttctctggagccctcttcatccagatggcattgggctggaacctgtacctctccacagggatcctgctggtggtgactgccgtctacaccattgcaggtggcctcatggccgtgatctacacagatgctctgcagacggtgatcatggtagggggagccctggtcctcatgtttctgggctttcaggacgtgggctggtacccaggcctggagcagcggtacaggcaggccatccctaatgtcacagtccccaacaccacctgtcacctcccacggcccgatgctttccacattcttcgggaccctgtgagcggggacatcccttggccaggtctcattttcgggctcacagtgctggccacctggtgttggtgcacagaccaggtcattgtgcagcggtctctctcggccaagagtctgtctcatgccaagggaggctccgtgctggggggctacctgaagatcctccccatgttcttcatcgtcatgcctggcatgatcagccgggccctgttcccagacgaggtgggctgcgtggaccctgatgtctgccaaagaatctgtggggcccgagtgggatgttccaacattgcctaccctaagttggtcatggccctcatgcctgttggtctgcgggggctgatgattgccgtgatcatggccgctctcatgagctcactcacctccatcttcaacagcagcagcaccctgttcaccattgatgtgtggcagcgcttccgcaggaagtcaacagagcaggagctgatggtggtgggcagagtgtttgtggtgttcctggttgtcatcagcatcctctggatccccatcatccaaagctccaacagtgggcagctcttcgactacatccaggctgtcaccagttacctggccccacccatcaccgctctcttcctgctggccatcttctgcaagagggtcacagagcccggagctttctggggcctcgtgtttggcctgggagtggggcttctgcgtatgatcctggagttctcatacccagcgccagcctgtggggaggtggaccggaggccagcagtgctgaaggacttccactacctgtactttgcaatcctcctctgcgggctcactgccatcgtcattgtcattgtcagcctctgtacaactcccatccctgaggaacaggcaagtctcacacgcctcacatggtggactcggaactgccccctctctgagctggagaaggaggcccacgagagcacaccggagatatccgagaggccagccggggagtgccctgcaggaggtggagcggcagagaactcgagcctgggccaggagcagcctgaagccccaagcaggtcctggggaaagttgctctggagctggttctgtgggctctctggaacaccggagcaggccctgagcccagcagagaaggctgcgctagaacagaagctgacaagcattgaggaggagccactctggagacatgtctgcaacatcaatgctgtccttttgctggccatcaacatcttcctctggggctattttgcgtgattccacagacctggcttcagtgtagacagattaaacaaagcccaagcctgtcagccacagaaacaggctctcctcttactttgctgtctaaactggagatcacagaagtcaagactgcaagctcccctgaagagaatccaactcaacctgcacacttgacaagtggagaaacagaagcccagagagagcactgggtttgttcaggaccacccagaaggtgtcacacggggtttccccactctttctgatatattgccttacagacctacctcaaacacactgtttccaccctcttcttgaatgtattcagtagcctttactgaatgtgtgtcttgagagtagaaaaatggaggatacaagaaaaggagcaggaagaaatttgcaaaaatccaagagcacctttgctcccccttatcctccttcctcttcccctttctagttcccctacctctctatctttctattctcaccaataatctctttgttgcatgaatttacccaggagagtcctatatttccattggtggctccacagtggtggctgtcagacccgaaggggtggggagccaagggtggactttaagcatggtgacagatggtattttgggcagaaagctcttagacaatggactatccaaagcactatttaaattctgcctcttcctactctctaacccaaatatgcacaaactctctatggccttgagaagcagttggagagacatgacttgttaaaacctcaaggaatcaagacatgttactctgtatttaagggtaagccccacagcgggcagcacaaacagcctgggagccactgtgcctgtgcttctctgtccttctccctttgcttgccatgaatccgcataccttggaatacactgtgaccccagttaagtgtcccttcgccaggaagctgccgcaacgtccagacctgggtcaagttcccactcctgctcccatagccttgacctgcttctgtcacagcactgatcacactgagatggaagactccagggggcaaggaccaagggccatatcccaagtgactttgtacccagaaaataacagctgttcaataaatgtgtattgagttaattagtt

SEQ ID NO: 55 - DNA, 3070 bp, Homo sapiens
acttttttcatgttctccttgagtgaaggatgaggaaattgaaagcagagtatgcaccttttattaggagattcaaactgcatcctactggattagcctcaaaagtcctaaaatacaaagacatccatctgacagatcactgaggggaggacttgtttttctgttttagaatagtttccgattaaactttttagctcaagaagaaaagaagctagttatttctcacccaggagtggatttgtggtttggcttcaccatggcttcctgccgtgcctggaaccttagggtgctggtggctgtcgtgtgtggactactgactggcatcattttgggactgggcatctggaggattgtgatcaggatccaaagaggaaaatctacttcctcatcaagcacccctacagagttctgcaggaatggtggaacctgggaaaatggcagatgtatttgtacagaagagtggaaaggactgagatgtacaattgctaatttttgtgaaaatagtacctatatgggttttacttttgccagaatcccagtgggcagatatggaccatccttgcaaacatgtggcaaggatactccaaatgcgggcaatccaatggcagtccggttgtgcagtctctctctatatggagagatagaattacaaaaagtgacaataggaaattgcaatgaaaatctggaaaccctggaaaagcaggtaaaggatgtcacagcaccacttaataacatttcttctgaagtccagattttaacatctgatgccaataaattaactgctgagaacatcactagtgctacgcgagtggttggacagatattcaacacttccagaaatgcttcacctgaggcaaagaaagttgccatagtaacagtgagtcaactcctagatgccagtgaagatgcttttcaaagagttgctgctactgctaatgatgatgcccttacaacgcttattgagcaaatggagacttattccttgtctttgggtaatcaatcagtggtggaacctaacatagcaatacagtcagcaaatttctcttcagaaaatgcggtggggccttcaaatgttcgcttctctgtgcagaaaggagctagcagttctctagtttctagttcaacatttatacatacaaatgtggatggccttaacccagatgcacagactgagcttcaggtcttgcttaatatgacgaaaaattacaccaagacatgcggctttgtagtttatcaaaatgacaagcttttccaatcaaaaacttttacagctaaatcggattttagtcaaaaaattatctcaagcaaaactgatgaaaatgagcaagatcagagtgcttctgttgacatggtctttagtccaaagtacaaccaaaaagaatttcaactctattcctatgcctgtgtctattggaatttgtcagcgaaggactgggacacatatggctgtcaaaaagacaagggcactgatggattcctgcgctgccgctgcaaccatactactaattttgctgtattaatgactttcaaaaaggattatcaatatcccaaatcacttgacatattatccaacgttggatgtgcactgtctgttactggtctggctctcacagttatatttcagattgtcaccaggaaagtcagaaaaacctcagtaacctgggttttggtcaatctgtgcatatcaatgttgattttcaacctcctctttgtgtttggaattgaaaactccaataagaacttgcagacaagtgatggtgacatcaataatattgactttgacaataatgacatacccaggacagacaccattaacatcccgaatcccatgtgcactgcgattgccgccttactgcactattttctgttagtgacatttacctggaacgcactcagcgctgcacagctctattaccttctaataaggaccatgaagcctcttcctcggcatttcattcttttcatctcattaattggatggggagtcccagctatagtagtggctataacagtgggagttatttattctcagaatggaaataatccacagtgggaattagactaccggcaagagaaaatctgctggctggcaattccagaacccaatggtgttataaaaagtccgctgttgtggtcattcatcgtacctgtaaccattatcctcatcagcaatgttgttatgtttattacaatctcgatcaaagtgctgtggaagaataaccagaacctgacaagcacaaaaaaagtttcatccatgaagaagattgttagcacattatctgttgcagttgtttttggaattacctggattctagcatacctgatgctagttaatgatgatagcatcaggatcgtcttcagctacatattctgccttttcaacactacacagggattgcaaatttttatcctgtacactgttagaacaaaagtcttccagagtgaagcttccaaagtgttgatgttgctatcgtctattgggagaaggaagtcattgccttcagtgacgcggccgaggctgcgtgtaaagatgtataatttcctcaggtcattgccaaccttacatgaacgctttaggctactggaaacctctccgagtactgaggaaatcacactctctgaaagtgacaatgcaaaggaaagcatctagacagtaaaacttacctgttgtggtctttttaatcacctcgtttgagttttatctgtttctctcctttatttcccagtcctctcagaaagtcttcctcaatgtattttgctcaggattaagaattagataaaacctgttgtttattattattcggcataatggacttggtagtttttctatttttcaatagatttgtacttgaataaggtgaagaatttcacacaacatacaagagtaccattgttccttatatcgttaaatctttgtgacacactttgacaaaaatgtagaacctataacaaattcttttacaagttactataaaggacacaaagagaaaactttaccttccagaacaaaatgactcctgatgaacagtgtgtggggatttgcttgtatgtattaaacttttgacctctg

SEQ ID NO: 56 - DNA, 2547 bp, Homo sapiens
gggaggagaagcctgggtgccccccactgataagcaggctccacccagaggccagtcctgtgtgtctggggacaaggcgaaagagcagcagaagtgccccttctccaggatcaaggaactggggcggggggtgtttcctggaccccagtcctccgaatcagctcctagagtggaaccaggaaggattctggagccacagaagatagacagatggaaggtggggaccaaagtgaggaagagccgagggaacgcagccaggcaggtggaatgggaactctctggagccaagagagcactccagaagagaggctgcccgtggaagggagcaggccatgggcagtggccaggcgggtgctgacagctatcctgattttgggcctgctcctttgtttttctgtgcttttgttctacaacttccagaactgtggccctcgcccctgtgagacatctgtgtgtttggatctccgggatcattacctggcctctgggaacacaagtgtggccccctgcaccgacttcttcagctttgcctgtggaagggccaaagagaccaataattcttttcaggagcttgccacaaagaacaaaaaccgacttcggagaatactggaggtccagaattcctggcacccaggctctggggaggagaaagccttccagttctacaactcctgcatggatacacttgccattgaagctgcagggactggtcccctcagacaagttattgaggagcttggaggctggcgcatctctggtaaatggacttccttaaactttaaccgaacgctgagacttctgatgagtcagtatggccatttccctttcttcagagcctacctaggacctcatcctgcctctccacacacaccagtcatccagatagaccagccagagtttgatgttcccctcaagcaagatcaagaacagaagatctatgcccagatctttcgggaatacctgacttacctgaatcagctgggaaccttgctgggaggagacccaagcaaggtgcaagaacactcttccttgtcaatctccatcacttcacggctgttccagtttctgaggcccctggagcagcggcgggcacagggcaagctcttccagatggtcactatcgaccagctcaaggaaatggcccccgccatcgactggttgtcctgcttgcaagcgacattcacaccgatgtccctgagcccttctcagtccctcgtggtccatgacgtggaatatttgaaaaacatgtcacaactggtggaggagatgctgctaaagcagagggactttctgcagagccacatgatcttagggctggtggtgaccctttctccagccctggacagtcaattccaggaggcacgcagaaagctcagccagaaactgcgggaactgacagagcaaccacccatgcctgcccgcccacgatggatgaagtgcgtggaggagacaggcacgttcttcgagcccacgctggcggctttgtttgttcgtgaggcctttggcccgagcacccgaagtgctgccatgaaattattcactgcgatccgggatgccctcatcactcgcctcagaaaccttccctggatgaatgaggagacccagaacatggcccaggacaaggttgctcaactgcaggtggagatgggggcttcagaatgggccctgaagccagagctggcccgacaagaatacaacgatatacagcttggatcgagcttcctgcagtctgtcctgagctgtgtccggtccctccgagctagaattgtccagagcttcttgcagcctcacccccaacacaggtggaaggtgtccccttgggacgtcaatgcttactattcggtatctgaccatgtggtagtctttccagctggactcctccaacccccattcttccaccctggctatcccagagccgtgaactttggcgctgctggcagcatcatggcccacgagctgttgcacatcttctaccagctcttactgcctgggggctgcctcgcctgtgacaaccatgccctccaggaagctcacctgtgcctgaagcgccattatgctgcctttccattacctagcagaacctccttcaatgactccctcacattcttagagaatgctgcagacgttggggggctagccatcgcgctgcaggcatacagcaagaggctgttacggcaccatggggagactgtcctgcccagcctggacctcagcccccagcagatcttctttcgaagctatgcccaggtgatgtgtaggaagcccagcccccaggactctcacgacactcacagccctccacacctccgagtccacgggcccctcagcagcaccccagcctttgccaggtatttccgctgtgcacgtggtgctctcttgaacccctccagccgctgccagctctggtaacttggttaccaaagatgccacagcacagaaatatcgaccaacacctccctggtcacatccatggaatcagagcaagatttcctttctgcttctgttccaaaaataaaagctggcacttggcttccgcttgtctcttaa

SEQ ID NO: 57 - DNA, 4143 bp, Homo sapiens
agccgacgctgctcaagctgcaactctgttgcagttggcagttcttttcggtttccctcctgctgtttgggggcatgaaagggcttcgccgccgggagtaaaagaaggaattgaccgggcagcgcgagggaggagcgcgcacgcgaccgcgagggcgggcgtgcaccctcggctggaagtttgtgccgggccccgagcgcgcgccggctgggagcttcgggtagagacctaggccgctggaccgcgatgagcgcgccgagcctccgtgcgcgcgccgcggggttggggctgctgctgtgcgcggtgctggggcgcgctggccggtcagacagcggcggtcgcggggaactcgggcagccctctggggtagccgccgagcgcccatgccccactacctgccgctgcctcggggacctgctggactgcagtcgtaagcggctagcgcgtcttcccgagccactcccgtcctgggtcgctcggctgtaactgaagtcaggcttttcatttgggaagccccctcaacagaattcggtcattctccaagttatggtggacgtacttctgttgttctccctctgcttgctttttcacattagcagaccggacttaagtcacaacagattatctttcatcaaggcaagttccatgagccaccttcaaagccttcgagaagtgaaactgaacaacaatgaattggagaccattccaaatctgggaccagtctcggcaaatattacacttctctccttggctggaaacaggattgttgaaatactccctgaacatctgaaagagtttcagtcccttgaaactttggaccttagcagcaacaatatttcagagctccaaactgcatttccagccctacagctcaaatatctgtatctcaacagcaaccgagtcacatcaatggaacctgggtattttgacaatttggccaacacactccttgtgttaaagctgaacaggaaccgaatctcagctatcccacccaagatgtttaaactgccccaactgcaacatctcgaattgaaccgaaacaagattaaaaatgtagatggactgacattccaaggccttggtgctctgaagtctctgaaaatgcaaagaaatggagtaacgaaacttatggatggagctttttgggggctgagcaacatggaaattttgcagctggaccataacaacctaacagagattaccaaaggctggctttacggcttgctgatgctgcaggaacttcatctcagccaaaatgccatcaacaggatcagccctgatgcctgggagttctgccagaagctcagtgagctggacctaactttcaatcacttatcaaggttagatgattcaagcttccttggcctaagcttactaaatacactgcacattgggaacaacagagtcagctacattgctgattgtgccttccgggggctttccagtttaaagactttggatctgaagaacaatgaaatttcctggactattgaagacatgaatggtgctttctctgggcttgacaaactgaggcgactgatactccaaggaaatcggatccgttctattactaaaaaagccttcactggtttggatgcattggagcatctagacctgagtgacaacgcaatcatgtctttacaaggcaatgcattttcacaaatgaagaaactgcaacaattgcatttaaatacatcaagccttttgtgcgattgccagctaaaatggctcccacagtgggtggcggaaaacaactttcagagctttgtaaatgccagttgtgcccatcctcagctgctaaaaggaagaagcatttttgctgttagcccagatggctttgtgtgtgatgattttcccaaaccccagatcacggttcagccagaaacacagtcggcaataaaaggttccaatttgagtttcatctgctcagctgccagcagcagtgattccccaatgacttttgcttggaaaaaagacaatgaactactgcatgatgctgaaatggaaaattatgcacacctccgggcccaaggtggcgaggtgatggagtataccaccatccttcggctgcgcgaggtggaatttgccagtgaggggaaatatcagtgtgtcatctccaatcactttggttcatcctactctgtcaaagccaagcttacagtaaatatgcttccctcattcaccaagacccccatggatctcaccatccgagctggggccatggcacgcttggagtgtgctgctgtggggcacccagccccccagatagcctggcagaaggatgggggcacagacttcccagctgcacgggagagacgcatgcatgtgatgcccgaggatgacgtgttctttatcgtggatgtgaagatagaggacattggggtatacagctgcacagctcagaacagtgcaggaagtatttcagcaaatgcaactctgactgtcctagaaacaccatcatttttgcggccactgttggaccgaactgtaaccaagggagaaacagccgtcctacagtgcattgctggaggaagccctccccctaaactgaactggaccaaagatgatagcccattggtggtaaccgagaggcacttttttgcagcaggcaatcagcttctgattattgtggactcagatgtcagtgatgctgggaaatacacatgtgagatgtctaacacccttggcactgagagaggaaacgtgcgcctcagtgtgatccccactccaacctgcgactcccctcagatgacagccccatcgttagacgatgacggatgggccactgtgggtgtcgtgatcatagccgtggtttgctgtgtggtgggcacgtcactcgtgtgggtggtcatcatataccacacaaggcggaggaatgaagattgcagcattaccaacacagatgagaccaacttgccagcagatattcctagttatttgtcatctcagggaacgttagctgacaggcaggatgggtacgtgtcttcagaaagtggaagccaccaccagtttgtcacatcttcaggtgctggatttttcttaccacaacatgacagtagtgggacctgccatattgacaatagcagtgaagctgatgtggaagctgccacagatctgttcctttgtccgtttttgggatccacaggccctatgtatttgaagggaaatgtgtatggctcagatccttttgaaacatatcatacaggttgcagtcctgacccaagaacagttttaatggaccactatgagcccagttacataaagaaaaaggagtgctacccatgttctcatccttcagaagaatcctgcgaacggagcttcagtaatatatcgtggccttcacatgtgaggaagctacttaacactagttactctcacaatgaaggacctggaatgaaaaatctgtgtctaaacaagtcctctttagattttagtgcaaatccagagccagcgtcggttgcctcgagtaattctttcatgggtacctttggaaaagctctcaggagacctcacctagatgcctattcaagctttggacagccatcagattgtcagccaagagccttttatttgaaagctcattcttccccagacttggactctgggtcagaggaagatgggaaagaaaggacagattttcaggaagaaaatcacatttgtacctttaaacagactttagaaaactacaggactccaaattttcagtcttatgacttggacacatagactgaatgagaccaaaggaaaagcttaacatactacctcaagtgaacttttatttaaaagagagagaatcttatgttttttaaatggagttatgaattttaaaaggataaaaatgctttatttatacagatgaaccaaaattacaaaaagttatgaaaatttttatactgggaatgatgctcatataagaatacctttttaaactattttttaactttgttttatgcaaaaaagtatcttacgtaaattaatgatataaatcatgattattttatgtatttttataatgccagatttctttttatggaaaatgagttactaaagcattttaaataatacctgccttgtaccattttttaaatagaagttacttcattatattttgcacattatatttaataaaatgtgtcaatttga

SEQ ID NO: 58 - DNA, 1713 bp, Homo sapiens
acttcctgagccgggctggctgggtgggaacaggctccttgccgcctccccagcgctggccactaccacactgccgcccgcctgggcctcctttcaacctcgtggtggagccctgcggtttcccagcggagccgggcccggggctgctccctcgcgggcgaggctcacctgtcccggcccggccccctcccgcgccccaggtggttcagggcagggaggagccgcgccccgccccgcgcggtagcagccaacgccggccccaggcgggtgcgctgggagcctgggccgggagccgggtgagggcgccgagaggctcggtgggcgcgggcggcgagctctgctggagcaggacttcagagtgtttgttttcagcctgcttttaaagtgatttgaagagagtggctttgaagattatcgcggaacacctgcccattaatcttgaccctgttaaaacaataactgcctatccagatatgccacacttctgcctgctgttggcaaccctcctggactaggctgctcttgttaatcacatggatgttgctgattactctgagtgcaaaccttttcactgttccagagaggagcctgacaaccacattctccttctcaagatataagagttcggaccgcccagcacacaaggtcagcatgctgctcctctgtcacgctctcgctatagctgttgtccagatcgttatcttctcagaaagctgggcatttgccaagaacatcaacttctataatgtgaggcctcctctcgaccctacaccatttccaaatagcttcaagtgctttacttgtgaaaacgcaggggataattataactgcaatcgatgggcagaagacaaatggtgtccacaaaatacacagtactgtttgacagttcatcacttcaccagccacggaagaagcacatccatcaccaaaaagtgtgcctccagaagtgaatgtcattttgtcggttgccaccacagccgagattctgaacatacggagtgtaggtcttgctgtgaaggaatgatctgcaatgtagaattacccaccaatcacactaatgcagtgtttgccgtaatgcacgctcagagaacatctggcagcagtgcccccacactctacctaccagtgcttgcctgggtctttgtgcttccattgctgtgatgccaccattcctaggagaggcagagaccagcctctaaagcacaagccaaaaactgtgtgaacggtgaactttggagtgaagatcaatcttgcacttggtgaagagtgcacattggacctcaaggcgaaagccagtggtttgcttggataaaatgttcccgcatgaggccacaggactgaggatgggaatttggcagggcctgagaagatggtctgacttccaggcttcctggtcaaagagagctacgtttgggcagttctgcagagaggatcctggcaactagtcccacctgactaggcctttagctgaaaggatttcttgacctccttgactgcctcagaggctgccaggtcaaaccctcttgtttatgtgattagctcagagcatctctatgaaatctaacccttcccctcatgagaaagcagttttccccaccaacagcatagtcaatgagaaaggcaactgtacgaagaaaacttccagtggaactaatatgaaatctatttgcaaattatggggggaaataaagcttttaaattatacaatgtaaa

SEQ ID NO: 59 - DNA, 2383 bp, Homo sapiens
gtgtggagcttctgagatctgtggaggtttttctctgcaaatgcaggaagaaatcaggtggatggatgcataattatggccctgctcctggtctctttgctggcattcctgagcttgggctcaggatgtcatcatcggatctgtcactgctctaacagggtttttctctgccaagagagcaaggtgacagagattccttctgacctcccgaggaatgccattgaactgaggtttgtcctcaccaagcttcgagtcatccaaaaaggtgcattttcaggatttggggacctggagaaaatagagatctctcagaatgatgtcttggaggtgatagaggcagatgtgttctccaaccttcccaaattacatgaaattagaattgaaaaggccaacaacctgctctacatcaaccctgaggccttccagaaccttcccaaccttcaatatctgttaatatccaacacaggtattaagcaccttccagatgttcacaagattcattctctccaaaaagttttacttgacattcaagataacataaacatccacacaattgaaagaaattctttcgtggggctgagctttgaaagtgtgattctatggctgaataagaatgggattcaagaaatacacaactgtgcattcaatggaacccaactagatgagctgaatctaagcgataataataatttagaagaattgcctaatgatgttttccacggagcctctggaccagtcattctagatatttcaagaacaaggatccattccctgcctagctatggcttagaaaatcttaagaagctgagggccaggtcgacttacaacttaaaaaagctgcctactctggaaaagcttgtcgccctcatggaagccagcctcacctatcccagccattgctgtgcctttgcaaactggagacggcaaatctctgagcttcatccaatttgcaacaaatctattttaaggcaagaagttgattatatgactcaggctaggggtcagagatcctctctggcagaagacaatgagtccagctacagcagaggatttgacatgacgtacactgagtttgactatgacttatgcaatgaagtggttgacgtgacctgctcccctaagccagatgcattcaacccatgtgaagatatcatggggtacaacatcctcagagtcctgatatggtttatcagcatcctggccatcactgggaacatcatagtgctagtgatcctaactaccagccaatataaactcacagtccccaggttccttatgtgcaacctggcctttgctgatctctgcattggaatctacctgctgctcattgcatcagttgatatccataccaagagccaatatcacaactatgccattgactggcaaactggggcaggctgtgatgctgctggctttttcactgtctttgccagtgagctgtcagtctacactctgacagctatcaccttggaaagatggcataccatcacgcatgccatgcagctggactgcaaggtgcagctccgccatgctgccagtgtcatggtgatgggctggatttttgcttttgcagctgccctctttcccatctttggcatcagcagctacatgaaggtgagcatctgcctgcccatggatattgacagccctttgtcacagctgtatgtcatgtccctccttgtgctcaatgtcctggcctttgtggtcatctgtggctgctatatccacatctacctcacagtgcggaaccccaacatcgtgtcctcctctagtgacaccaggatcgccaagcgcatggccatgctcatcttcactgacttcctctgcatggcacccatttctttctttgccatttctgcctccctcaaggtgcccctcatcactgtgtccaaagcaaagattctgctggttctgtttcaccccatcaactcctgtgccaaccccttcctctatgccatctttaccaaaaactttcgcagagatttcttcattctgctgagcaagtgtggctgctatgaaatgcaagcccaaatttataggacagaaacttcatccactgtccacaacacccatccaaggaatggccactgctcttcagctcccagagtcaccagtggttccacttacatacttgtccctctaagtcatttagcccaaaactaaaacacaatgtgaaaatgtatctgagtattgaatgataattcagtcttgcctttgaagggtatgtcacaaagagctgacagtgcttctacacatttcatctaatttaatattcctggcatacctttaaggtaaattggtcaggaactattaattccatgtgatacattaggaagctgaattattagtaacaacaataataattaaagaatgcaatactgta

SEQ ID NO: 60 - DNA, 10079 bp, Homo sapiens
ctctctcccagaacgtgtctctgctgcaaggcaccgggccctttcgctctgcagaactgcacttgcaagaccattatcaactcctaatcccagctcagaaagggagcctctgcgactcattcatcgccctccaggactgactgcattgcacagatgatggatatttacgtatgtttgaaacgaccatcctggatggtggacaataaaagaatgaggactgcttcaaatttccagtggctgttatcaacatttattcttctatatctaatgaatcaagtaaatagccagaaaaagggggctcctcatgatttgaagtgtgtaactaacaatttgcaagtgtggaactgttcttggaaagcaccctctggaacaggccgtggtactgattatgaagtttgcattgaaaacaggtcccgttcttgttatcagttggagaaaaccagtattaaaattccagctctttcacatggtgattatgaaataacaataaattctctacatgattttggaagttctacaagtaaattcacactaaatgaacaaaacgtttccttaattccagatactccagagatcttgaatttgtctgctgatttctcaacctctacattatacctaaagtggaacgacaggggttcagtttttccacaccgctcaaatgttatctgggaaattaaagttctacgtaaagagagtatggagctcgtaaaattagtgacccacaacacaactctgaatggcaaagatacacttcatcactggagttgggcctcagatatgcccttggaatgtgccattcattttgtggaaattagatgctacattgacaatcttcatttttctggtctcgaagagtggagtgactggagccctgtgaagaacatttcttggatacctgattctcagactaaggtttttcctcaagataaagtgatacttgtaggctcagacataacattttgttgtgtgagtcaagaaaaagtgttatcagcactgattggccatacaaactgccccttgatccatcttgatggggaaaatgttgcaatcaagattcgtaatatttctgtttctgcaagtagtggaacaaatgtagtttttacaaccgaagataacatatttggaaccgttatttttgctggatatccaccagatactcctcaacaactgaattgtgagacacatgatttaaaagaaattatatgtagttggaatccaggaagggtgacagcgttggtgggcccacgtgctacaagctacactttagttgaaagtttttcaggaaaatatgttagacttaaaagagctgaagcacctacaaacgaaagctatcaattattatttcaaatgcttccaaatcaagaaatatataattttactttgaatgctcacaatccgctgggtcgatcacaatcaacaattttagttaatataactgaaaaagtttatccccatactcctacttcattcaaagtgaaggatattaattcaacagctgttaaactttcttggcatttaccaggcaactttgcaaagattaattttttatgtgaaattgaaattaagaaatctaattcagtacaagagcagcggaatgtcacaatcaaaggagtagaaaattcaagttatcttgttgctctggacaagttaaatccatacactctatatacttttcggattcgttgttctactgaaactttctggaaatggagcaaatggagcaataaaaaacaacatttaacaacagaagccagtccttcaaaggggcctgatacttggagagagtggagttctgatggaaaaaatttaataatctattggaagcctttacccattaatgaagctaatggaaaaatactttcctacaatgtatcgtgttcatcagatgaggaaacacagtccctttctgaaatccctgatcctcagcacaaagcagagatacgacttgataagaatgactacatcatcagcgtagtggctaaaaattctgtgggctcatcaccaccttccaaaatagcgagtatggaaattccaaatgatgatctcaaaatagaacaagttgttgggatgggaaaggggattctcctcacctggcattacgaccccaacatgacttgcgactacgtcattaagtggtgtaactcgtctcggtcggaaccatgccttatggactggagaaaagttccctcaaacagcactgaaactgtaatagaatctgatgagtttcgaccaggtataagatataattttttcctgtatggatgcagaaatcaaggatatcaattattacgctccatgattggatatatagaagaattggctcccattgttgcaccaaattttactgttgaggatacttctgcagattcgatattagtaaaatgggaagacattcctgtggaagaacttagaggctttttaagaggatatttgttttactttggaaaaggagaaagagacacatctaagatgagggttttagaatcaggtcgttctgacataaaagttaagaatattactgacatatcccagaagacactgagaattgctgatcttcaaggtaaaacaagttaccacctggtcttgcgagcctatacagatggtggagtgggcccggagaagagtatgtatgtggtgacaaaggaaaattctgtgggattaattattgccattctcatcccagtggcagtggctgtcattgttggagtggtgacaagtatcctttgctatcggaaacgagaatggattaaagaaaccttctaccctgatattccaaatccagaaaactgtaaagcattacagtttcaaaagagtgtctgtgagggaagcagtgctcttaaaacattggaaatgaatccttgtaccccaaataatgttgaggttctggaaactcgatcagcatttcctaaaatagaagatacagaaataatttccccagtagctgagcgtcctgaagatcgctctgatgcagagcctgaaaaccatgtggttgtgtcctattgtccacccatcattgaggaagaaataccaaacccagccgcagatgaagctggagggactgcacaggttatttacattgatgttcagtcgatgtatcagcctcaagcaaaaccagaagaagaacaagaaaatgaccctgtaggaggggcaggctataagccacagatgcacctccccattaattctactgtggaagatatagctgcagaagaggacttagataaaactgcgggttacagacctcaggccaatgtaaatacatggaatttagtgtctccagactctcctagatccatagacagcaacagtgagattgtctcatttggaagtccatgctccattaattcccgacaatttttgattcctcctaaagatgaagactctcctaaatctaatggaggagggtggtcctttacaaacttttttcagaacaaaccaaacgattaacagtgtcaccgtgtcacttcagtcagccatctcaataagctcttactgctagtgttgctacatcagcactgggcattcttggagggatcctgtgaagtattgttaggaggtgaacttcactacatgttaagttacactgaaagtgttcatgtgcttttaatgtagtctaaaagccaaagtatagtgactcagaatcctcaatccacaaaactcaagattgggagctctttgtgatcaagccaaagaattctcatgtactctaccttcaagaagcatttcaaggctaatacctacttgtacgtacatgtaaaacaaatcccgccgcaactgttttctgttctgttgtttgtggttttctcatgtgtatacttggtggaattgtaagtggatttgcaggccagggagaaaatgtccaagtaacaggtgaagtttatttgcctgacgtttactcctttctagatgaaaaccaagcacagattttaaaacttctaagattattctcctctatccacagcattcacaaaaattaatataatttttaatgtagtgacagcgatttagtgttttgtttgataaagtatgcttatttctgtgcctactgtataatggttatcaaacagttgtctcaggggtacaaactttgaaaacaagtgtgacactgaccagcccaaatcataatcatgttttcttgctgtgataggttttgcaagccttttcattattttttagcttttatgcttgcttccattatttcagttggttgccctaatatttaaaatttacacttctaagactagagacccacattttttaaaaatcattttattttgtgatacagtgacagctttatatgagcaaattcaatattattcataagcatgtaattccagtgacttactatgtgagatgactactaagcaatatctagcagcgttagctgtccatatagttctgattggatttcgttcctcctgaggagaccatgccgttgagcttggctacccaggcagtggtgatctttgacaccttctggtggatgttcctcccactcatgagtcttttcatcatgccacattatctgatccagtcctcacatttttaaatataaaactaaagagagaatgcttcttacaggaacagttacccaagggctgtttcttagtaactgtcataaactgatctgaatccatgggcatacctgtgttgcaggtgcagcaattgcttggtgagctgtgcagaattgattgccttcagcacagcatcctctgcccacccttgtttctcataagcgatgtctggagtgattgtggttcttggaaaagcagaaggaaaaactaaaaagtgtatcttgtattttccctgccctcaggttgcctatgtattttaccttttcatatttaaggcaaaagtacttgaaaattttaagtgtccgaataagatatgtcttttttgtttgttttttttggttgtttgtttgttttttatcatctgagattctgtaatgtatttgcaaataatggatcaattaattttttttgaagctcatattgtatctttttaaaaaccatgttgtggaaaaaagccagagtgacaagtgacaaaatctatttaggttctctgtgtatgaatcctgattttaactgctaggattcagctaaatttctgagctttatgatctgtggaaatttggaatgaaatgcaattcattttgtacatacatagtatattaaaactatataatagttcatagaaatgttcagtaatgaaaaatatatccaatcagagccatccctaaagagtgttctcttgtcttcctttgtatcctctttggctccttcccttagcttccaccccagacatcagacctggggctgccttctctccctgccaaagcttgctgttagcattgtctgcttgccctcaactcctgccttgttccctgttgaaatgtatcaatcccgtactttatctctccaggacaaggataagtgtggctacagtaaaagtttattgctctaaacggcgctaacctgagataatgagaaaaggccagaagagattgtttgatctctgtctgtcaatatatatgcatttcaactgtgaccatctggatccagggccctttctaacctatataacgactcatttgtttggttaatgatgaatatcactggggctcttaagtcctttcgttctatccaagacttcattgtttttttctgtatgaaaaaagtgcagaatatcactcacctttcccctacttttggatcccctacacgaggatcactagcttaatgagaagcagagtaacgctattaagtctgggcaagctccttataagttgctgtgtgcttaaaagaatgtgatttatgtctggggccaaagcagttttccttcttttccctcattgaattcaagacagctagacccttgtgtagatcccaggatattacctctactccccccaacctgtgtgtgtagggagagtaacaacacgggaagaggggagggaagttggaaggagattggtcacatgttcagttgtctgagatactggtaaatgtgcgctgtttgtcaatgaaggttgcatgcctgcatttacaaggtggtctcatactgattgtgctctgtccagttagattcgtggcttctcccttggaagctacaattaaggactagttagaagcagaggctagatgtgttctctccagcccttactaactgggaaaataattgagaaatccctcttttcctcagtgaaagcccagtcattggttagaaaaatctaattgtcaaactagcattatgttccatcatatctgtgggatagtaattcatgtaagacacatttttacctctcttacaagtcaattcacttacaagccagtttcaaatcaagcttcccttgcgaggaatggagatcattatggggcttattatgactacatttcttttatgagtgaccattttaaataattaatattttatttaatattaaattattaaagacttagctagacttttaacattagatgaaccttgtgaatcatatattgcatagattagcacatgtatgcaatctaggtcatcaatttgttgaatttatacagccctagatttgagattgtggccctgagtatctggatagttgagttgtgtgtttatgtgcttatatgatagaggtgctttgttcctgcagcttagaaacagaagcagccattcactgagaagcttaagagaggaagtatcaacctcattttccaaaccagcattactttcaccgctcgtggatctgaaagattacatttagaacatttagtactattacactctcagaaactgtggtaaaaagtcacattttcaaaacttcatgcatattgtattcttgttggaaataagtcctatagtttcttaattgtcttcatgccgtccatatttaacaaacattgcaagtcctttttatatttgggtaattatttgtaatttagtgaaggagactaggggatgttttcttccaaagggaatttaaaatcaattttatggtattttgaaagtaaaatactccttaacgtgtcaatatttttaaaatgttatctcgaagttttctattgctcaggtatataatctaataaaattttttgtttgctctaaggttatttttgctattctctattttgaattatgttaaaatttgtgtgcattttatgaaatgccttttttcttattttgaaagtgtaaaattgggcatctcagagtaaaatgtgggattattagctacaaagactaggcacatcgtgaaagctcagtaactaattttcttgactgagtcctatcccagagtgtcacagattcaacagaattttcctgaagggtgatacacaccaaaatctagcttgtgtggatctgagactattgactcaaagattcaaatctacttcggaagtgactccacggtttgagtgaaaactgaggaaggactcatgcctgtatatcactagatatcttatttctccataattttaagtgttcataatttcttcttctttgatgggtgtgcaactggggcatgtttgtaccagccagcatgtgttctgcccaacagtgtgtccgtgtgtgaggttaactgattcagaactcattctcttgataaactatttcttgaaagcatttattttaagtctttatttcctgctgaaatgaagtttcatgctgtcatgcccatcttatttattctagaagaaaattttcatagaagaaaatgatttatggccaaagttacagaacattcatcttttagacttagccttagaatatcattggaaattacttggcttgaatttggttcgtttttatctttatggattatgtaccagggctattaataatacttaaaccccttattttgctatggtggttagatttttttattccttttcaattagtgctattaattattacatggtcgtattcatgcttattacagatgaactatttttagtgccagtgtaaaggattaagaataacattcaattagttggctatttcaggctttattgtacatggtaatgtttcagggagtgtgatttggtctagaatatatccagatccttgtaattatgatattgggttatgacaggattctattatttttagctatgaatggtgcttatttttccctatattaggaatgttaatatttggattatcagagtccatgttataaacagaatttacctatgcaagacaaattctaactgtgcaacattttcatgagaattaaaagttgtgtgttaaggggaaaaccctctgaatgtttttatgtgtaagtgcctaaagaaccgtagaaacagtacatcaaaagctcttataaaagaaaaactgattgaacattagccagaaacaaaatatgatttacatttttttttttggttgctgggactgaataccctaaaaactaagagatgtgagtggggaaaatgtctaattgataagaaagttgatttatattatatttacatgcatcttctaagattgcctttacagtagccaatcagaactttaaaaaaaaaaaagctaacaacatagatcctatgtgttgcccttaagactaaaatactttgcacacgtgattgaatggctcacttaagttgttgaatttccttatacatttaaagtgtacttccgttaagaattattccattttaaatgggtaactttcagcttccgaactattttcctaaacattccagttgtgtattataaaagatcaaaatatctctaggtggtagtacaattttcatttataacgtggaaaagttaactgttaggtttaacattagtattagtgtttttgcaattgctcatagaaaagaacactgaataatggttttcatacaatttttgtaaaacattcttctcccagtttgattccaaatgcttttccccaaattgtctaatatatcataagctagtgtttccttgtatttaatttttccttccaacacaatatttaggaaaaatatgaataacattgtgagtagcgggagacaacacgaaaaagaaacctttcattgttgtggaggggtaggtgttatgtgattgatgcccttcctggcgtttgttttatcctgttattttctcaaaaaagagcacggctttttcttaaatacatttaaattcagaattgcttgcaaaagattggcctggatagatagacatcctagatttaagatagtaccatcttaaaagtatgttgaaaggtaaaataaatcatttcaaaatacttaactttcctaataaggatgttaggttttcttctctttcattagctggccataagtcaaggtccttataacactaggaaattacctttttttactttcaaaattgcattatagtgaattactgtttacaaaatacacatactgtgaacagatataagtttctgtcttttataaggtttgtagaatgaatgtttttttaaagtgagtattatatgttaaatattttaagttttttataaatactagtaactgtttactaatttttgtttggtcaaatgcttgtaaatgtagctgaaagaagatagggagaaactgcggatcccaaactgttccctttttcatttcttgaaatgttaccactacagacatttttttaaggtgaataaacagttgtgatgtgctgtacctaaaatcatgtttaatcgtataaggaaacatttcaatacacttatacaggaagaaaactatagatgaagtacatgtgtgtgattcagtctgattcacagaattctgagagtaatatggaataaaacaactccacttagatgataactgaagcatttcctgccttgtgaaaatttggattttaaattgctgttagaatgggaaatttggacactttatatcattgtataatttcagaatttagtttctgtatcttttggaaaacatgattatagcaaaaacatagaaaataatctattactaaaacaccataaatgtaaaactagtatgcttggctgttaactctaaagatgttacttatgtctgtttttaaaacatgcatgtatttaacaattttatcatagtattgtcatggaaaaaataaatatattttcttacatctta

SEQ ID NO: 61 - DNA, 2815 bp, Homo sapiens
ctcaaaaggggccggatttccttctcctggaggcagatgttgcctctctctctcgctcggattggttcagtgcactctagaaacactgctgtggtggagaaactggaccccaggtctggagcgaattccagcctgcagggctgataagcgaggcattagtgagattgagagagactttaccccgccgtggtggttggagggcgcgcagtagagcagcagcacaggcgcgggtcccgggaggccggctctgctcgcgccgagatgtggaatctccttcacgaaaccgactcggctgtggccaccgcgcgccgcccgcgctggctgtgcgctggggcgctggtgctggcgggtggcttctttctcctcggcttcctcttcggtaggggggcgcctcgcggagcaaacctcggagtcttccccgtggtgccgcggtgctgggactcgcgggttaaaagccaactgcaaggtctaatgactgcaggatctagctatccattgtttctggccgcctatgcgtgcactgggtgtctggcagagaggctggggtggtttataaaatcctccaatgaagctactaacattactccaaagcataatatgaaagcatttttggatgaattgaaagctgagaacatcaagaagttcttatataattttacacagataccacatttagcaggaacagaacaaaactttcagcttgcaaagcaaattcaatcccagtggaaagaatttggcctggattctgttgagctagcacattatgatgtcctgttgtcctacccaaataagactcatcccaactacatctcaataattaatgaagatggaaatgagattttcaacacatcattatttgaaccacctcctccaggatatgaaaatgtttcggatattgtaccacctttcagtgctttctctcctcaaggaatgccagaggtaaaaacacagtgcggcgatctagtgtatgttaactatgcacgaactgaagacttctttaaattggaacgggacatgaaaatcaattgctctgggaaaattgtaattgccagatatgggaaagttttcagaggaaataaggttaaaaatgcccagctggcaggggccaaaggagtcattctctactccgaccctgctgactactttgctcctggggtgaagtcctatccagatggttggaatcttcctggaggtggtgtccagcgtggaaatatcctaaatctgaatggtgcaggagaccctctcacaccaggttacccagcaaatgaatatgcttataggcgtggaattgcagaggctgttggtcttccaagtattcctgttcatccaattggatactatgatgcacagaagctcctagaaaaaatgggtggctcagcaccaccagatagcagctggagaggaagtctcaaagtgccctacaatgttggacctggctttactggaaacttttctacacaaaaagtcaagatgcacatccactctaccaatgaagtgacaagaatttacaatgtgataggtactctcagaggagcagtggaaccagacagatatgtcattctgggaggtcaccgggactcatgggtgtttggtggtattgaccctcagagtggagcagctgttgttcatgaaattgtgaggagctttggaacactgaaaaaggaagggtggagacctagaagaacaattttgtttgcaagctgggatgcagaagaatttggtcttcttggttctactgagtgggcagaggagaattcaagactccttcaagagcgtggcgtggcttatattaatgctgactcatctatagaaggaaactacactctgagagttgattgtacaccgctgatgtacagcttggtacacaacctaacaaaagagctgaaaagccctgatgaaggctttgaaggcaaatctctttatgaaagttggactaaaaaaagtccttccccagagttcagtggcatgcccaggataagcaaattgggatctggaaatgattttgaggtgttcttccaacgacttggaattgcttcaggcagagcacggtatactaaaaattgggaaacaaacaaattcagcggctatccactgtatcacagtgtctatgaaacatatgagttggtggaaaagttttatgatccaatgtttaaatatcacctcactgtggcccaggttcgaggagggatggtgtttgagctagccaattccatagtgctcccttttgattgtcgagattatgctgtagttttaagaaagtatgctgacaaaatctacagtatttctatgaaacatccacaggaaatgaagacatacagtgtatcatttgattcacttttttctgcagtaaagaattttacagaaattgcttccaagttcagtgagagactccaggactttgacaaaagcaacccaatagtattaagaatgatgaatgatcaactcatgtttctggaaagagcatttattgatccattagggttaccagacaggcctttttataggcatgtcatctatgctccaagcagccacaacaagtatgcaggggagtcattcccaggaatttatgatgctctgtttgatattgaaagcaaagtggacccttccaaggcctggggagaagtgaagagacagatttatgttgcagccttcacagtgcaggcagctgcagagactttgagtgaagtagcctaagaggattctttagagaatccgtattgaatttgtgtggtatgtcactcagaaagaatcgtaatgggtatattgataaattttaaaattggtatatttgaaataaagttgaatattatatata

SEQ ID NO: 62 - DNA, 2005 bp, Homo sapiens
aacttcagtttgttggctgcggcagcaggtagcaaagtgacgccgagggcctgagtgctccagtagccaccgcatctggagaaccagcggttaccatggaggggatcagtttttttttcttccctctagtgggcggggcagaggagttagccaagatgtgactttgaaaccctcagcgtctcagtgcccttttgttctaaacaaagaattttgtaattggttctaccaaagaaggatataatgaagtcactatgggaaaagatggggaggagagttgtaggattctacattaattctcttgtgcccttagcccactacttcagaatttcctgaagaaagcaagcctgaattggttttttaaattgctttaaaaattttttttaactgggttaatgcttgctgaattggaagtgaatgtccattcctttgcctcttttgcagatatacacttcagataactacaccgaggaaatgggctcaggggactatgactccatgaaggaaccctgtttccgtgaagaaaatgctaatttcaataaaatcttcctgcccaccatctactccatcatcttcttaactggcattgtgggcaatggattggtcatcctggtcatgggttaccagaagaaactgagaagcatgacggacaagtacaggctgcacctgtcagtggccgacctcctctttgtcatcacgcttcccttctgggcagttgatgccgtggcaaactggtactttgggaacttcctatgcaaggcagtccatgtcatctacacagtcaacctctacagcagtgtcctcatcctggccttcatcagtctggaccgctacctggccatcgtccacgccaccaacagtcagaggccaaggaagctgttggctgaaaaggtggtctatgttggcgtctggatccctgccctcctgctgactattcccgacttcatctttgccaacgtcagtgaggcagatgacagatatatctgtgaccgcttctaccccaatgacttgtgggtggttgtgttccagtttcagcacatcatggttggccttatcctgcctggtattgtcatcctgtcctgctattgcattatcatctccaagctgtcacactccaagggccaccagaagcgcaaggccctcaagaccacagtcatcctcatcctggctttcttcgcctgttggctgccttactacattgggatcagcatcgactccttcatcctcctggaaatcatcaagcaagggtgtgagtttgagaacactgtgcacaagtggatttccatcaccgaggccctagctttcttccactgttgtctgaaccccatcctctatgctttccttggagccaaatttaaaacctctgcccagcacgcactcacctctgtgagcagagggtccagcctcaagatcctctccaaaggaaagcgaggtggacattcatctgtttccactgagtctgagtcttcaagttttcactccagctaacacagatgtaaaagacttttttttatacgataaataacttttttttaagttacacatttttcagatataaaagactgaccaatattgtacagtttttattgcttgttggatttttgtcttgtgtttctttagtttttgtgaagtttaattgacttatttatataaattttttttgtttcatattgatgtgtgtctaggcaggacctgtggccaagttcttagttgctgtatgtctcgtggtaggactgtagaaaagggaactgaacattccagagcgtgtagtgaatcacgtaaagctagaaatgatccccagctgtttatgcatagataatctctccattcccgtggaacgtttttcctgttcttaagacgtgattttgctgtagaagatggcacttataaccaaagcccaaagtggtatagaaatgctggtttttcagttttcaggagtgggttgatttcagcacctacagtgtacagtcttgtattaagttgttaataaaagtacatgttaaactta

SEQ ID NO: 63 - DNA, 4251 bp, Homo sapiens
attcgcctctgggaggtttaggaagcggctccgggtcggtggccccaggacagggaagagcgggcgctatggggagccggacgccagagtcccctctccacgccgtgcagctgcgctggggcccccggcgccgacccccgctgctgccgctgctgttgctgctgctgccgccgccacccagggtcgggggcttcaacttagacgcggaggccccagcagtactctcggggcccccgggctccttcttcggattctcagtggagttttaccggccgggaacagacggggtcagtgtgctggtgggagcacccaaggctaataccagccagccaggagtgctgcagggtggtgctgtctacctctgtccttggggtgccagccccacacagtgcacccccattgaatttgacagcaaaggctctcggctcctggagtcctcactgtccagctcagagggagaggagcctgtggagtacaagtccttgcagtggttcggggcaacagttcgagcccatggctcctccatcttggcatgcgctccactgtacagctggcgcacagagaaggagccactgagcgaccccgtgggcacctgctacctctccacagataacttcacccgaattctggagtatgcaccctgccgctcagatttcagctgggcagcaggacagggttactgccaaggaggcttcagtgccgagttcaccaagactggccgtgtggttttaggtggaccaggaagctatttctggcaaggccagatcctgtctgccactcaggagcagattgcagaatcttattaccccgagtacctgatcaacctggttcaggggcagctgcagactcgccaggccagttccatctatgatgacagctacctaggatactctgtggctgttggtgaattcagtggtgatgacacagaagactttgttgctggtgtgcccaaagggaacctcacttacggctatgtcaccatccttaatggctcagacattcgatccctctacaacttctcaggggaacagatggcctcctactttggctatgcagtggccgccacagacgtcaatggggatggggctggatgacttgctggtgggggcacccctgctcatggatcggacccctgacgggcggcctcaggaggtgggcagggtctacgtctacctgcagcacccagccggcatagagcccacgcccacccttaccctcactggccatgatgagtttggccgatttggcagctccttgacccccctgggggacctggaccaggatggctacaatgatgtggccatcggggctccctttggtggggagacccagcagggagtagtgtttgtatttcctgggggcccaggagggctgggctctaagccttcccaggttctgcagcccctgtgggcagccagccacaccccagacttctttggctctgcccttcgaggaggccgagacctggatggcaatggatatcctgatctgattgtggggtcctttggtgtggacaaggctgtggtatacaggggccgccccatcgtgtccgctagtgcctccctcaccatcttccccgccatgttcaacccagaggagcggagctgcagcttagaggggaaccctgtggcctgcatcaaccttagcttctgcctcaatgcttctggaaaacacgttgctgactccattggtttcacagtggaacttcagctggactggcagaagcagaagggaggggtacggcgggcactgttcctggcctccaggcaggcaaccctgacccagaccctgctcatccagaatggggctcgagaggattgcagagagatgaagatctacctcaggaacgagtcagaatttcgagacaaactctcgccgattcacatcgctctcaacttctccttggacccccaagccccagtggacagccacggcctcaggccagccctacattatcagagcaagagccggatagaggacaaggctcagatcttgctggactgtggagaagacaacatctgtgtgcctgacctgcagctggaagtgtttggggagcagaaccatgtgtacctgggtgacaagaatgccctgaacctcactttccatgcccagaatgtgggtgagggtggcgcctatgaggctgagcttcgggtcaccgcccctccagaggctgagtactcaggactcgtcagacacccagggaacttctccagcctgagctgtgactactttgccgtgaaccagagccgcctgctggtgtgtgacctgggcaaccccatgaaggcaggagccagtctgtggggtggccttcggtttacagtccctcatctccgggacactaagaaaaccatccagtttgacttccagatcctcagcaagaatctcaacaactcgcaaagcgacgtggtttcctttcggctctccgtggaggctcaggcccaggtcaccctgaacggtgtctccaagcctgaggcagtgctattcccagtaagcgactggcatccccgagaccagcctcagaaggaggaggacctgggacctgctgtccaccatgtctatgagctcatcaaccaaggccccagctccattagccagggtgtgctggaactcagctgtccccaggctctggaaggtcagcagctcctatatgtgaccagagttacgggactcaactgcaccaccaatcaccccattaacccaaagggcctggagttggatcccgagggttccctgcaccaccagcaaaaacgggaagctccaagccgcagctctgcttcctcgggacctcagatcctgaaatgcccggaggctgagtgtttcaggctgcgctgtgagctcgggcccctgcaccaacaagagagccaaagtctgcagttgcatttccgagtctgggccaagactttcttgcagcgggagcaccagccatttagcctgcagtgtgaggctgtgtacaaagccctgaagatgccctaccgaatcctgcctcggcagctgccccaaaaagagcgtcaggtggccacagctgtgcaatggaccaaggcagaaggcagctatggcgtcccactgtggatcatcatcctagccatcctgtttggcctcctgctcctaggtctactcatctacatcctctacaagcttggattcttcaaacgctccctcccatatggcaccgccatggaaaaagctcagctcaagcctccagccacctctgatgcctgagtcctcccaatttcagactcccattcctgaagaaccagtccccccaccctcattctactgaaaaggaggggtctgggtacttcttgaaggtgctgacggccagggagaagctcctctccccagcccagagacatacttgaagggccagagccaggggggtgaggagctggggatccctcccccccatgcactgtgaaggacccttgtttacacataccctcttcatggatgggggaactcagatccagggacagaggccccagcctccctgaagcctttgcattttggagagtttcctgaaacaacttggaaagataactaggaaatccattcacagttctttgggccagacatgccacaaggacttcctgtccagctccaacctgcaaagatctgtcctcagccttgccagagatccaaaagaagcccccagctaagaacctggaacttggggagttaagacctggcagctctggacagccccaccctggtgggccaacaaagaacactaactatgcatggtgccccaggaccagctcaggacagatgccacacaaggatagatgctggcccagggcccagagcccagctccaaggggaatcagaactcaaatggggccagatccagcctggggtctggagttgatctggaacccagactcagacattggcacctaatccaggcagatccaggactatatttgggcctgctccagacctgatcctggaggcccagttcaccctgatttaggagaagccaggaatttcccaggaccctgaaggggccatgatggcaacagatctggaacctcagcctggccagacacaggccctccctgttccccagagaaaggggagcccactgtcctgggcctgcagaatttgggttctgcctgccagctgcactgatgctgcccctcatctctctgcccaacccttccctcaccttggcaccagacacccaggacttatttaaactctgttgcaagtgcaataaatctgacccagtgcccccactgaccagaactagaa

SEQ ID NO: 64 - DNA, 8291 bp, Homo sapiens
ccaggagctgccttggcagtcacgccccttccttccgaggagctttctggctgcctaaactggtagaccccctgaattactcctccatctccgctctctttcgcctcctcttctcttagttctctccgcctccccctcaactaccaccacctccagtcagtctcgcctccggctatccgctgctccaccctctggcccggtatcctgcctgtccgctgccaccaaggagagcccggacggagcagcgaggaggggagcagccgggagttggggcttcccccctgcccatccctggccgctggcccgggaccgaagccacttgagcgagcagagagtcgtcaccttgtcttctttgccttcagggagctgctaagaaggacaaataagatagcagagtgaaagagcttttgtctccttagaaggaaggctgagaaactaaagatgagaaattctgaagaacagccaagtggagggaccacggtattgcagcgtttgctacaagagcagcttcgctatggcaatcctagtgagaatcgcagcctgcttgccatacaccagcaagccacagggaatggccctcctttccccagtggcagtgggaacccgggccctcagagtgatgtgttgagtccccaagaccaccaccaacagcttgtggctcatgctgctcgacaagaaccccaggggcaggaaatccagtcagaaaacctcatcatggagaagcagctgtctcctcgaatgcaaaataatgaagaactcccgacctatgaagaagccaaggtccagtcccagtactttcggggccaacagcatgccagtgttggagctgccttctatgtcactggagtcaccaaccagaagatgaggactgagggacgcccatcagttcagcggctcaatcctggaaagatgcaccaagatgagggactcagagaccttaagcaagggcatgtccgttccttgagtgaacgactaatgcagatgtcactggccaccagtggagttaaggcccatccacctgttaccagtgctcccctctccccaccacaacccaatgacctctacaagaatcccacaagttccagtgaattctacaaggcccaagggccacttcctaaccagcatagcctgaagggcatggaacaccgaggccccccaccagaatatcccttcaagggcatgccaccccaatctgtagtgtgcaagccccaagagccagggcacttctatagtgagcatcgcctgaaccagccagggagaacagaggggcaactgatgaggtatcagcatccccctgagtatggagcagccaggccagcgcaggacatctcattgccattgtcagccaggaactcgcagcctcacagccctacttcttctctgacctctggggggtccttgcccttgctacaatctccaccatccactagattgtctcctgcccgacaccccttggtcccaaaccagggagaccattcagctcacctgcctaggccgcagcagcatttccttcctaatcaggctcaccagggggatcattaccgtctctcccaacctggcctgagtcagcagcagcagcaacagcagcagcagcaccatcatcaccatcaccaccaacaacagcagcagcagcagccacagcagcagccaggagaagcctattcagctatgcctcgggctcagccatcctctgcttcttatcagccagtgccagcagacccttttgccattgtttccagagcccagcagatggttgagatcctctcagacgagaaccggaacttgaggcaagagttggaaggatgctatgagaaggtggcaagactgcagaaggtggagacagaaatccagcgcgtctcggaggcatatgagaacctcgtgaagtcatcctccaaaagagaggccctagagaaagccatgagaaacaagctagagggcgagattcggaggatgcatgatttcaacagggatctgagagagcgtctagagactgccaacaagcagcttgcagagaaggaatatgaggggtcagaggacaccagaaaaaccatctcgcagctctttgcaaaaaataaagaaagccagcgtgagaaggagaagctggaagcggagctggccactgcccgttctaccaatgaggaccaaagacgacacatcgaaatccgagatcaggccctgagtaatgcccaggccaaggtggtaaagctggaagaagagctgaaaaagaagcaagtgtacgttgacaaggtggagaagatgcagcaggcccttgtacagctccaggcagcatgtgaaaaacgtgagcagctagagcaccgtctccggacacgactggagagggaactggaatccctgagaatccagcagcgtcagggcaactgtcagcccaccaacgtttcagaatacaatgctgctgcactgatggagctccttcgggagaaagaggagaggattctggctctggaagctgatatgacaaagtgggagcagaaatatttggaggagaatgtgatgagacattttgctctggatgctgctgcaactgtggctgctcagagggacacaacagtcatcagtcactctcctaacaccagctatgacacagctctagaagctcgcatccagaaagaggaggaagaaatcttgatggccaataagcgttgccttgacatggagggcaggattaagaccctccatgcccagattattgagaaggatgccatgatcaaagtactccagcagcgttcccggaaggagccgagcaagacagagcagctgtcgtgcatgcggccagcgaagtctctgatgtccatttccaatgctggatcaggcttgctctcccactcatccaccctgactggctcccccatcatggaagaaaagcgagacgacaagagctggaaggggagcctaggtaatgacagtaaataaggaagattatagtcacgtgttcaaagagagccctgagataagcacccatgcttaaggaaaagggatgatggtccaggttctagagaggaaggtgtaccagggttttggagtttttttttcctcctgagaccctagttccacattctggagctcctccacactttgaagtctcccggtgagaataccgattgaggccaaggcttagaggacaagaatcttgagtttcatttgggtgtcaaggaagataactctaatttcctctaaactattctcagatttggcctttgccatgtggcacctttatctttctccaaagcccatgtggcctttgtgtcgttccaaatgtcaaaattccggcatttctgtgttccttcctcctctataataggagaacccagagttttagttacactaaatcgtttgggtagcaggttttgttcccacagtgttgtgagatgagaacagaatgtactttttcattccgttcctgtccattccctcccctctaatcaaagcattctcctgggtggagactaccgtgctgaatatgtcccttccacaccctcgcctgtgccaccctcgactcccctgctctcggctcactccaagacaggcagccgagactgcagtacccaaactgaacgtgggacggaatcgaacaaaactgcagctgttgctcccatctctgttcctgctccagttgctgctgccgccactgctgccgccatcactgccactgctgccaccatcaccaccaccatggtagctgctgctccagttgctgttgctgctgctgctgctccagctgctgctgctgccccgtctccagccactgccgctgctactgctgctgctgtttctccagctgctgctggtcagattccagctgctgcctctgttgcctcagctgctgccgttgctccttctgctgctgctgctgctgctgttcaggttgctccagctgctccggctccagttccagctccggctctggttccggttccagctccagcagcggctcaggcttctgctcctgctcagactcaggcaccaacttcagctccggctgtggctccaactccagctccaactccaactccagctgtggctcaggctgaggttcctgcaagtccagctaccggtcctggaccacatcgtttgtctataccaagtttgacctgcaatccagacaaaacagatgggcctgtgttccactccaatactctggaaagaaaaactcccattcagatcctgggacaagagcctgatgcagagatggtggaatatctcatctaaacggccaaatcaagagctgcagattatcagcaaaaatgcttttaatcattttcccccttttattggttcttgttttgagggtgaggacaagggttgtggggaggggatgttttttaacaggactttttattggaacaatgtactacttgagtaataccatgtgaacaccagtctattttggtatgcttagggagtacctctaaagacagattaatcagaatgtgctctaaagcttattgtttgaatttatacgaatactgggactgttaacaggtggctatacatcgacgttttcaatgtgcttaaatttgtttaaattttccatattctagatcattttttattgaagagcacagtatgtgtggaagacagtgtataacacgtagtttggaagtgggaagctagagagaattgagtgtgtgctgttttgtatagttactatcctgtgcagcagctggagaaagcactcacctcaggcttacaaaagggaatagtttcaggagctatgtaagctggaaaaaaggtagggagttttggggtgcagaagggtactggagctaattttttcttccagtttcccagctaccctgccccagggaattgtgtttgtcttcatttcagtggtgctttggaaatggattcttttggttccctcctggaggttcatacattcatatatatgctctggagtaatttatgcatttggataattaatatattgctttcagatgctgggagagtacattaactgagtgatgcgcaacttcctctctcttagggaattagaccatcagaggccttgatggagagttgcatggggtgctatatgcagacttccatggtttgtgtgtagccatgaacacagcttgcttgcatttagtaagaccaatcagcttagtgtttatttcttctacagcacagattcactggctgggtctccagtctcaaattgccaatcatttgcaaagtgaggaaggatctttgttgacaggttgaatgctttgaatttctggtgactactttgaaataacttgttttgtttgtcaaattctaagcatatgtcttaaaaggcatttttgactatcacctccaagggaatagcttgagaaacccaaagtactatgctgcagtcgggggagaggtggattgcagcagtatcctcaactacctcttctcactgtcagtgacaccatcttggaatacctttgggaagcagcaggaaatgtgcatgtgggtagagatcaaaggaggcaatggctccaagccttgccatagggctgcctccaaggacacagaaggatgccagttgccacaggtccctgccctgtgtcacctgtctgcccttcattaaggtgagaaatctgcagatagcatcattaagatcagttttaaggggtatagggagggtgagggaagtggggggtgttaggtaagggttgggggtagaggttttgggatgtcttagttagaaaccagattaatagaagagtaggcctgatatattacatcatgagccatagtggtgggaaagaactttagcaatatagccctacctcctcattttagtgatgaggaatctgagaactggagaggttcagtgactttttgaaagtcatacaacacagctaaccattatgccaatcaccatgcttattttgggaaactctttatcttttttaaattccattttatgaaaaggcatcttcatggtccagggaatatgtatcttgtaaaatgtacctggttggagtagcttgtccagtcttgacaaactactgaatttctgtcttgcctctccttcagtgccttttaaaaggttttcccttttctgatctgcatttcaacatagagtcacataaatgtccccctgagaaaccaatcccacttctttctaggagattgggtatcttagataatcttttggggttcctctgtgagtataggaatggtatccttcctaattatcttccaaaggaattattttgtgtgtgtgcctgtgtgtgtgtagagacataaaggagggtgatgtgattttcagctagtcctttcacattttcaataatgaggtaatcatgttacatacacattagtcctcagttataaagtgaatctcagatagaaattaaaagtgcagttgtgttaagactctttcatactaccctttagtcataaggagaaaaaaacactcaaatagtagaagcagcaagtagcaaacttcaggagagctactttctatccaaataatttaaaaaacacttttcacctactcctttcatggttataacacattggcagactttttgctggctctgggagccatgattttaatcacattctgcaaggtgacaaatgtcatacattccacattgtgtggtagccatctctttagactcatgtgttttggggaaaggaagaagttcttggctgagtactattttgaactttccagaaccctctcacaccagagacagttcttctctgttcagtttccaatccccgataatttgctaaaataacattgtacatccaagagagggaagaagagtatgtcagtatattatgcagaagatagatacagccttttcagaagatctccactagtttttgttccaaaaattcaagtttatgggagaaatctcaattagccaccttttcacagttgtgtggatataacatttgggggatctttctggactcctacctatctgtgcattttaccggcacctcaggaaaggagggtgaccaggttgtcttagcttgtactgcttggtgatctctgaggaccttctaattcagttgtaccccagtgttccatgtatagaaaaacttcattagaacaaactttacttgatatgaaactcctattaacagtctttttttgaaataaaaagtagcttgagctttcttttaaaatcatgtatcttgattgttgatttaatgaaggatttccttttaatgctgcttttgagcttcaaggtaataggacagcaggaacctaaaatatctgccatcatctgccataggaaagatacccagagacccatcatgttctctttttgttgttacactgttgggtgggtataacaattggaaaatgaacaaactgattgattgtgcaaactactttttatgacaagcctaaaccctcataatgcggcagcttaaagtgtatacatatgcactaactttgatcaattatattctcatatctgttagctacacagtctcctattatctcaattgcttatgtgcatatggaatatgttacttaaaacgtgtgcattcttactgaaaatgttttcaaaggaaggtatcagctgtgggctaattgccaccaatttcagcctgccacgattcttggaaatatgtcttccaagtgccatccatcatcagtaggacaagtgtcgggagtttgtttatttttttccagtagcaacgatgggttacatggagccatgaaacctccttctggcctcccttgtgattaatggcatgtgtttgtaaaatggatagctggggttggcagatggctagagaagaatcgcctttggtttaaaatgtatgtggtcccctaatgattgtgaccccattctgtaatcaactgagctagttccaataaagttaagcaggtttaaatccactttgtgcctatcttttcactgacaataaagttagctattttaaaatgcagtaccgtgtggaaaatgctttggtgtttacccgacagaggctttatttgtgctgtatcagtgattactttcaattcagtatgcagtgaaattgcctttcaagggcagcgtgcagcagaatttgcatttgcttgaagtatggaatgtgattatagattataaagtattaagacaacaccacaggccgcatgctctaatcggtctctttatatactcaggcagcatatattaaaagctttgcatctttttatcttctggtttctagggataaaatgatggccacccaaagcagagaatttatcctttggttagcattttggaaggccccttgatattccttttgtacccttgttctgatgccaattcatcagtttt

SEQ ID NO: 65 - DNA, 1180 bp, Homo sapiens
cccggggccgcgcggctgcctgggaggctccgggccagccgcggtccagagcgcgcgaggttcggggagctcggccaggctgctggtacctgcgtccgcccggcgagcaggacaggctgctttggtttgtgacctccaggcaggacggccatcctctccagaatgaagatcttcttgccagtgctgctggctgcccttctgggtgtggagcgagccagctcgctgatgtgcttctcctgcttgaaccagaagagcaatctgtactgcctgaagccgaccatctgctccgaccaggacaactactgcgtgactgtgtctgctagtgccggcattgggaatctcgtgacatttggccacagcctgagcaagacctgttccccggcctgccccatcccagaaggcgtcaatgttggtgtggcttccatgggcatcagctgctgccagagctttctgtgcaatttcagtgcggccgatggcgggctgcgggcaagcgtcaccctgctgggtgccgggctgctgctgagcctgctgccggccctgctgcggtttggcccctgaccgcccagaccctgtcccccgatcccccagctcaggaaggaaagcccagccctttctggatcccacagtgtatgggagcccctgactcctcacgtgcctgatctgtgcccttggtcccaggtcaggcccaccccctgcacctccacctgccccagcccctgcctctgccccaagtggggccagctgccctcacttctggggtggatgatgtgaccttccttgggggaccgcggaagggacgagggttccctggagtcttacggtccaacatcaggaccaagtcccatggacatgctgacagggtccccagggagaccgtgtcagtagggatgtgtgcctggctgtgtacgtgggtgtgcagtgcacgtgagagcacgtggcggcttctgggggccatgtttggggagggaggtgtgccagcagcctggagagcctcagtccctgtagccccctgccctggcacagctgcatgcacttcaagggcagcctttgggggttggggtttctgccacttccgggtctaggccctgccccaaatccagccagtcctgccccagcccacccccacattggagccctcctgctgctttggtgcctcaaataaatacagatgtcccccagc

SEQ ID NO: 66 - DNA, 6570 bp, Homo sapiens
gcggccgcttcccaccgtccctctccccttactggcagagcgcgctgcgggcggactcccgggcccggagcagcccaccggccaccccaccgcccacccggctcccggtgtctcctcccggccgctctacccagcaactttccgtgctttgttccccgactggaaatgctttacggaagcgtcttggacagggtctccgccaggcgacaagagctcggtgctgagatgtgttacgttctcatctccccatcaattatggatggaaacaaataaggaagagtcaattttgctgagccccttctccggcaacgagaggcgttctgcagccgggagggagccgccgctcgcgccggcagccgctggcaggggcatggtgaggaggaaggtagctcagtggcatttctgagcaggggccaccctgacttcaccttggcccaccatgagggtcttcctgctttgtgcctacatactgctgctgatggtttcccagttgagggcagtcagctttcctgaagatgatgaaccccttaatactgtcgactatcactattcaaggcaatatccggtttttagaggacgcccttcaggcaatgaatcgcagcacaggctggactttcagctgatgttgaaaattcgagacacactttatattgctggcagggatcaagtttatacagtaaacttaaatgaaatgcccaaaacagaagtaatacccaacaagaaactgacatggcgatcaagacaacaggatcgagaaaactgtgctatgaaaggcaagcataaagatgaatgccacaactttatcaaagtatttgttccaagaaacgatgagatggtttttgtttgtggtaccaatgcattcaatcccatgtgtagatactacaggttgagtaccttagaatatgatggggaagaaattagtggcctggcaagatgcccatttgatgccagacaaaccaatgttgccctctttgctgatgggaagctgtattctgccacagtggctgacttcttggccagcgatgccgttatttatcgaagcatgggtgatggatctgcccttcgcacaataaaatatgattccaaatggataaaagagccacactttcttcatgccatagaatatggaaactatgtctatttcttctttcgagaaatcgctgtcgaacataataatttaggcaaggcaaatgctgtgtattcccgcgtggcccgcatatgtaaaaacgacatgggtggttcccagcgggtcctggagaaacactggacttcatttctaaaggctcggctgaactgttctgtccctggagattcgtttttctactttgatgttctgcagtctattacagacataatacaaatcaatggcatccccactgtggtcggggtgtttaccacgcagctcaatagcatccctggttctgctgtctgtgcatttagcatggatgacattgaaaaagtattcaaaggacggtttaaggaacagaaaactccagattctgtttggacagcagttcccgaagacaaagtgccaaagccaaggcctggctgttgtgcaaaacacggccttgccgaagcttataaaacctccatcgatttcccggatgaaactctgtcattcatcaaatctcatcccctgatggactctgccgttccacccattgccgatgagccctggttcacaaagactcgggtcaggtacagactgacggccatctcagtggaccattcagccggaccctaccagaactacacagtcatctttgttggctctgaagctggcatggtacttaaagttctggcaaagaccagtcctttctctttgaacgacagcgtattactggaagagattgaagcctacaaccatgcaaagtaggtatatgttacgagaacgcccttcagcactgctcaaaaattttcggcatgtatttcatctagtcatgtccttttggtcctctaaattagcagtggtttggcataatagtgttttgtgttttttttctcattgaaataaatcttgggtttgtttttttcccgagcctgctagggcgaggggggtgaatggttgatgagtttaaaaataatgcagcccttgtttttcacctgtagaatatgagaacattttaacagcacctctcttatcttgcagatatattccaagatgctacatgcagcagacagctgtgagcttgcatacacacacacacaaatatacatgcacatacatacacagaatgcagtactagttaagtatttccttcctatctttaataagtaagagaatatttagaccattgtgcagtgctgagaatgaggaagacaaaaaggtcatctcattacagttggataaagatcaccacgctttatatgtggcgttctctagctgcattatccgcatccccctcagtcgctgtgagcgttatggatcatgtaaaaagtcttgtattgcatctcgtgacccgtattgtggctggttaagccagggatcctgtggtagagtgaccccagggatgctgctgttaaccgaagacttctttgctttccataaccacagtgctgaaggatatgaacaagacacagaattcggcaacacagctcatctaggggactgccatgaaattttgcctacttcaactacaccagattacaaaatatttggcggtccaacatctgacatggaggtatcttcatcttctgttaccacaatggcaagtatcccagaaatcacacctaaagtgattgatacctggagacctaaactgacaagctctcggaaatttgtagttcaagatgatccaaacacttctgattttactgatcctttatcgggtatcccaaagggagtgtacgatgggaagtccagtctggagagtccaaccagatggtccacatgaatgtcctcatcacctgtgtctttgctgcttttgttttgggggcattcattgcaggtgtggcagtatactgctatcgagacatgtttgttcggaaaaacagaaagatccataaagatgcagagtccgcccagtcatgcacagactccagtggaagttttgccaaactgaatggtctctttgacagccctgtcaaggaataccaacagaatattgattctcctaaactgtatagtaacctgctaaccagtcggaaagagctaccacccaatggagatactaaatccatggtaatggaccatcgagggcaacctccagagttggctgctcttcctactcctgagtctacacccgtgcttcaccagaagaccctgcaggccatgaagagccactcagaaaaggcccatggccatggagcttcaaggaaagaaacccctcagttttttccgtctagtccgccacctcattccccattaagtcatgggcatatccccagtgccattgttcttccaaatgctacccatgactacaacacgtctttctcaaactccaatgctcacaaagctgaaaagaagcttcaaaacattgatcaccctctcacaaagtcatccagtaagagagatcaccggcgttctgttgattccagaaataccctcaatgatctcctgaagcatctgaatgacccaaatagtaaccccaaagccatcatgggagacatccagatggcacaccagaacttaatgctggatcccatgggatcgatgtctgaggtcccacctaaagtccctaaccgggaggcatcgctatactcccctccttcaactctccccagaaatagcccaaccaagcgagtggatgtccccaccactcctggagtcccaatgacttctctggaaagacaaagaggttatcacaaaaattcctcccagaggcactctatatctgctatgcctaaaaacttaaactcaccaaatggtgttttgttatccagacagcctagtatgaaccgtggaggatatatgcccacccccactggggcgaaggtggactatattcagggaacaccagtgagtgttcatctgcagccttccctctccagacagagcagctacaccagtaatggcactcttcctaggacgggactaaagaggacgccgtccttaaaacctgacgtgccaccaaagccttcctttgttcctcaaaccccatctgtcagaccactgaacaaatacacatactaggcctcaagtgtgctattcccatgtggctttatcctgtccgtgttgttgagaggatgatgttgtaagggtaccttaaaacaagagactcgcttgtattttaagagaaccaagtggccaaagaaactctttctaactttggcaacatcagaacttgccacatgtagctactgcagcaaggcttctgtgtacttgcctgaaaacaaaggaaggtgctggtcattccatttcttttgtttgaagctaaagagatgtgtagctcacaggggctaccttaccagtataaagagctgataacagtactcagaagaatctgtgaacaaatacttgaaaatgggttcaatgtagactgccattatgtgtggtcttcccattaaatgtgaacattttaatatgtatgcattcaccttgcctcttgcacaaatgtcaaaaaaaagatggtaatatctcaaagaaatgaacttgtagattaccaagcagtttgctaaaaattcaatctttgacccaagctgtagcatttttttttcatgtgtggcatctttttcatgccaccaacaaacttgttgtgtgtgtgcgtgtgtgtgtgtgtgtgtgtgtgtgtgtgtgtgttctgtacccactaggatttgtttaggtgcccattgcatctttttgtgctatggagttgtttacattaagcatgaccgaacgagagacaatactatttcccacaggagtccattgggttcagctttgaaagaggaatagaatcgaggctcctttgaccatcaaaatgatgaactttacttatgtggtacccaatgccagaatgtaagagttgcaagtgattttgtgctgctattcattaaaacttgtattccagtcttgccagcttaaggagatcaagatattaagaggtatccttgatttattttccagtattcagtagtaaaattttcctgtccactgtgaatcaaagcctgagtcactctatttaaccttggacacactaataaggttttattttgattgtgttcgtttccccccccccaatagtaaaatttctcctcctttaactcctcctaccccccaaggtaagaaacaaaaaacaaacaaacaaacaaaaatagaagacaaaagaaagacatatgaaaggaattgtaattggcttaacagaaacagtctgtaaaaacctaacagtggtgcaatcatgttgtctgtgttgtgttatgtgagaattttctcctaagtcatgcaggtaatgacaatatactgtaaataccacatgtgagtttacctgaatctgtgcattttgtgccttattcatgagaatgatagaagtactaaaatctgtcaagtgttttcagtatagcacattatttactgagtgccagttgtaaatgtttttcaaccagcacctaaaaagactcttttcaaaaaatcacagaaacaacctaggacaattatttgttacataatccgacctcatagcagcattacattctttgccgtgataaacattccactcctgctttcctaaggatgaaacagtgataatgtgaactcaaatgaggtttcctgggtaatgtgacacctgcagaaactatagagcgtcatttatacgtagtttggcagaaaccacttacggctgatgatgcgcaaccctgctgactgtttcagttaatatgctgcacaccacacacttgtttagtgaaccaaatctagaaagtaccaaggcagaggtatgctcctgctgtaatcaggcaaatgagttcaactggatttcttttgacaatactgttggtacctattacttgggggaggacatgttgcagaagaccagatcatttttatacagaatgtgaaatactgatacagttattcttttttttaaagaacattgttttataaagaacgtgatttccagtgatctctggaagcgctaaagctaaaatttctgttcttgaaacacttcagctttgcaactaaaatattacagattaataataaattaaaccaaccaatgataaacactactcagtccaccaacaacaaacgtgtttgaattcaccttaccaatattaatcccagcgtgtgtaaaacagaacagtaactctatgtgaccccagataacattttgtaacattgtgcttccttgtagtttgtaatgtgagttcaatcagtatttatgttgaaatttctaacattaaatctagtctctatcctgttaatttaatttttaaatgctttatccatttgtgcaaaggtaaacgcagattgtatcttttttaatggtacggcataaaaagtaaccctcaagtgaagtgtctctatactgttttatagagtactttaacatgaatagataccttgtaaacttgtattgtggatgtgtaaataatatgtactttgggtttttaacaccgcatgtaaagtcaaaataaaatatacaaatcattata

SEQ ID NO: 67 - DNA, 2653 bp, Homo sapiens
gcaaaaagcgtgggcagttggagaagaagcagccagagtgtgaagaagcccacggaaggaaagtccagggaggaggaaaagaagcagccattttcaaacagtccctcctgggagaacacagacaggcagaggattacaacacaaggcagcaagcactgggagacgaaagttttggcatctgttccctggctgtgccaagatgggcgattggagcttcctgggaaatttcctggaggaagtacacaagcactcgaccgtggtaggcaaggtctggctcactgtcctcttcatattccgtatgctcgtgctgggcacagctgctgagtcttcctggggggatgagcaggctgatttccggtgtgatacgattcagcctggctgccagaatgtctgctacgaccaggctttccccatctcccacattcgctactgggtgctgcagatcatcttcgtctccacgccctctctggtgtacatgggccacgccatgcacactgtgcgcatgcaggagaagcgcaagctacgggaggccgagagggccaaagaggtccggggctctggctcttacgagtacccggtggcagagaaggcagaactgtcctgctgggaggaagggaatggaaggattgccctccagggcactctgctcaacacctatgtgtgcagcatcctgatccgcaccaccatggaggtgggcttcattgtgggccagtacttcatctacggaatcttcctgaccaccctgcatgtctgccgcaggagtccctgtccccacccggtcaactgttacgtatcccggcccacagagaagaatgtcttcattgtctttatgctggctgtggctgcactgtccctcctccttagcctggctgaactctaccacctgggctggaagaagatcagacagcgatttgtcaaaccgcggcagcacatggctaagtgccagctttctggcccctctgtgggcatagtccagagctgcacaccaccccccgactttaatcagtgcctggagaatggccctgggggaaaattcttcaatcccttcagcaataatatggcctcccaacaaaacacagacaacctggtcaccgagcaagtacgaggtcaggagcagactcctggggaaggtttcatccaggttcgttatggccagaagcctgaggtgcccaatggagtctcaccaggtcaccgccttccccatggctatcatagtgacaagcgacgtcttagtaaggccagcagcaaggcaaggtcagatgacctatcagtgtgaccctcctttatgggaggatcaggaccaggtgggaacaaaggaggctcagagaagaaagacgtgtcccttctgaactgatgctttctcactgtcatcactgcttggctcctttgagccccgggtctcaatgacgttgctcattaattctagaaactataaccagggctctgggatagtaagagaggtgacaacccacccagactgcagttccctccccaccctctacccagtatacgaagcctttcagattactcatgaaacagggtagagggaaagaagggaagcatggcaaaagctggcctggaagggatagccagagggatagaatgactctctctctacataccagcagcataccaaatgcgttctctaagttcctacctccttgacctgatcaccctccctcctccaaggaagagctcaaagttcccagccaatagacagcatgaatcaaggaacttgcattatatgtgctcttgaatctgttgtctccatggaccattcctcggagtagtggtgagatggccttgggttgcccttggcttctcctccctctactcagccttaaaaagggcttcttggaactttaccagcagcctcagctttacaaatgccttggtatgtacctctggcaaatgccccaccttggtgatgttgcaacctttccttctgctagggtgtacacctagcctgtgcaggtgtcagccctgctagggagtcactgtacacacaaactctactggaattcctgccaacatctgtcaccctgcagctcctttacagttcaatccaatgatagaaaccatcccttccctttctcccttggctgttcacccagccattccctgaaggccttaccaacaggaatatccaagaagctgttgtcccctctcgaaccctgaccagatcatcagccactgaggccagtggaatttccccaggccttgttaaaacaaagaaagcattgtacctctcagattccccttgtggaaaaaaaaattctgctgtgaagatgaaaataaaaatggagagaaaacactggaaaactattttcccctcctatttacttcctttgctgactgccaacttagtgccaagaggaggtgtgatgacagctatggaggcccccagatctctctctcctggaggctttagcaggggcaaggaaatagtaggggaatctccagctctcttggcagggcctttatttaaagagcgcagagattcctatgtctccctagtgcccctaatgagactgccaagtgggggctgtagaaaagccttgccttccccagggattggcctggtctctgtattcactggatccataatgggttgctgttgttttggatgaaggtaaacgatgcttggaattgg

SEQ ID NO: 68 - DNA, 4120 bp, Homo sapiens
gacaggggctctgggcggccggggagcatgcccgcgcggctacgctgaatggcgcctcctctgcgacccctcgcccggctgcgaccgccggggatgctgctccgcgcgctcctgctcctgctgctgctcagtcctttgccaggagtgtggtgctttagcgaactgtcttttgtaaaagaaccacaggatgtaactgtcacaagaaaggacccagtcgttttagattgccaggctcacggagaagttcctattaaggtcacatggttgaaaaatggagcaaaaatgtctgaaaataaacggatcgaggttctttctaacggctctttatacatcagtgaggtggaaggcaggcgaggagagcagtccgatgaaggattttatcagtgcttggcaatgaacaaatatggagccattcttagtcaaaaagctcatcttgccttatcaactatttctgcatttgaagtccagccaatttccactgaggtccacgaaggtggagttgctcgatttgcatgcaagatttcatcccaccctcctgcagtcataacatgggagttcaatcggacaactctacctatgactatggacagaacaggataactgccctaccaacaggagtattgcagatctatgatgtcagccaaagggattctggaaattatcgttgtattgctgccactgtagcccaccgacgtaaaagtatggaggcctcgctaactgtgattccagctaaggagtcaaaatccttccacacaccaacaattatagcaggtccacagaacataacaacatctcttcatcagactgtagttttggaatgcatggccacaggaaatcccaaaccaatcatttcttggagccgccttgatcacaaatccattgatgtctttaatactcgggtacttggaaatggtaatctcatgatatctgatgtcaggctacaacatgctggagtatatgtttgtcgggccactacccctggcacacgcaactttacagttgctatggcaactttaactgtattagctcctccttcatttgttgaatggccagaaagtttaacaaggcctcgagctggcactgctcgatttgtgtgtcaggcagaaggaatcccctctcccaagatgtcatggttgaaaaatggaaggaagatacattcgaatggtagaattaaaatgtacaacagtaaattggtaattaaccagattattcctgaagatgatgctatttatcagtgcatggctgagaatagccaaggatctattttatctagagccagactgactgtagtgatgtcagaagacagacccagtgctccctataatgtacatgctgaaaccatgtcaagctcagccattcttttagcctgggagaggccactttataattcagacaaagtcattgcctattctgtacactacatgaaagcagaaggtttaaataatgaagagtatcaagtagtcatcggaaatgacacaactcattatattattgatgacttagagcctgccagcaattatactttctacattgtagcatatatgccaatgggagccagccagatgtctgaccatgtgacacagaatactctagaggatgttcccctgagacctcctgaaattagtttgacaagtcgaagtcccactgatattctcatctcctggctgccaatcccagccaaatatcggcggggccaagtggtgctgtatcgcttgtctttccgcctaagtactgagaattcaatccaagttctggagctcccggggaccacgcatgagtaccttttggaaggcctgaaacctgacagtgtctacctggttcggattactgctgccaccagagtggggctgggagagtcatcagtatggacttcacataggacgcccaaagctacaagcgtgaaagcccctaagtctccagagttgcatttggagcctctgaactgtaccaccatttctgtgaggtggcagcaagatgtagaggacacagctgctattcagggctacaagctgtactacaaggaagaagggcagcaggagaatgggcccattttcttggataccaaggacctactctatactctcagtggcttagaccccagaagaaaatatcatgtgagactcctggcttacaacaacatagacgatggctatcaggcagatcagactgtcagcactccaggatgcgtgtctgttcgtgatcgcatggtccctcctccaccaccaccccaccatctctatgcgaaggctaacacctcatcttccatcttcctgcactggaggaggcctgcattcaccgctgcacaaatcattaactacaccatccgctgtaatcctgttggcctgcagaatgcttctttggttctgtaccttcaaacatcagaaactcacatgttggttcaaggtctagaaccaaacaccaaatacgaatttgccgttcgattacatgtggatcagctttccagtccttggagccctgtagtctaccattctactcttccagaagcaccagcaggcccaccagttggagtaaaagtgacattaatagaggatgacactgccctggtttcttggaaaccccctgatggcccagaaacagttgtgacccgctatactatcttatatgcatctaggaaggcctggattgcaggagagtggcaggtcttacaccgtgaaggggcaataaccatggctttgctagaaaacttggtagcaggaaatgtgtacattgtcaagatatctgcatccaatgaggtgggagaaggacccttttcaaattctgtggagctggcagtacttccaaaggaaacctctgaatcaaatcagaggcccaagcgtttagattctgctgatgccaaagtttattcaggatattaccatctggaccaaaaatcaatgactggcattgctgtaggtgttggcatagccttgacctgcatcctcatctgtgttctcatcttgatataccgaagtaaagccaggaaatcatctgcttccaagacggcacagaatggaactcaacagttacctcgtaccagtgcctccttagctagtggaaatgaggtaggaaagaacctggaaggagctgtaggaaatgaagaatctttaatgccaatgatcatgccaaacagcttcattgatgcaaagggaggaactgacctgataattaatagctatggtcctataattaaaaacaactctaagaaaaagtggttttttttccaagactcaaagaagatacaagttgagcagcctcaaagaagatttactccagcggtctgcttttaccagccaggcaccactgtattaatcagtgatgaagactcccctagctccccaggtcagacaaccagcttctcaagaccctttggtgttgcagctgatacagaacattcagcaaatagtgaaggcagccatgagactggggattctgggcggttttctcatgagtccaacgatgagatacatctgtcctcagttataagtaccacaccccccaacctctgattctttcactggcagtgattcaggtggagattccgcattgaggaagtgtgaagaccctgctgtgtcatctgttagtgagcagacttcctccttagttctgcagccgccatctgccatgctatgctttgataaaaatgattttccaatctagacggccatgctcaggtattctcaccattaaatctgttcgaaggacaatgaacagggaaccaaagccttttgtgaaaatcttaatatctttatggggtattttagctttttttgaatgtgttttgttttttatttttaaacttgtgtaatttgaatgtttcattgtcagcaatgtgaaagaacggtcgagatgtttgactggattataaaatatatcactggagcaaagggaagacttttgaaagcccctttgctgactatctacctcagtttgcctcccggcaaactctgaagacaactttgttacctcatttgttgttatagtttatctcagctacataaccaatgatacttcctagtagtattgtgttttcattgctgtacgtgtaatgtgtgtgatcaaaggagtcatataggtagatgagtaagaatgtttatctgaagctctgatttttttaaaaaaa

SEQ ID NO: 69 - DNA, 3665 bp, Homo sapiens
aagaagtgggatggggcctctccagaaagctgaacgaggcatctggagcccgaacaaacctccaccttttttggcctcgacggcggcaacccagcctccctcctaacgccctccgcctttgggaccaaccaggggagctcaagttagtagcagccaaggagaggcgctgccttgccaagactaaaaagggaggggagaagagaggaaaaaagcaagaatcccccacccctctcccgggcggagggggcgggaagagcgcgtcctggccaagccgagtagtgtcttccactcggtgcgtctctctaggagccgcgcgggaaggatgctggtccgcaggggcgcgcgcgcagggcccaggatgccgcggggctggaccgcgctttgcttgctgagtttgctgccttctgggttcatgagtcttgacaacaacggtactgctaccccagagttacctacccagggaacattttcaaatgtttctacaaatgtatcctaccaagaaactacaacacctagtacccttggaagtaccagcctgcaccctgtgtctcaacatggcaatgaggccacaacaaacatcacagaaacgacagtcaaattcacatctacctctgtgataacctcagtttatggaaacacaaactcttctgtccagtcacagacctctgtaatcagcacagtgttcaccaccccagccaacgtttcaactccagagacaaccttgaagcctagcctgtcacctggaaatgtttcagacctttcaaccactagcactagccttgcaacatctcccactaaaccctatacatcatcttctcctatcctaagtgacatcaaggcagaaatcaaatgttcaggcatcagagaagtgaaattgactcagggcatctgcctggagcaaaataagacctccagctgtacagagacccagttctgatgatggtcacacaccccagcagttttcccctaacaggaaagttgtcagggctgttcaggcatttccttctctgccatctgccatccggactgaagagaaagtcttagtttcaattcctttcctgttcaggggaggaggacactctgattggaggctgctggaataaattctgactcactattgaagaattatcagagtttttcttctgagtccaaattcctgggtctgatggcccagtcagcaacctgaagaaaaatctatgaacttcattaaaactgggttccatgcttttaatggaaaacagagatggaagacgagacaaaaatgccatttcagtttgagcaatgcactttttgagactcctttgggtagaaagagggaggaggccactgaggtttccactgagtgtatattatagatttgttctctcctcctcacctcccttggcttttcttccatcattggggactgctgtaatcttgaaacagaatattttctcttagttattattgcattattaatattttctgtttttggccatttcttttgagtttaatttgcatatgtgtacatgggcaatgcttcaacgagacaatttttttaagtttgttctctaacatcttagatactagaagatatggattttggtcctgggagattatttaggtttttttcttattgtgttgttgcacatatacagttagcagttttttttttttctgttggaattttagaaacaaggatccttcttgcggacggggcggagtttaagaaggacaggggagagggcctggcccgagtgctgtgtggggaggagcaggctgatgctgatgctggggcccaggtatgctccctgctccttgcccagtctgaggtgaggcctcagtgtctactgctggtcttggccaacagaacagaaatttccagcaaactccaacttatgaaaaagcaccaatctgacctgaaaaagctggggatcctagatttcactgagcaagatgttgcaagccaccagagctattcccaaaagaccctgattgcactggtcacctcgggagccctgctggctgtcttgggcatcactggctatttcctgatgaatcgccgcagctggagccccacaggagaaaggctggagctggaaccctgaccactcttcaggaagaaaggagtctgcacatgcagctgcaccctccctccgatccttcctcccacctccccctcccccttctcccacccctgcccccacttcctgtttgggcccctctcccatccagtgtctcacagccctgcttaccagataatgctactttatttatacactgtctagggcgaagacccttattacacggaaaacggtggaggccagggctatagctcaggacctgggacctcccctgaggctcagggaaaggccagtgtgaaccgaggggctcaggaaaacgggaccggccaggccacctccagaaacggccattcagcaagacaacacgtggtggctgataccgaattgtgactcggctaggtggggcaaggctgggcagtgtccgagagagcacccctctctgcatctgaccacgtgctacccccatgctggaggtgacatctcttacgcccaacccttccccactgcacacacctcagaggctgttcttggggccctacaccttgaggaggggcaggtaaactcctgtcctttacacattcggctccctggagccagactctggtcttctttgggtaaacgtgtgacgggggaaagccaaggtctggagaagctcccaggaacaatcgatggccttgcagcactcacacaggacccccttcccctaccccctcctctctgccgcaatacaggaacccccaggggaaagatgagcttttctaggctacaattttctcccaggaagctttgatttttaccgtttcttccctgtattttctttctctactttgaggaaaccaaagtaaccttttgcacctgctctcttgtaatgatatagccagaaaaacgtgttgccttgaaccacttccctcatctctcctccaagacactgtggacttggtcaccagctcctcccttgttctctaagttccactgagctccatgtgccccctctaccatttgcagagtcctgcacagttttctggctggagcctagaacaggcctcccaagttttaggacaaacagctcagttctagtctctctggggccacacagaaactctttttgggctcctttttctccctctggatcaaagtaggcaggaccatgggaccaggtcttggagctgagcctctcacctgtactcttccgaaaaatcctcttcctctgaggctggatcctagccttatcctctgatctccatggcttcctcctccctcctgccgactcctgggttgagctgttgcctcagtcccccaacagatgcttttctgtctctgcctccctcaccctgagccccttccttgctctgcacccccatatggtcatagcccagatcagctcctaacccttatcaccagctgcctcttctgtgggtgacccaggtccttgtttgctgttgatttctttccagaggggttgagcagggatcctggtttcaatgacggttggaaatagaaatttccagagaagagagtattgggtagatattttttctgaatacaaagtgatgtgtttaaatactgcaattaaagtgatactgaaacacatttttgcaacct

SEQ ID NO: 70 - DNA, 5996 bp, Homo sapiens
agagggaatgagtcaggctccggctccacactggcacgtagtgggcggatcgcgccggcgctgagtaggaaggagcttcagccgccagcccggaacgcagtgagtacagccactcaaaggaaagccaagtcgctttgcaggggagcgtctcatgatttttcagaaacgtgctcatggttaaaaagaaaaatcaaggctcggaataaatacattcaagcactgttaattttagcccaaagacaggcggtacttgcctggagatttgggaaaatcaacatgaaactaaaaatgaaattttagttggagtggagcaagcagtattgatcagaacataccaaatacgaattttttcaaagtctgcgtagaagtttaaattactaggaaaaatgtaaaggagaagtatttactaataaatgaaacaaaagtaataaaataaaaatgaattaatatagtttgacaaaatatcagcgaacgctgaaaagaaaacattaaaataatgtttgagactttttaggttttgtgcaggaagaattgggaaaaatgtgctggatggagtgatactgcttttcttttccacaaaaatttcattattttagagagcggtagagcctttttaaagacagtaagttattgccaattcacaatgaaataagatcacatgctctgaaatgtacaagagctgcatgcaataaacttcatttatctataggtaataactgattgatgtttattcagtagtcgaaatgcacctcatgcactctaattagcacgtcaaattagtctctccgtttcagaggtgtagggcctttgtggagccttctcaataaaataatttgccactcttgaaggttagacattctcttctatcaatgtacacataaaggttttgttttgctttgcttgttgtgaattaaaatggggagaaaatgatgtgttagctatcacccagtcatgtgtctttttagtcataggttagcttttcaagacacttcctgcatctctgacctgttgcacctctgttatcttggcacctctgttatcttagcagcaagcacctgcctcagctgacccttgagccataacccatgtaagtcactgcagggctgaacctctctttgagcctaacagtagaataataattatttttattgaatagtgttaatgtgtcaatgttgaaatgtgcctcagtgtgtcttcctcaaccacatccctatagaggatgttttcttaatagcaatgtgtttttgttttaagaaagtccacacaatttcaaatacacattttctttactaaagtttattgaccagttttgaagtgatccttgttttcagttaaactatctttaataatggtaaataacatattttgtaggttgttgtatatttaatattctctgcaagaacacataaggaacaatacatggacctttaaatatttgtcattgtgaaataaaataacaaggaaaggtgatttcaggtgtactttattcaatacatatatacaagaagttattactataacattaaatttgcaggaaaaaagaaaccactggattattctgcttctattccagagggcttattccaaagggccagtgtgcaaaatatgaatccaagatggcattgtggaaagacgctgtacctcctgtgataaaattactttggtggtgcttttttctcatgtatctcgggaaactaaaaatctgaattgtattcagtggccttttccaaatgaagctcctgaaaagtacatcaagtctaaagtgaaccagctaactcattaagactggaatcatgagcaacaatggagcagacctaacctttggttacatctcctgttttgtagctatccttttgtttggctcaaattttgtgccacttaaaaaatttgatactggtgatggaatgtttctccagtgggttctttgtgctgccatatggttggttgccttggttgtcaatctgatattacattgtccaaagttttggccttttgcaatgcttgggggctgcatttgggcaacagggaacattgctgttgtcccaattatcaaaaccattggtttaggccttggaatcttaatctggggatcatttaatgccttaactggctgggcaagctcaaggtttggctggtttggattggatgcagaagaagtatcaaatccgctgctaaattacattggagctgggctatcagtagtaagtgctttcatatttttgttcatcaaaagtgaaataccaaataacacgtgttccatggataccactccattaataacagagcatgtgagtatagtatgagagacaacttgatttgaaacataaaattaagataaatggataatacataaattttaaacacagatgaaaaagtggtgtttgctcatcactcctggctatgtaaaatatcttagcttatttattatgggtaggtctatgtagcaatcaatcaatatttccgcagttgagcttctcagcaagcacacgggtttatttattttgattaacagatctctactaggtgatatatatataaccccatttttgtaatgatttaaagattcctacaatagaggaaccctaaatactgtagaggaatgtgaaaataactttagaaagtcagaggaaggaggttttgaagttggtccaggggagaatagaccataggaggccaagaaaggtaagtgaagtcctatgagaataggaactggtatcccattctacccgaagtgaaaaacagaaaatatgataggagtcactgttttgatcttgaagaatctaaatcagtctggaatagtaaatctgaatgaaacaggagcaacttttaaaagggacctgataaagcgcaagtgtcagtagctacatatacaaaagtgacttcagggcaaagcctcattgtcatgaacccaggctctaatccttctcatctcaagaaatctctcctgtctgccctgggccagtgctatccagctgccctctgaatccagcgctcctcacccccagtggggtattgccccttggcagggtgcttatttaccccttacttcaaaattaatcttttctcctttccttcttcccctatccaaacttttatcaactaaaaccttagttaaattgacactaaagttgaatagtaattagcttaagtgtaaagagaagaggtttattaatccacaggcatctctaatcagggaaatgtttcagggagaagggaggagttggctttgggaaagggttccttgcctgcttcagggatccagacacctcctgcccaaccatcctccaaaacaatggaacaaaataataaaataaatgcagcttggtaaaagatacacagtaggctaactgcctgagatttttctaggcaataagtttaaagatccataaacagcatgattgatgggtacagaaccatgcatcatgagctccttatgatgaaagaaaccgttattgccaaaggaaaacttgacttagcacatgacaaagaattcaaatctactttcttgtctcttacaaaaataataggattataacatcaagaacacttcagttggccaggcgtgatggctcatgcccgtaatcccagcactgtgggaggtcaaggtgggcagatcacctgagttcaggagttcaagaccagcctgtccaacatggtgaaactctatctctactaagaatacaaaaaaaaaaaaaagtgatcaacacaacccaagacccctgttcctgggtggataaactttctacagtacaccaccgcatagtgggctgcagtcttgcagtgatatctggagtactctatggatctacatttgtgccaatcatctacatcaaggaccacagcaaaagaaatgatagtatatatgcaggggcaagccaatatgatttagactatgtgtttgcgcacttcagtggcatctttcttacaagtactgtctactttctggcctactgcatagccatgaaaaatagtcctaaactatatcctgaagcagtcctaccaggattcctgtcaggagtactttgggctatagctacctgctgttggttcatagcaaatcactctctgagtgctgtggtcagttttccaataatcactgctggtccaggatttatagctgcaatgtggggtatcttcatgtttaaggaaataaagggtctacaaaactacctattaatgatacttgcattttgcatcatcttgactggagccttatgcactgctttttctaaaatctaacaatgacaaaaccagcaggtggcagcagtagttaagagaacgcgtctatcggacagcggagagatcatgctgagaaaagagtgcattttcatatagcaaatggatctcagccactgttggagtgggtaaatgatttttttccccaaaaatgtgagaatgaaggaagattgagtttcattcaagtataaaaatgaaaatttcttctgatgaactgtttatgaaggtagtactttactgggtgactaaaatgtctacattattatagcattacatacgaggatgctctttttaccacagtatgtacctagtgttgcataatctagaacacagtatagagtccatatacaaagaagttacagtccatatttctcacctattaccccagtgaagtgaggcagaaataccttgggcgaggagggagagccttaccttctaatggaattagattccaaagatatttggatcctttgtttcataaagtaaatgcatagttggtaactaaatgttaaaaaggccattttattattgttagccaaaacttctgtttatttcaagttaatatcgcccaactctacatcatctacccattttagctcataatgcttttgattatcgccagataaagtccattctcagagaacaaaaatttttcatcattgagaaaatgtgcataacataatacatacatacacaagtatattcacgtacataaatacacacagatatgttgctaaagtgagattgtaggttatcagtaacaatttaaaggaaacaaccactcttttgaatgtacaacttttttttctgaaatacacttttctaaaaccctcttaactggaggtttcctgttttcttcttgttttaactggtggtttccagtaggcaaaataaaatgacaggcatgctagttttttttttttttttttttttttaagaaaactgaaattaagccaggcagggtggcgcactactataatcccagctgctggggcggctgaagtaggagggtcacttagcccaagagtgcaaatctgccagcctaggcaacatagcaaggtcccatctctaaaaaagaaatttaatttaaatttgtaagaaaaaagaaaactgaaacagaactgccagtacaatgtttgttgcaattgtttccaaaactttgagataacgaaacccctattcaaatgtaaattttacccattcccacctgatagtactgtttattactttgctatgcaggagaaacaaaacagctttttatttgtgtgtatactctgaagtcaatgtgcatgggttaaatcccacctctgcttcattttatttgtgtggctttggacaagttcctaagccctctgtgtcaggcccctcattaacaaaatggagtttatgatggcatctacctcacatggttattgtgtggttgaaattagttcaaatctgtaaagtatgttgatgagtatctggtacttggcaaacactatataattgttagctttattattatgtgttgtttgaaggggaaaaaagtttttgtagattggagaacaccatgtaagagctactaagctcaccaccttcccatccaaacaattattactcctctaaatgaatactacttaaaagtgatggagcttctgtttgtttattgaattgctaatacaaataaatatttgactataacttcttatactcattttaattttaacctgaaatgtcattaaattatgctgataaactttgaataaattgtgatacaaaag

SEQ ID NO: 71 - DNA, 4846 bp, Homo sapiens
agccagcccttgccgtggccggagccgagcggcgcatccgggccggagaagaggacgacgacgaggtcctcgaagtggacccgtttgcgaagcgccagggagaaggaggagcggacgcatcgtagaaaggggtggtggcgcccgaccccgcgccccggcccgaagctctgagggcttcccggcccccactgcctgcggcatggcccggggctcggcgctcccgcggcggccgctgctgtgcatcccggccgtctgggcggccgccgcgcttctgctctcagtgtcccggacttcagcgggccggattctcggcaccctgcgggggtggaggagggcgggcggggccttcaggcccaggagcgccagagacctatggggttcgcctgaagcccccggaatgtgtgagacacttcttactagtaaatgggcttcagtatcccccatccctgcactcctgcaggaaggtgagaatcgggacagtcgcaggctgggagacgctctgcttttcctgcgtcctgctgggagctgcgcgctccaggtatcctggcctgccgccctagccggcccaaggtgaagtggaggttctggatccgaacgaccctttaggaccccttgatgggcaggacggcccgattccaactctgaaaggttactttctgaattttctggagccagtaaacaatatcaccattgtccaaggccagacggcaattctgcactgcaaggtggcaggaaacccaccccctaacgtgcggtggctaaagaatgatgccccggtggtgcaggagccgcggcggatcatcatccggaagacagaatatggttcacgactgcgaatccaggacctggacacgacagacactggctactaccagtgcgtggccaccaacgggatgaagaccattaccgccactggcgtcctgtttgtgcggctgggtccaacgcacagcccaaatcataactttcaggatgattaccacgaggatgggttctgccagccttaccggggaattgcctgtgcacgcttcattggcaaccggaccatttatgtggactcgcttcagatgcagggggagattgaaaaccgaatcacagcggccttcaccatgatcggcacgtctacgcacctgtcggaccagtgctcacagttcgccatcccatccttctgccacttcgtgtttcctctgtgcgacgcgcgctcccggacacccaagccgcgtgagctgtgccgcgacgagtgcgaggtgctggagagcgacctgtgccgccaggagtacaccatcgcccgctccaacccgctcatcctcatgcggcttcagctgcccaagtgtgaggcgctgcccatgcctgagagccccgacgctgccaactgcatgcgcattggcatcccagccgagaggctgggccgctaccatcagtgctataacggctcaggcatggattacagaggaacggcaagcaccaccaagtcaggccaccagtgccagccgtgggccctgcagcacccccacagccaccacctgtccagcacagacttccctgagcttggaggggggcacgcctactgccggaaccccggaggccagatggagggcccctggtgctttacgcagaataaaaacgtacgcatggaactgtgtgacgtaccctcgtgtagtccccgagacagcagcaagatggggattctgtacatcttggtccccagcatcgcaattccactggtcatcgcttgccttttcttcttggtttgcatgtgccggaataagcagaaggcatctgcgtccacaccgcagcggcgacagctgatggcctcgcccagccaagacatggaaatgcccctcattaaccagcacaaacaggccaaactcaaagagatcagcctgtctgcggtgaggttcatggaggagctgggagaggaccggtttgggaaagtctacaaaggtcacctgttcggccctgccccgggggagcagacccaggctgtggccatcaaaacgctgaaggacaaagcggaggggcccctgcgggaggagttccggcatgaggctatgctgcgagcacggctgcaacaccccaacgtcgtctgcctgctgggcgtggtgaccaaggaccagcccctgagcatgatcttcagctactgttcgcacggcgacctccacgaattcctggtcatgcgctcgccgcactcggacgtgggcagcaccgatgatgaccgcacggtgaagtccgccctggagccccccgacttcgtgcaccttgtggcacagatcgcggcggggatggagtacctatccagccaccacgtggttcacaaggacctggccacccgcaatgtgctagtgtacgacaagctgaacgtgaagatctcagacttgggcctcttccgagaggtgtatgccgccgattactacaagctgctggggaactcgctgctgcctatccgctggatggccccagaggccatcatgtacggcaagttctccatcgactcagacatctggtcctacggtgtggtcctgtgggaggtcttcagctacggcctgcagccctactgcgggtactccaaccaggatgtggtggagatgatccggaaccggcaggtgctgccttgccccgatgactgtcccgcctgggtgtatgccctcatgatcgagtgctggaacgagttccccagccggcggccccgcttcaaggacatccacagccggctccgagcctggggcaacctttccaactacaacagctcggcgcagacctcgggggccagcaacaccacgcagaccagctccctgagcaccagcccagtgagcaatgtgagcaacgcccgctacgtggggcccaagcagaaggccccgcccttcccacagccccagttcatccccatgaagggccagatcagacccatggtgcccccgccgcagctctacgtccccgtcaacggctaccagccggtgccggcctatggggcctacctgcccaacttctacccggtgcagatcccaatgcagatggccccgcagcaggtgcctcctcagatggtccccaagcccagctcacaccacagtggcagtggctccaccagcacaggctacgtcaccacggccccctccaacacatccatggcagacagggcagccctgctctcagagggcgctgatgacacacagaacgccccagaagatggggcccagagcaccgtgcaggaagcagaggaggaggaggaaggctctgtcccagagactgagctgctgggggactgtgacactctgcaggtggacgaggcccaagtccagctggaagcttgagtggcaccagggcccggggttcggggatagaagccccgccgagaccccacagggacctcagtcacctttgagaagacaccatactcagcaatcacaagagcccgccggccagtgggcttgtttgcagactgggtgaggtggagccctgctcctctctgtcctctgacacagagagctgccctgcctaggagcacccaagccaggcagggggtctggcagcacggcgtcctggggagcaggacacatggtcatccccagggctgtatacattgattctggtggtagactggtagtgagcagcaaatgcctttcaagaaaataggtggcagcttcactccatgtcatatatggagtgaatatttcaaaacgttgggaataagggcctgcaaaaggcagcgaggaggcacctcgggtcttgaggttcctgacaaccgatctggtctgttggtttgaggatgaaggggctccatttctgctgcctccctgctgagaatattctccctttagcagccaaagattcgctggaacggaggctgccctctgctgcctgttggggtcggaagacaaggggcttctgaaatgggagttcctgagatacaacaaaatgtgtgccttcaaagaaactgacagctttgtatttggtgaaatggttttaattatactccatgtgtattttgcccactttttttgggaattcaagggaaagtgtttcttgggtttggaatgttcagaggaagcagtattgtacagaacacggtattgttatttttgttaagaatcatgtacagagcttaaatgtaatttatatgtttttaatatgccattttcattgaagtattttggtcttaagatgactttagtaatttaactgtttatgttacccacgttgggatccagttggtcttggtttgcttctctctgtaccacgtgcacatgaggtccattcattttacagcccctgttacacacagacccacaggcagccgtctgtgccccgcacacattgttggtcctatttgtaaatcccacacccggtgtatccaataaagtgaaacaaagcatgtggttgtaaggatgcgaggcagcgggaggcagtgctggatgacggagacgccaaacgctttgttgtggcataatgtgtctggagttggttcctgccggtgggttcgtggtctcgctgacttcaaggatgaagccaccgactttcgcgttatgccacgggaccccagcctgcactgccatgtgacttcaaccgcatgacagaccctgggcccagagcactcagactcatgaacaaaatagattcagcattcccatatttgaaatgggaagaagtttcatgtccattctggcttcatgtggttggaagaggaagccccatgaatatttttatggatgccccagtgctgttgagtgcctatcaacaccaccacgagcttggccacttcacatcaacagcagatttaatttgggatctctaaacactatttgtggttgtgtagacagaaagaatttttctaataaaataaaaattaaatgtg

SEQ ID NO: 72 - DNA, 3165 bp, Homo sapiens
ggcggcgtcatgtgatccgcttccctgctcctttaagcgtccacaggcggcggagcggccacaatcacagctccgggcattgggggaacccgagccggctgcgccgggggaatccgtgcgggcgccttccgtcccggtcccatcctcgccgcgctccagcacctctgaagttttgcagcgcccagaaaggaggcgaggaaggagggagtgtgtgagaggagggagcaaaaagctcaccctaaaacatttatttcaaggagaaaagaaaaagggggggcgcaaaaatggctggggcaattatagaaaacatgagcaccaagaagctgtgcattgttggtgggattctgctcgtgttccaaatcatcgcctttctggtgggaggcttgattgctccagggcccacaacggcagtgtcctacatgtcggtgaaatgtgtggatgcccgtaagaaccatcacaagacaaaatggttcgtgccttggggacccaatcattgtgacaagatccgagacattgaagaggcaattccaagggaaattgaagccaatgacatcgtgttttctgttcacattcccctcccccacatggagatgagtccttggttccaattcatgctgtttatcctgcagctggacattgccttcaagctaaacaaccaaatcagttaagtgtactctcctctcatccctttcttccctttgagcattgccctctttgggttctttttgagccaattctaataaaagtaaaaatggtaatagtgagaaaatgcagaagtctccatggacgtttccctggcttaccgtgatgacgcgtttgctgagtggactgaaatggcccatgaaagagtaccacggaaactcaaatgcaccttcacatctcccaagactccagagcatgagggccgttactatgaatgtgatgtccttcctttcatggaaattgggtctgtggcccataagttttaccttttaaacatccggctgcctgtgaatgagaagaagaaaatcaatgtgggaattggggagataaaggatatccggttggtggggatccaccaaaatggaggcttcaccaaggtgtggtttgccatgaagaccttccttacgcccagcatcttcatcattatggtgtggtattggaggaggatcaccatgatgtcccgacccccagtgcttctggaaaaagtcatctttgcccttgggatttccatgacctttatcaatatcccagtggaatggttttccatcgggtttgactggacctggatgctgctgtttggtgacatccgacagggcatcttctatgcgatgcttctgtccttctggatcatcttctgtggcgagcacatgatggatcagcacgagcggaaccacatcgcagggtattggaagcaagtcggacccattgccgttggctccttctgcctcttcatatttgacatgtgtgagagaggggtacaactcacgaatcccttctacagtatctggactacagacattggaacagagctggccatggccttcatcatcgtggctggaatctgcctctgcctctacttcctgtttctatgcttcatggtatttcaggtgtttcggaacatcagtgggaagcagtccagcctgccagctatgagcaaagtccggcggctacactatgaggggctaatttttaggttcaagttcctcatgcttatcaccttggcctgcgctgccatgactgtcatcttcttcatcgttagtcaggtaacggaaggccattggaaatggggcggcgtcacagtccaagtgaacagtgcctttttcacaggcatctatgggatgtggaatctgtatgtctttgctctgatgttcttgtatgcaccatcccataaaaactatggagaagaccagtccaatggcgatctgggtgtccatagtggggaagaactccagctcaccaccactatcacccatgtggacggacccactgagatctacaagttgacccgcaaggaggcccaggagtaggaggctgcagcgcccggctgggacggtctctccataccccagcccctctaactagagtggggagcatgccagagagagctcaatgtacaaatgaatgcctcatggctcttagctgtggtttcttggaccagcggcatggacatttgtcagtttgccttctgacggtagcttttggaggaagattcctgcagccactaatgcattgtgtatgataacaaaaactctggtatgacacattttctgtgatcattgttaattagtgacatagtaacatctgtagcagctggttagtaaacctcatgtgggggtggggtgggggtgtattccttgggggatggtttgggccgaatggggagtggaatatttgacatttttcctgttttaaattctaggatagattttaacatcctttgcggtcccagtccaaggtaggctggtgtcatagtcttctcactcctaatccatgaccactgtttttttcctatttatatcaccaggtagcccactgagttaatatttaagttgtcaatagataagtgtccctgttttgtggcataatataactgaatttcatgagaagatttattccaccaggggtatttcagctttgaaaccaaatctgtgtatctaatactaaccaatctgttggatgtgggttttaaaaaatgtttgctaaactacccaagtaagatttactgtattaaatggccttcgggtctgaaaagcttttttaacttcttgcttaaaatgcgttttattttgataagatacttcaaatagcctccaaaagtgtagatccaatcatttaaataaacctgtatgtatatgcatatgtgtacatgcatatcccctcctgctaaaactcatacagaatgcaactcccatgtaaatcgagggaagattgtgctttgtttgtttcggaactttatcaagaattgttcagcgcttcgaaatattccttcatcaatgacaacgcagcttctggtatttgagtcaacaaggcaacacatgtttatcagctttgcatttgcagttgtcacagtcacattgattgtacttgtatacgcacacaaatacactcatttagcctttatctcaaaatgttaaatataaggaaaaaagcgtcaacaataaatattctttgagtattgtctta

SEQ ID NO: 73 - DNA, 1047 bp, Homo sapiens
atggacaacatcacctggatggccagccacactggatggtcggatttcatcctgatgggactcttcagacaatccaaacatccaatggccaatatcacctggatggccaaccacactggatggtcggatttcatcctgttgggactcttcagacaatccaaacatccagcactactttgtgtggtcatttttgtggttttcctgatggcgttgtctggaaatgctgtcctgatccttctgatacactgtgacgcccacctccacacccccatgtactttttcatcagtcaattgtctctcatggacatggcgtacatttctgtcactgtgcccaagatgctcctggaccaggtcatgggtgtgaataagatctcagcccctgagtgtgggatgcagatgttcttctacgtgacactagcaggttcagaatttttccttctagccaccatggcctatgaccgctacgtggccatctgccatcctctccgttaccctgtcctcatgaaccatagggtgtgtctcttcctgtcatcaggctgctggttcctgggctcagtggatggcttcacattcactcccatcaccatgaccttccccttccgtggatcccgggagattcatcatttcttctgtgaagttcctgctgtattgaatctctcctgctcagacacctcactctatgagattttcatgtacttgtgctgtgtcctcatgctcctcatccctgtggtgatcatttcaagctcctatttactcatcctcctcaccatccacgggatgaactcagcagagggccggaaaaaggcctttgccacctgctcctcccacctgactgtggtcatcctcttctatggggctgccatctacacctacatgctccccagctcctaccacacccctgagaaggacatgatggtatctgtcttctataccatcctcactccagtggtgaaccctttaatctatagtcttaggaataaggatgtcatgggggctctgaagaaaatgttaacagtggaacctgcctttcaaaaagctatggagtag

SEQ ID NO: 74 - DNA, 2586 bp, Homo sapiens
gctcctcagagtcaacagctgttgcagcatgagcgatacgcttggttctcctaactagcaccttcccctctcccctgactcagctggtagcccctcctccccgcacctgcccaaaggtcactggacaggcatggaggacacagagagagagagtgctgtgtattccttccccgctactgtcctgtcctcagctaacttgctctgggacagcttccccagggctacagatactgcactcagctgactgtcctttcttctgggcccctggtcccagagcagagctgacaaaggagattcctgagagagcaccttcttatcacagaaagtgctgagccaagagctcctagctgccccttttgcagatgtgaagggccagtgaaccttggacccagatggttgcttaatactcctttccccctccctcactccttcctttgcgggctgcctcacctcctccacccttcttgcttaaatccataggcatttgtctggccttcccttttactgctggctgggaaggaggagcatcagaccacagatcctggaaggcacttctctccctgactgctgctcacactgccgtgagaacctgcttatatccaggaccaaggagtgagtggcaatgccaggaagctggtgaagggtttcctctcctccaccatggttgacagcactgagtatgaagtggcctcccagcctgaggtggaaacctcccctttgggtgatggggccagcccagggccggagcaggtgaagctgaagaaggagatctcactgcttaacggcgtgtgcctgattgtggggaacatgatcggctcgggcatctttgtttcccccaagggtgtgctcatatacagtgcctcctttggtctctctctggtcatctgggctgtcgggggcctcttctccgtctttggggccctttgttatgcggaactgggcaccaccattaagaaatctggggccagctatgcctatatcctggaggcctttggaggattccttgctttcatcagactctggacctccctgctcatcattgagcccaccagccaggccatcattgccatcacctttgccaactacatggtacagcctctcttcccgagctgcttcgccccttatgctgccagccgcctgctggctgctgcctgcatttgtctcttaaccttcattaactgtgcctatgtcaaatggggaaccctggtacaagatattttcacctatgctaaagtattggcactgatcgcggtcatcgttgcaggcattgttagacttggccagggagcctctactcattttgagaattcctttgagggttcatcatttgcagtgggtgacattgccctggcactgtactcagctctgttctcctactcaggctgggacaccctcaactatgtcactgaagagatcaagaatcctgagaggaacctgcccctctccattggcatctccatgcccattgtcaccatcatctatatcttgaccaatgtggcctattatactgtgctagacatgagagacatcttggccagtgatgctgttgctgtgacttttgcagatcagatatttggaatatttaactggataattccactgtcagttgcattatcctgttttggtggcctcaatgcctccattgtggctgcttctagaggcttttctttgtgggctcaagagaaggccatctccctgatgccatctgcatgatccatgttgagcggttcacaccagtgccttctctgctcttcaatggtatcatggcattgatctacttgtgcgtggaagacatcttccagctcattaactactacagcttcagctactggttctttgtggggctttctattgtgggtcagctttatctgcgctggaaggagcctgatcgacctcgtcccctcaagctcagcgttttcttcccgattgtcttctgcctctgcaccatcttcctggtggctgttccactttacagtgatactatcaactccctcatcggcattgccattgccctctcaggcctgcccttttacttcctcatcatcagagtgccagaacataagcgaccgctttacctccgaaggatcgtggggtctgccacaaggtacctccaggtcctgtgtatgtcagttgctgcagaaatggatttggaagatggaggagagatgcccaagcaacgggatcccaaatctaactaaacaccatctggaatcctgatgtggaaagcaggggtttctggtctactggctagagctaaggaagttgaaaaggaaagctcacttctttggaggcacctgtccagaagcctggcctaggcagcttcaacctttgaacttactttttgaaatgaaaagtaatttatttgttttgctacatactgttccagacttttaaaggggacaatgaaggtgactgtggggaggagcatgtcaggtttgggcttggttgttttagaagcacctgggtgtgcctacctactcctcttttcttttaaaagggcccacaatgctccaatttcctgtctcctttagagagacatgaaactatcacaggtgctggatgacaataaaagtttatgttcctaaa

SEQ ID NO: 75 - DNA, 2890 bp, Homo sapiens
ctccgtcccaggggagaaggagaggcgtctgcagggggcagagaccgcagctacctgccgggtgcgccccccacccaggagcgctcgcttcgccccctttcctcccccgcccccacctccttattggtgctagtttgcagcgcccagctcctgcgccttcgcttcgcgtttgaatctggctcgccccttcgtattatgtctgcactccgaaggaaatttggggacgattatcaggtagtgaccacatcgtccagcggctcgggcttgcagccccaggggccaggccaggaccctcagcagcagcttgtgcccaagaagaagcggcagcggttcgtggacaagaacggccggtgcaatgtacagcacggcaacctgggcagcgagacaagccgctacctctcggacctcttcaccacgctggtggacctcaagtggcgctggaacctcttcatcttcattctcacctacaccgtggcctggcttttcatggcgtccatgtggtgggtgatcgcctacactcggggcgacctgaacaaagcccacgtcggtaactacacgccttgcgtggccaatgtctataacttcccttctgccttcctcttcttcatcgagacggaggccaccatcggctatggctaccgatacatcacagacaagtgccccgagggcatcatcctcttcctcttccagtccatcctgggctccatcgtggacgccttcctcatcggctgcatgttcatcaagatgtcccagcccaagaagcgcgccgagaccctcatgttcagcgagcacgcggtgatctccatgagggacggaaaactcacgcttatgttccgggtgggcaacctgcgcaacagccacatggtctccgcgcagattcgctgcaagctgctcaaatctcggcagacacctgagggtgagttccttccccttgaccaacttgaactggatgtaggttttagtacaggggcagatcaactttttcttgtgtcccccctcacaatttgccacgtgatcgatgccaaaagccccttttatgacctatcccagcgaagcatgcaaactgaacagttcgagattgtcgtcatcctagaaggcattgtggaaacaactgggatgacttgtcaagctcgaacatcatatactgaagatgaagttctttggggtcatcgtttttttcctgtaatttccttagaagagggattctttaaagttgattactcccagttccatgcaacatttgaagtccccaccccaccttacagtgtgaaagagcaggaggaaatgcttctcatgtcgtcccctttaatagcaccagccataactaacagcaaagaaagacataattctgtggaatgcttagatggactagatgatattactacaaaactaccatctaagctgcagaaaattactggaagagaagactttcccaaaaaactcttgaggatgagttctacaacttcagaaaaagcctacagcttgggagacttgcccatgaaacttcaacgaataagttcagttccgggcaactcagaagaaaaactggtatctaaaaccaccaagatgttatctgatcccatgagccagtctgtggctgatttgccaccaaagcttcaaaagatggctggaggagcagctaggatggaagggaaccttccagccaaattaagaaaaatgaactctgatcgcttcacataacaaagcactcccttaggcattatttaatgtttgatttagtaatagtccaatatttggcgatgaggtaattctccctaaggaatctgaaagtatattttcctcccagttctacaagcatatttgagaacccttcctttcccaagtattgcgaatgtgcagaaagcaacagttacggagggaggacatcataaggaagttattaacgggcatgtattatcacatcaagcatgcaataatgtgcaaattttgcatttagttttatggcatgatttatatatggcatatttatattgtatattctggaaaaaaaatatatatatatatttaaaggggagatactctccctgacatttctaacatatgtattaagccaaacatgagtgaatagctttcagggcgataaaactaaatatatgtctgtgtgtgtgtgtgtatgtatacacacatatacatatatatatacacatacatacacatacatacatacatacatatatatctgataaaattgtgatgttttgttcaaagttgtagttcttgtgcatgtttactttattagagtaggaaggctactggcattaattattaataccaaatattttagccttaaatttttgtcattttaaaatctgatttaatgttttctgctgtttaaggtcttgggaggctttcaattgtattttatatgagagaatcacacaagtttgtgctatctatggccctgcaaaaatataaccattacatgtttaaattgtaaattttagagcataccagtactcagtatagcattgaacatttcttatgatttttaaaagttgctagtactggggagaaataattgttgattaatttgagaattattcctttcctagactaattaaaatctggaaatctgttttgtatatgatctaatacaaagatgagctctgaacaaacactgaatcatgttaatagacagtagccaagttatattgaatatatcagaatctgtgtgaagttacacaattaattgtccctgtttcaaactgagtaaattggaaacattttctttctttttctggaaattttgtccattttaaaaaccaatcattttaagaagacatgacaatgcaatgaaacagatgataaatatttatgcttaaaatatgtatgtctaattgagtctcttttttattctgttttcttgttt

SEQ ID NO: 76 - DNA, 3659 bp, Homo sapiens
agaattgcgctgtccacttgtcgtgtggctctgtgtcgacactgtgcgccaccatggccgtgactgcctgtcagggcttggggttcgtggtttcactgattgggattgcgggcatcattgctgccacctgcatggaccagtggagcacccaagacttgtacaacaaccccgtaacagctgttttcaactaccaggggctgtggcgctcctgtgtccgagagagctctggcttcaccgagtgccggggctacttcaccctgctggggctgccaggagctcccctcaggagcgcgttagcttcacaccttcggcagcaggagggcggcagcttctcgcaggcggcagggcgggcggccaggatcatgtccaccaccacatgccaagtggtggcgttcctcctgtccatcctggggctggccggctgcatcgcggccaccgggatggacatgtggagcacccaggacctgtacgacaaccccgtcacctccgtgttccagtacgaagggctctggaggagctgcgtgaggcagagttcaggcttcaccgaatgcaggccctatttcaccatcctgggacttccagccatgctgcaggcagtgcgagccctgatgatcgtaggcatcgtcctgggtgccattggcctcctggtatccatctttgccctgaaatgcatccgcattggcagcatggaggactctgccaaagccaacatgacactgacctccgggatcatgttcattgtctcaggtctttgtgcaattgctggagtgtctgtgtttgccaacatgctggtgactaacttctggatgtccacagctaacatgtacaccggcatgggtgggatggtgcagactgttcagaccaggtacacatttggtgcggctctgttcgtgggctgggtcgctggaggcctcacactaattgggggtgtgatgatgtgcatcgcctgccggggcctggcaccagaagaaaccaactacaaagccgtttcttatcatgcctcaggccacagtgttgcctacaagcctggaggcttcaaggccagcactggctttgggtccaacaccaaaaacaagaagatatacgatggaggtgcccgcacagaggacgaggtacaatcttatccttccaagcacgactatgtgtaatgctctaagacctctcagcacgggcggaagaaactcccggagagctcacccaaaaaacaaggagatcccatctagatttcttcttgcttttgactcacagctggaagttagaaaagcctcgatttcatctttggagaggccaaatggtcttagcctcagtctctgtctctaaatattccaccataaaacagctgagttatttatgaattagaggctatagctcacattttcaatcctctatttctttttttaaatataactttctactctgatgagagaatgtggttttaatctctctctcacattttgatgatttagacagactccccctcttcctcctagtcaataaacccattgatgatctatttcccagcttatccccaagaaaacttttgaaaggaaagagtagacccaaagatgttattttctgctgtttgaattttgtctccccacccccaacttggctagtaataaacacttactgaagaagaagcaataagagaaagatatttgtaatctctccagcccatgatctcggttttcttacactgtgatcttaaaagttaccaaaccaaagtcattttcagtttgaggcaaccaaacctttctactgctgttgacatcttcttattacagcaacaccattctaggagtttcctgagctctccactggagtcctctttctgtcgcgggtcagaaattgtccctagatgaatgagaaaattattttttttaatttaagtcctaaatatagttaaaataaataatgttttagtaaaatgatacactatctctgtgaaatagcctcacccctacatgtggatagaaggaaatgaaaaaataattgctttgacattgtctatatggtactttgtaaagtcatgcttaagtacaaattccatgaaaagctcactgatcctaattctttccctttgaggtctctatggctctgattgtacatgatagtaagtgtaagccatgtaaaaagtaaataatgtctgggcacagtggctcacgcctgtaatcctagcactttgggaggctgaggaggaaggatcacttgagcccagaagttcgagactagcctgggcaacatggagaagccctgtctctacaaaatacagagagaaaaaatcagccagtcatggtggcctacacctgtagtcccagcattccgggaggctgaggtgggaggatcacttgagcccagggaggttggggctgcagtgagccatgatcacaccactgcactccagccaggtgacatagcgagatcctgtctaaaaaaataaaaaataaataatggaacacagcaagtcctaggaagtaggttaaaactaattctttaaaaaaaaaaaaaagttgagcctgaattaaatgtaatgtttccaagtgacaggtatccacatttgcatggttacaagccactgccagttagcagtagcactttcctggcactgtggtcggttttgttttgttttgctttgtttagagacggggtctcactttccaggctggcctcaaactcctgcactcaagcaattcttctaccctggcctcccaagtagctggaattacaggtgtgcgccatcacaactagctggtggtcagttttgttactctgagagctgttcacttctctgaattcacctagagtggttggaccatcagatgtttgggcaaaactgaaagctctttgcaaccacacaccttccctgagcttacatcactgcccttttgagcagaaagtctaaattccttccaagacagtagaattccatcccagtaccaaagccagataggccccctaggaaactgaggtaagagcagtctctaaaaactacccacagcagcattggtgcaggggaacttggccattaggttattatttgagaggaaagtcctcacatcaatagtacatatgaaagtgacctccaaggggattggtgaatactcataaggatcttcaggctgaacagactatgtctggggaaagaacggattatgccccattaaataacaagttgtgttcaagagtcagagcagtgagctcagaggcccttctcactgagacagcaacatttaaaccaaaccagaggaagtatttgtggaactcactgcctcagtttgggtaaaggatgagcagacaagtcaactaaagaaaaaagaaaagcaaggaggagggttgagcaatctagagcatggagtttgttaagtgctctctggatttgagttgaagagcatccatttgagttgaaggccacagggcacaatgagctctcccttctaccaccagaaagtccctggtcaggtctcaggtagtgcggtgtggctcagctgggtttttaattagcgcattctctatccaacatttaattgtttgaaagcctccatatagttagattgtgctttgtaattttgttgttgttgctctatcttattgtatatgcattgagtattaacctgaatgttttgttacttaaatattaaaaacactgttatcctacagtt

SEQ ID NO: 77 - DNA, 1516 bp, Homo sapiens
gaccgaagaggctggtaagtcctcaagctggcaggtggtcgggggagcggccggagaggagctgccgggagttcgtgccctgcagggacatgacaccagtggcatatcacggccatggggtctcagcattccgctgctgctcgcccctcctcctgcaggcgaaagcaagaagatgacagggacggtttgctggctgaacgagagcaggaagaagccattgctcagttcccatatgtggaattcaccgggagagatagcatcacctgtctcacgtgccaggggacaggctacattccaacagagcaagtaaatgagttggtggctttgatcccacacagtgatcagagattgcgccctcagcgaactaagcaatatgtcctcctgtccatcctgctttgtctcctggcatctggtttggtggttttcttcctgtttccgcattcagtccttgtggatgatgacggcatcaaagtggtgaaagtcacatttaataagcaagactcccttgtaattctcaccatcatggccaccctgaaaatcaggaactccaacttctacacggtggcagtgaccagcctgtccagccagattcagtacatgaacacagtggtcagtacatatgtgactactaacgtctcccttattccacctcggagtgagcaactggtgaattttaccgggaaggccgagatgggaggaccgttttcctatgtgtacttcttctgcacggtacctgagatcctggtgcacaacatagtgatcttcatgcgaacttcagtgaagatttcatacattggcctcatgacccagagctccttggagacacatcactatgtggattgtggaggaaattccacagctatttaacaactgctattggttcttccacacagcgcctgtagaagagagcacagcatatgttcccaaggcctgagttctggacctacccccacgtggtgtaagcagaggaggaattggttcacttaactcccagcaaacatcctcctgccacttaggaggaaacacctccctatggtaccatttatgtttctcagaaccagcagaatcagtgcctagcctgtgcccagcaaatagttggcactcaataaagatttgcagaatttaatacagatcttttcagctgttcttagggcattataaatggaaatcataacgtggttctaggttatcaaaccatggagtgatgtggagctaggattgtgagtgacctgcaggccattatcagtgcctcatctgtgcagaagtggcagcagagagggaccatccaaatacctaagagaaaacagacctagtcaggatatgaatttgtttcagctgttcccaaaggcctgggagctttttgaaaagaaagaaaaaagtgtgttggctttttttttttttagaaagttagaattgtttttaccaagagtctatgtggggcttgattcacccttcatccattggctggaacatggattggggatttgatagaaaaataaaccctgcttttgattca

SEQ ID NO: 78 - DNA, 1260 bp, Homo sapiens
atgctggcagctgcctttgcagactctaactccagcagcatgaatgtgtcctttgctcacctccactttgccggagggtacctgccctctgattcccaggactggagaaccatcatcccggctctcttggtggctgtctgcctggtgggcttcgtgggaaacctgtgtgtgattggcatcctccttcacaatgcttggaaaggaaagccatccatgatccactccctgattctgaatctcagcctggctgatctctccctcctgctgttttctgcacctatccgagctacggcgtactccaaaagtgtttgggatctaggctggtttgtctgcaagtcctctgactggtttatccacacatgcatggcagccaagagcctgacaatcgttgtggtggccaaagtatgcttcatgtatgcaagtgacccagccaagcaagtgagtatccacaactacaccatctggtcagtgctggtggccatctggactgtggctagcctgttacccctgccggaatggttctttagcaccatcaggcatcatgaaggtgtggaaatgtgcctcgtggatgtaccagctgtggctgaagagtttatgtcgatgtttggtaagctctacccactcctggcatttggccttccattattttttgccagcttttatttctggagagcttatgaccaatgtaaaaaacgaggaactaagactcaaaatcttagaaaccagatacgctcaaagcaagtcacagtgatgctgctgagcattgccatcatctctgctctcttgtggctccccgaatgggtagcttggctgtgggtatggcatctgaaggctgcaggcccggccccaccacaaggtttcatagccctgtctcaagtcttgatgttttccatctcttcagcaaatcctctcatttttcttgtgatgtcggaagagttcagggaaggcttgaaaggtgtatggaaatggatgataaccaaaaaacctccaactgtctcagagtctcaggaaacaccagctggcaactcagagggtcttcctgacaaggttccatctccagaatccccagcatccataccagaaaaagagaaacccagctctccctcctctggcaaagggaaaactgagaaggcagagattcccatccttcctgacgtagagcagttttggcatgagagggacacagtcccttctgtacaggacaatgaccctatcccctgggaacatgaagatcaagagacaggggaaggtgttaaatag

SEQ ID NO: 79 - DNA, 6302 bp, Homo sapiens
acagtagtgaatcgtagcatgttagagttagaaggttcagtgttgatggagttattgaagaaatgatggagtaagagactcttttctaagcaactcaagtttgcagtgattcaggcctacttctgaagagacagccttttatctcaatgaatgacacagggtctgagattactgacatgcttcctgctatacccggcactgattccaaatgggactgggtctgcagaaaaaccagcagatactccctctgaggaagaggactttggtgatccaaggacatatgacccagatttcaaggggcctgttgccaacagactaaactgggaactccgtgagagaaagcatctcatctgtgtggttcaccaacgtttcatagcatctgccacagtatccggcacaaaatagtaggagttgtacagatgttctgtgctgtatgatcttcctactgtgtattattggctacattgttttaggacttgtggcctgggtacatggggaccccagaagagcagcctatcctacagacagccagggccacttttgtggccagaagggcactcccaatgagaacaagaccattttgttttactttaacctgttacgctgtaccagtccctccgtgttgctaaacctacagtgccctaccacacagatctgtgtctccaagtgcccagaaaaatttttaacctatgtggaaatgcaacttttgtacacaaaagacaaaagctactgggaagactaccgtcagttctgtaagaccactgctaagcctgtgaagtctctcacacagcttttactggatgatgattgtccaacagcgatttttcccagcaaaccttttctccagagatgtttccctgacttctctaccaaaaatggcactttaacaataggaagtaagatgatgtttcaagatggaaatggagggacaagaagtgttgtagaactcgggattgctgcaaatggtatcaataaacttcttgatgcaaagtcacttggattgaaagtgtttgaagactatgcaagaacttggtattggattctcattggcctgacgattgccatggtccttagttggatatttttgatacttctgaggttcatagctggatgcctcttctgggtcttcatgattggtgtgattggaattataggttatggaatatggcactgttaccagcagtacaccaatcttcaggaacgcccaagttctgtattaactatctatgacatcgggattcagactaacataagcatgtactttgaactgcaacaaacatggttcacatttatgataatactctgcatcattgaagtgattgtcatcctcatgctgatcttcctcaggaatcgaatccgagtcgccattatcctgctgaaggaaggaagcaaagccattggatatgttcctagtacattagtctatccagctttaactttcattttgctctcaatctgcatttgctactgggtcgtgacagcagttttcttggcgacatcgggggtacctgtatacaaagtcatagctccaggggggcattgtatacatgaaaatcaaacctgtgacccagagatttttaatacaactgaaattgccaaagcttgccctggggctctgtgtaactttgctttctatggtggaaagagcttgtaccatcagtacatccctaccttccatgtatacaacttatttgtctttctctggcttataaacttcgtcattgcattaggtcagtgcgcccttgctggtgcattcgctacttattactgggccatgaaaaaacctgatgacatcccacgatatccactttttactgcatttggacgagccatacgatatcacacaggatccctagcatttggatctttaattattgcattaattcaaatgtttaaaattgtactagaatacttggaccaccgtcttaaacgtacccagaacacattgtctaaattcctacaatgctgcctgagatgctgcttctggtgtttggaaaatgcaataaagtttttaaacagaaatgcctatattatgattgcaatatatggcagaaacttctgcaggtcagcaaaagatgctttcaatctgctgatgagaaatgttttgaaagttgcagttacagatgaagttacatactttgtattattcctggggaaacttctagttgctggaagtataggtgttctggccttcctattcttcacacaaagactgccagtgattgcacaaggaccagcatctttaaattactactgggtacctttgctgacagtcatttttgggtcttacctgattgcacatgggttcttcagcgtctatgcaatgtgtgttgaaacaattttcatctgcttctgtgaagatctggaaagaaatgatggatctacagaaaaaccctacttcgtaacccctaacctgcatggaattctgatcaagaagcaactagttccccagaagcagaaagagtagaaaagctccaaacagtgtcactcatttttaagtagaagttgtgtaaattaggttgattgtaatttggaaatgttgcttttgagtaatgtgaaatttctgtgcttaattctaagaagtcagcacctggtactacctgaggtgtcaggtatttgatgacattagctgctgtctactttatagacagtggtcccagctaaagatcaaaatgttaatgtcaaacgttttttaaaatctgtagccgagagtgttttaataacttttataactcagcgtgctgtttccattgcagcactttaatagcctttctttttataagtgtatatttgtaaaggatattcaggcaatttttgaaaacactataaatgtgtaattaattagccataaaatattgatttatagttaaccagcatatggtactaaatttgtaaatatggtgctatggttatatttatactgttcaagctggtggacaactctctaaactgtgattaaacttgtattaatggttccctaggaagtatatttcagtgagtcatgtccataacaaacatagatgttaatgttatataggttctacggagagcattactgggtaaaaaatactatggaaccttcagagcccattctgttttagtgaaatcatgtttatattgaagtcgaatctgagttctggagtgtcatttccaacaacatgaacctctgtccatggtgaaaatattctgaacaaaactgaaattgttacataactcatgccttttgtctttaacccaaatttcttattcccactatatagaaaatcaatatgaatttgtttcagaagagtgattatatcttttcatgagtatacctgtatttctagattaaagagattgtgtggctttgttctacagaaggtttgattttgtctcacctttcagtgaggaaagagaaaagaaagacacttcagattttaccctaaggaaatatactgttggcgctccatcatctaatacctttatgaggggcatactgtgggttaggaactctctctctgcagggcttaggaggaaagttgttgccacctgccaccgctggccgcctgaggtttctgatagtcatgtgtaagttttgaatggcagaacaaagcatgaatcagacacacatcttgcctagccatcccctgtgtgcaaatgtgtatgatgtggttaaccatgtaaaaatgcaccccaaaaggagcattgaatcaatttgtattttcttggcttttaccttaaacttgtatataaggattatttatatattgacagaaaggaacatgttgatctgaatatcactcatatatccaagaaaagagtcagaaatgtattgttgtgttatagattgatctaaatacgtattaattatcttcaagtgtagacacctagatttaaactgactctgtggcagattaattaatagcaataagccaatgaatagggaagatttttaatatataatgactaccagcttgttcttggcttacattcttgagattattgtattcaaaagtgtcagttggcttcacattttggcaaagagccttctgcattcttattctccttgaagcataatgcagataatgacaacttatctttctagattagtcttttattattcaacaagacaaaggccacaacaaaggactagtagaatagtgacctctacctgagaatttgttataactatagatgtttgtgctctgcccaagagattctgatatactgtgatttgatgtgagccacgatgtgaattattataaagttctctagttgattctgatacacataaaagttgaaaaattggccatgtgtggtgtctcacgcctgtaatcccagcactttgggagtccaagatggacagatcactggagcctaggagttccagaccagtctaggcaacatggtgaaaccccatctatctttataaaaaatataaaagttagccaagtgtggtggtgcacacctgtagtctcagctacttgggaggctgaaatgtgagggtcacttgagcccaagagatcgaggctgcagtgagccatgatcacaccactgcactccagcctgggtgacagagcaaaaccctgtttaaaaaaaaaaagttgaaaaaatcacttgtggaagatttagaaagaaatgatggttctactgcaagaccttattatgtgagtcaacctttgctgaagattttccaggaggaaaatccacaaactaggaagcagtagaagagcaaactggtcgtcctacagctgtgtgttaccttttctccatctgctgtgtctgtgcaacatttgtttcataagtgctttgtgtttagcaacactgtattcacgaccttgttggcttgcatttgcatgttttataccaaagcttatactgtactatgtgaagccatcagaagtcgcaagggaattgttaataacataaaacatttttatactaagatcatttgttttgtaattcgtttttaaagagtggcttggatgttttgaaaatactactgaatatgttaatattcttttaaatcttagattgaaaaatgatacattacttaaattgatagctcctaatatatttttaaaattacaactaaaagaagacttcttctgcagggaaaattggtcagcaaagtgaaattaaaaattttaaagtttttcccactctcgttggacagtaaatcagtgaaaggactgccccagttgagagtttgctctctttaagtatagaatgtttcctcttaaacaaattgccaatcatccagcctttactacttagccctctgacaaagtgccttactggctatttaatattacccagcttttatgggcaagtttacaaacattgttttttaaaaaattaaaacctgcaatgtttcgtgattaaaacaagtcttattgcatttgtttcactcttagctcactgattggaaaacatttgtcattttgctctgtttgatatcctcactattatggaatacattgtgcagctaaacaatttcccttgcgcctagtggacattcatgaatgtgtactacacgcaagaagaaacaaaccccgaaagaacacttgttggatttctttgtttttttttttactaaaagagaagttttaaaatgaaatgttttctatagtagatctttgaaaatacaataggtataatactgcatttctcagtgttttacaaagatcagaaagagaaacttctaggaattgcaaagggaaactttactcctcgaaagggtgctcacagatgtcatgtactgaatagctcccttttaaatgatcatttattttcatcaaagcctgttctatatatgccacttcattttctaacttttggtatgaaaaaatcagtttacttacagtatgttaattgtattgtactactataaacaggaacataatttccaattcagttttaaataattttaccagtactactaacttttaaggaaattaattcagttggttactcagtgtttgttacagaaagagtccagaaaagtattcaccctaagagaatgtcaatcatataatgataatttgtgaaagctttgagaatcaatcatcagtaagttactatcagtttataaaatattatcacatttgtttaaatgtgactttagatacttttatgccaaaaataaactcacatgagcacatgacagtctgagctctataatcagtgtgcttctgctgtgcagaaatgttagaaacgtattgtctaaatatctttgataattaaaatgtttaatatttaatgaaatttgttgttacttgttttaaatcttttttcttttaataaagatttaaataagaaat

SEQ ID NO: 80 - DNA, 3388 bp, Homo sapiens
accttcccatggcgagtgctgcagctctatcagcagaacctttctctccgtgtgaggaagagcttttttcccccctttccttttttttttttttcctttccccttaatcagaagcactgaatgaaagccaatcagagagagctcgcccccgttttcttcggttccctgctgtccagagttaaaagtgatgctgagaaagagcttgagttagattgaagtagaatcagtgatagaaaataacagccgaaaacaaacaaaaaggggacatagtgacaatttctcctgggttattttggctggaaccaacttccattatccagaagctgataaaaaagctttgggaaacatgaacaaaacattgatgaaatgttggaaaccagttgaaacacagtaaaaccaactgggtaaaataggaccacttctcttcatctacactgggatttgtcaagaagtgaactatgacaatacatcaatttttgctactgtttctattctgggtatgcctgccacatttctgctctccagaaataatgttcagaaggacgcctgtgccacagcaaagaattttaagttcacgtgtaccaaggagtgatggcaaaattctccatcgtcaaaaacgtggttggatgtggaatcaatttttcttacttgaagaatatacaggatctgattatcagtacgtaggcaagctacattcagaccaagataaaggagatggatcactcaaatatatcttatctggagatggagctggtactctttttattattgatgaaaaaacaggtgatattcatgccacaaggcgaattgatagggaggaaaaggccttttatactctacgcgcacaagctattaacagaagaactctgaggccagtagagccagagtcagagtttgtgatcaaaattcatgatatcaatgacaatgagccaacgttcccagaagaaatctatacagctagtgttcccgaaatgtctgttgtaggtacttctgtggtgcaagtcacagctacagatgccgatgacccttcatatgggaacagcgccagagtcatttacagcatacttcaagggcagccctatttctctgtggagcctgaaacaggtatcatcaggactgctttaccgaacatgaacagagaaaacagagagcaataccaagtggtcatccaggccaaagacatgggcggccagatgggaggcttatcggggacaaccactgtgaacatcacgctgacagatgtcaatgacaacccaccacgtttcccccagaacactattcatcttcgagttcttgaatcctccccagttggcacagccattggaagtgtcaaagcaactgatgctgacactgggaaaaatgctgaagtagaataccgaattattgatggtgacggtactgatatgtttgacatcgtgactgagaaggacacacaggaaggcatcatcactgtgaaaaagccactcgactatgagagccgaagactttatactctgaaagtcgaagcagaaaacacccatgtagatccccgtttttattacctaggaccatttaaagatactaccatagtgaaaatctctatagaagatgtggatgaacctcctgtttttagtaggtcctcctatctgtttgaagttcatgaagatattgaagtgggcacaatcattggtactgtaatggcaagggacccagattctatttccagccccattagattttccttggatcgccatactgaccttgacagaatctttaacattcattcaggaaatggatctctttatacatcaaaacctcttgaccgtgaactatctcagtggcataatcttactgttattgctgctgaaatcaacaatcccaaagagacaacacgcgtggctgtttttgtgagaattttggatgttaatgacaatgccccacagtttgctgtgttctatgacacttttgtatgtgaaaatgccagaccagggcagctaatacagactataagtgcagtagacaaagatgaccctttaggtggacagaaattttttttcagtttagctgctgtcaatccaaacttcacagtacaggataatgaagataatactgccagaatcttaaccagaaaaaatggattcaatagacatgaaatcagtacctatctcttgcctgtggtgatatcagacaatgattacccaattcagagcagcacaggcacactgaccattcgagtgtgtgcttgtgacagccaaggcaacatgcaatcctgcagtgctgaagccctgctcctccctgccggcctcagcactggggccttgatcgccatcctcctctgcatcatcattctactggttatagtagtactgtttgcagctctgaaaagacagcgaaaaaaagagcctctgatcttgtcaaaagaagatatcagagacaacattgtgagctataacgatgagggtggtggagaggaggacacccaggcctttgatatcggcaccctgaggaatcctgcagccattgaggaaaaaaagctccggcgagatattattccagaaacgttatttattcctcggaggactcctacagctccagataacacggacgtccgggatttcattaatgaaaggctaaaagagcatgatcttgaccccaccgcacccccctacgactcacttgcaacctatgcctatgaaggaaatgattccattgctgaatctctgagttcattagaatcaggtactactgaaggagaccaaaactacgattacctccgagaatggggccctcggtttaataagctagcagaaatgtatggtggtggggaaagtgacaaagactcttaacgtaggatatatgttctgttcaaacaagagaaagtaactctacccatgctgtctccacttcacaatatttgatattcaggagcattttcctgccagtcagcacaattttttttctcatttacttcttaatttgttcattaattacattaattctttcctgtaggatgtctcatggaatatatatgacattttatttaatcacttccaagagccaaagctatggaaatacagtgttgtccatcttagtaaataaaagataatttcagaaacatgaacaggatagttctcccttaagcaacctcacaaacaagccgcttctgttaggtacatgtcctgcccttgcaaatgaagcttttaaaaaggtgaagaaaaattttacagtatatcctgttctgtacattaaattaaaaaaacaaaaatgtacatgtgatgttagtaggtgtgatatgcaacctggtatacagacatttgtgcaatttcatttcatcaaattctatctgctaatgttttatatttatatttttgtatttatttttaaaaaaataaaccagtttttacaacta

SEQ ID NO: 81 - DNA, 1578 bp, Homo sapiens
cttttgaggtagagtcagagtagggaaaacaactaatctgttttccaaacaggttttcataaataactgacaggagatgggctgtttttatggaagtattaacccaaatgatgggtgttaatcattaaacctttttggtggtggctcgcttgtttctctgatattctaatccgggtcacagaatggctaaggcagatttaagtgcagcgtggattttttttttctcactttgccttgtgttttccaccctgaaagaatgttgtggctgctcttttttctggtgactgccattcatgctgaactctgtcaaccaggtgcagaaaatgcttttaaagtgagacttagtatcagaacagctctgggagataaagcatatgcctgggataccaatgaagaatacctcttcaaagcgatggtagctttctccatgagaaaagttcccaacagagaagcaacagaaatttcccatgtcctactttgcaatgtaacccagagggtatcattctggtttgtggttacagacccttcaaaaaatcacacccttcctgctgttgaggtgcaatcagccataagaatgaacaagaaccggatcaacaatgccttctttctaaatgaccaaactctggaatttttaaaaatcccttccacacttgcaccacccatggacccatctgtgcccatctggattattatatttggtgtgatattttgcatcatcatagttgcaattgcactactgattttatcagggatctggcaacgtagaagaaagaacaaagaaccatctgaagtggatgacgctgaagataagtgtgaaaacatgatcacaattgaaaatggcatcccctctgatcccctggacatgaagggagggcatattaatgatgccttcatgacagaggatgagaggctcacccctctctgaagggctgttgttctgcttcctcaagaaattaaacatttgtttctgtgtgactgctgagcatcctgaaataccaagagcagatcatatattttgtttcaccattcttcttttgtaataaattttgaatgtgcttgaaagtgaaaagcaatcaattatacccaccaacaccactgaaatcataagctattcacgactcaaaatattctaaaatatttttctgacagtatagtgtataaatgtggtcatgtggtatttgtagttattgatttaagcatttttagaaataagatcaggcatatgtatatattttcacacttcaaagacctaaggaaaaataaattttccagtggagaatacatataatatggtgtagaaatcattgaaaatggatcctttttgacgatcacttatatcactctgtatatgactaagtaaacaaaagtgagaagtaattattgtaaatggatggataaaaatggaattactcatatacagggtggaattttatcctgttatcacaccaacagttgattatatattttctgaatatcagcccctaataggacaattctatttgttgaccatttctacaatttgtaaaagtccaatctgtgctaacttaataaagtaataatcatctctttttgattgtg

SEQ ID NO: 82 - DNA, 3722 bp, Homo sapiens
ggaggagccgggcgcgcctgccacgcaaaactaccgggctggcagggcggcgggcgcggtgcgcgatcccgggtggcggcggcaacggcggtggtgacggcggcgactgcagcggccggctctcacctctcccctgtgcacccgcatctcgccgcgccgccgagcagccagcagtccccgggtcgcccagcccacgcgcgcacggccgagcccagcgcacaatagcggcgacagccatggggaaaccggcgaggaaaggatgcgagtggaagcgcttcctgaagaataactgggtgttgctgtccaccgtggccgcggtggtgctaggcattaccacaggagtcttggttcgagaacacagcaacctctcaactctagagaaattctactttgcttttcctggagaaattctaatgcggatgctgaaactcatcattttgccattaattatatccagcatgattacaggtgttgctgcactggattccaacgtatccggaaaaattggtctgcgcgctgtcgtgtattatttctgtaccactctcattgctgttattctaggtattgtgctggtggtgagcatcaagcctggtgtcacccagaaagtgggtgaaattgcgaggacaggcagcacccctgaagtcagtacggtggatgccatgttagatctcatcaggaatatgttccctgagaatcttgtccaggcctgttttcagcagtacaaaactaagcgtgaagaagtgaagcctcccagcgatccagagatgaacatgacagaagagtccttcacagctgtcatgacaactgcaatttccaagaacaaaacaaaggaatacaaaattgttggcatgtattcagatggcataaacgtcctgggcttgattgtcttttgccttgtctttggacttgtcattggaaaaatgggagaaaagggacaaattctggtggatttcttcaatgctttgagtgatgcaaccatgaaaatcgttcagatcatcatgtgttatatgccactaggtattttgttcctgattgctgggaagatcatagaagttgaagactgggaaatattccgcaagctgggcctttacatggccacagtcctgactgggcttgcaatccactccattgtaattctcccgctgatatatttcatagtcgtacgaaagaaccctttccgatttgccatgggaatggcccaggctctcctgacagctctcatgatctcttccagttcagcaacactgcctgtcaccttccgctgtgctgaagaaaataaccaggtggacaagaggatcactcgattcgtgttacccgttggtgcaacaatcaacatggatgggactgcgctctatgaagcagtggcagcggtgtttattgcacagttgaatgacctggacttgggcattgggcagatcatcaccatcagtatcacggccacatctgccagcatcggagctgctggcgtgccccaggctggcctggtgaccatggtgattgtgctgagtgccgtgggcctgcccgccgaggatgtcaccctgatcattgctgtcgactggctcctggaccggttcaggaccatggtcaacgtccttggtgatgcttttgggacgggcattgtggaaaagctctccaagaaggagctggagcagatggatgtttcatctgaagtcaacattgtgaatccctttgccttggaatccacaatccttgacaacgaagactcagacaccaagaagtcttatgtcaatggaggctttgcagtagacaagtctgacaccatctcattcacccagacctcacagttctagggcccctggctgcagatgactggaaacaaggaaggacatttccgtgagagtcatctcaaacactgcttaaggaaaagagaaacactaatggccaagtgtacatttgatttgatatacagacctccagattattttctatatttggattcacagcctttgcgctctgggttttgggatttgggtgtggggtaagttgaagggaaatcaatttaaaggaaagttctattatctgggttttagaaattctataagagacaaagtttggaagtacataaagtaataactgttagaattaggtaatggatatgaaagagaaaatgctttctcatgcatagacaagtgttttgggtttttaaaaaaaatattctgtcattggttacaaatttttactcaggctttctattggcatggatttcctttgacctctcacttttttataaattataatgcatctaaaccacctgtccccagttaatgtgccaaaatgtcaatttttaacttatctccagccaatttcaaagaaaacagaccagcatagttctgcaataacagttttaagatgggcatagggtttggaagaaagggagaaggattcttttttcaatgtactgtattgggacgctggtaactgttaacccagtgttcagcatagagctatatatatatatatatgtatatatttattattttcatataatttgccagacagagatcagaattgaaccgtcaatgtgaaataaagagttctccttgtacttgaataataaccacgattccaacccaggtctgctttggggcttatcagaactcctttctaaggagcactagaatgagaaatcatgttgttcgatcgtttcacatctgtatatcagctctaaagcagagatgtattatggtgatactccaaggtggcatagccattcatttacaacttccagatttgagctgcctggagggaatccatatcagctctgcataagattatatacaaagctgtcactcacaaaaggctggatgtgctttcatccaactggaaggctttattcttccaagttcattcatactcaaagaggccagtactttgccatccttgcacttctgttatcagggcccaaataacagtggcaagctaccaactaagttgtattttaataaagattccatgggttgaacaagccacgttgcagaaaaagagcttcccctaacctgggttgttgcagagtaaatcccacgacataagctggtatcagtggttcgggggaaatagttccattctatgactcttgtctcctcctccaggaggactgttctaactagtaatcttggccctattcattacatcctctgcttgtcattctgctaatttatgaagatagtttattatagtctgtacttcagttctcatcttgtaaataatgcttaacataaacttgtacttacactgaaatccaaaatagtcatgtttctgcagtattctgtagccaacttaaacctgtgctttcatgtttaagaaatgagaaattgtgccaaagatagcagaagagtagataagtgctcagtattgacgacctacatctgaaatctacaacataatgatactgaattgttatgtaaacatcataaatagtaaataatgattcaatgtgaattttaaaatgcaaatattgctattgtttataggaaataaatctaaatataaatgaaattgaatcagtaatttatcttgggctaaatggttctaccccttactaggttgccccaattagtggcactagttggcagagctgttcatgagctgccagttatcattttggagtcagtttgaaaccagcctcttaacacactgctgttaactcataaaagagaagagtgttccatttcagtctcaataaacacttccctcattctttc

SEQ ID NO: 83 - DNA, 6822 bp, Homo sapiens
gcggccgcggcccctttaaggagcagctctgcggtaacccgagcccgcagtccgggcgggcgcgacggccgccgcggtagctggagcctccgcgactgcacctccaagcggcccggaacccgcggcttccctggctcccgtgagcatctcaccgggcggcactggccagcgccagccctcgggccggcccggatgagcagactcctgtagacacccgccgccctctcccggctcggcgcagccgccgcccgcgcgcgactcgccccgggacccggcacaggttgaagaaatatggagatcaacacaaaactgctcatcagtgttacctgtatcagctttttcacctttcagcttcttttctactttgtaagttactggttttcagcaaaagtttctccaggtttcaatagtctcagcttcaaaaagaagattgaatggaactcaagggtagtatccacatgccattctttggtggttggtatttttggcctgtacattttcttattcgatgaggctactaaagctgatccactttggggtggtccatcacttgcaaacgtgaatattgctattgcctcaggctacctcatttctgatttgtccattataattttgtattggaaagtgattggtgacaaattttttataatgcatcattgtgcgtccctgtatgcatactaccttgtactgaaaaatggagtgctggcatacattgggaattttcgcctgcttgcagagctttccagcccgtttgtgaatcagcggtggttctttgaagctctgaagtatcccaagttttctaaagctatcgttatcaatggaatactcatgacagtagtattcttcatcgtgcggattgcctcaatgcttcctcattatggcttcatgtattccgtgtatggaacagaaccctacataaggcttggagttttaatccagttatcctgggtcattagttgtgttgttttggatgtgatgaatgtcatgtggatgatcaaaatttcaaaaggttgcatcaaagtcatctctcacatcagacaagagaaagccaaaaatagtcttcagaatggaaaacttgattaaaagagtgctaccgataagcaaacttcattactacccagcatatctgctgataggatgaattcttggcatgttcttgtgtacctttcttaattataattgttattcaggatttcagtgtcattttttttaaaccttagaaaagagaaggccgggcacggtggctcatgcctgtaatcccagcactttgggaggccaaggtgggtcgatcactgaggtcaggagttcgagactagcttggccaacatggtgaaacctcatctctactaaaaatacaaaaaaaagtagctgggcgtggtggttggcgcctgtaatcccagctactcgggaggctgaggcaggagaatcgcttgaacccgagagacggaggttgcagtgagctgatattgtgccactgcactccagcctgggcgacagagcaagactctgtctcaaaaaaaaaaaaaagagagaaactaaaattaaaatttagttttcatcccaagatgtcttttctgcctttcttttgccttatttacaagcatggataaaaatcttaaaggtttaaataaaaatgatcaatataatggtgaatcttttgagaaatctcttaactgcattggtattttttctctgtgaaagatgactatgataatctggtacaaatggttttatgtcaccaattttgctgcaagaatgggaactgcttttaaatctgtaaatagctcttaacatttgttgtatgcactcttttcttactatggctgtcaacacttgtgtagggtttaatttctaaattgttggcatgttctttttctcaggctattcagaagtaacaacatttttcatttcagacatgcaatcacctattaatgatgaaatattttaccactttgggaatatttaattagtttagtcatggagaatacttcccacattttaagattttttcaaatatcactgtcatttctattttagcattttatcaaattattgcttttttattttataataaggcttaagacagattatagacctccttaagagatgagtttcttcttctaaaaatgcatgttgatagaggactatttaggctaatcggaggaatcattaagaaagaaagttttaacactgtttatccctatctgctttccttgcactttttctgtgaaaaatattttctgtttgcaaaatcttccctgagttctgaacccagcaccatcagtaccaaagtcttatgcaatatgtatttattatgctcctgaaataggcctcttcttgatgagacccaaactattacaaaaatatcagtattcatattttactcacaattcatacccgtgcttacttagttggcattttagtgctttgaatttctatcttaaagcacagaaaaaaaaaggtaatttaatccaagtattctatcatcaaaattattgtctgattatatgaagataaatgactggcgactctggttgtgtgtgtatgtgttttgcttttactttaattcttgcaatccaaatatagaattatatatttatctattattgcctttattctttaagcacttgagtttaatgattattcttacctgagaaaggaagaaatttaattctaccagtgatgaatacttgaaattaattgaactcataccaaaagatgtaatccagtttctcagtttgaaggagaacgtttgactcactttcattgttcatgctagctgaatataatcaagacttttgatttgatttgcttttattattcaatgcagatagagcctgataagttttagaacatttaaagaagattgaaatctcagtcagtaactaaatgataaaatgagattgattggcttatactaggtacatttatttttgaaagaattaatgtaaaataatagttatttttaaagcagctaatattacactgataatttgttgctaaatttagtgctgtccacatcataggtgcttaaatatgtactggttaactagaggggggtaggaaagcaagcggttttatcttgttcttacctttttgcaggaaaagtggctttaaaaaaatttatataataaaactattttggaaattcattcttttagaaagagaccttgagataaatattttttgactctggatatttctatagttctgaacacagattttaaacccactatcaaaatgaaaacaatataaagctatattagtgagtctccatgtagcagtttgtttttatagttactgtttcatgcttaaaacttcattcttactttcattaatgttacccttcactggtatagccactcactaaataagtatatttaaaacatcaaaattttgaactaaagtttgtgattctcttattcagcaatccttatcttatgctggctgcatgagttaattcaacatccagattaaatatcctgaagtaggttctatatatttcctcatacaacagacatggaatggaaatgccactagaaactgccctgctacttttaagtctgacctttgcaggaggtacactttgctgttctatgattgtattcacctacctaaaatacaaatgaagacagaacatatcatttactgcacgatgaatttttcatttattaaatgaaaaacgtttgctagacattttaaatattaagtattttgactacacggattaatttaaatgattctatcaggcattctgatatttaacaactctattaaaatatttatagaaaaataaaagcaaattgatataaatttttgagcaattctatttttgtagaaaaaagataacctgtaattataaagatgttttttgaatgtgtagtatcctagaaaataaaagttcttgtgaaacttaaaaaatgaatgaaaaccaactaatagcatgcaagatcatagatcctgcattaaatttttatttgtgaaaatttgaaaattatgagctataacttataaagtttgccttcttatgtctaaaatcttttaaaggattatttgcatttatgtaaaactggaaatgaagttatatatgagtgcaaagaaattgacttctgctcaaatatgtgttgataccctacagtaaattgaattaaatttttatcccaactgtttgattttattatttcatggactagccttacgttaagtgaaatactatttatgttgttaccacccctaagagtgactctgatatattatggatgacccaggacggtcttaaaggtctagttttaaaaactgcctagtttgtaagtatttgaatccagttcttttctaaattttaataatttgactcaaaatttttgctacagggtcaacttttaaattgtatatttcctctgaggcacactgggcatttggagaatggttcttcactggtgtagagagccaggtttactgttggttgcaccatctgttatcaggcatgcagaaacatttttcttctggagaaacagaggggaaggtgttgttacagtgtacatgtttcctctgtgtcgtttttaagggaaataaacatgttccaaaagatgctgttaaaataaatatttgaacacgttttctgtttctaggttgctcttaattccaaacatttaaataaatgtgcatttgaatagctttaggtggtttagtctattagctgaaatggaaaagttcatgtattgacatcatcaataatacttcataaaggtttatgtatttttatgtgtttggattccataagaagttgaacttagataattttatcaagagtagcacagtgtttctcaggtgcgagccagcatacagcgagacccttcatgtgtctctggatgcacatatatcttcccaaccttaaacacagctcattgaaatacattaaagctactgaaagtgagttctgatgcaaaacacatgtgaggtgtgtaggaacaatgaaaagctagaggatctggagttagaggaggcattgagagtgcttttcccttaaacgccgtgatagtcctcccttgatctagaagtattctctttgaatccttccatctcttcctcctggtacaccagatgacttcatcagcatctccctcttttatgctaacacctttcgctgtcaacttttgagacctccccatgtatctataagcttcccagtctcttatggcaaatttaaaagtttacaaataggttctctcattgaaaaaaagcattgtagtaaagtttaaagtggagctcagacaaatcatgacttattaagagactacaggaagccattcagcatttaataataactgtttacaacatgaggcaaagctaataatgttatggttttattaagagatctgtcatctctgtttttcttaaactggtttaacagtcagagctttgtaatgtgtttcagctgaagatttattataggcttgtaaattatctaaatgttctttttagaccccatgacaggagcacagaggaactgagataactctgtgttatgagagggtggatgctggcttgtgccaaaattattttagagtcctgctctttagggaaaactttgctatggtaatgtttctttgaaaacaaatttaccagcaactgcgttacttggtgttttccaaagtacaacatccaaggcttgaaccttacccgtttctaggccagactaggccagcctctagttttgataataattcatacctttattggaatatattttggatagcagtgaagaattgaaagcagctcctaaagattggtttgtttgctttgaaaatgtttacacttattcactctaagcagtggaccattttgatatcaggccctatacataagaccaaaaccagaaatatttctaaatctcaaagatttataagtacagtacctctggctgaaaactcgttaaacatctttggatattttttctttatatctttatgtaattatttctgtaattaagtgtacattagggttatttgctacttaacaagcctaaaggtatagctgtatatagaatgtgctctgtgtttttctgtttcctgcttggtttgtttctggtatgactatgtctactttttatttaaggaattttgtgtagataatactctcactaacttgtaaataggataagttatgagattttttggtattagaatttgtaataataatgacttttagattttatttgaaaaagctacttggaaagcagtaaatagaactatagtgatatatatagatacatagatatatacttttttctgagaatgtataatatataattgtcaaagatttttggaagtctttcaaaatatacttaataccattttgagaacataccttctaatttatttccataaggctgaagaacttttatttacaaaatgtaagactagataatgtatgaatcagtgttactaggacttatcagtacttaaaatagcaacttggcattctttattttgtttcctggttgttttatttggagggataataaatgtctaagttatttccattaaaattttgaaatgtttgtatactttatgtgtgccattttaaagtatatgcaagttctaagcaataatctgcatgttatacaaggttgacatattttgtcctgaaatttttagttaacatttcaagaatgataaaatgaacaccctgtaaattacccttctccccctcccctccatgaaaaccttgggattttcttgtgctagaacactaccacaatgtggtgcaaagctttgtattttgtggaaaaaaacaataaaatcacaattatttagtgcaaaa

SEQ ID NO: 84 - DNA, 366 bp, Homo sapiens
gacccaggatccttgaggtgcccagtctgcttgtctatggaaggctgtctggaggggacaacagaagagatctgccccaaggggaccacacactgttatgatggcctcctcaggctcaggggaggaggcatcttctccaatctgagagtccagggatgcatgccccagccagtttgcaacctgctcaatgggacacaggaaattgggcccgtgggtatgactgagaactgcgatatgaaagattttctgcagctcaagccagtaggattacttgaggaacacaatgtgggagagaaagagcgtggtcaaggacaacaccaatgtgttcagctagactggcagaaacgagccgccacgggtgtaagt

SEQ ID NO: 85 - DNA, 12570 bp, Homo sapiens
cgccgccgccgccgccaccgcgggagccagagctgccgggaggagcggcatccgcgccagactggagcgggagggcggcggagggcagttgctgggaatttttcagccgagagggcgagcgatccggagagagaccccgagagcttgggagcggtagggcgtgcgagcgccgcagccagcggagcaaacctcgaaatagatctggaaagccaggctcccggaggaaatgggactgtgaacgaaccggagagcaagaagggaaggaagcgccgggattgctgatgtcagaggagcccggaaagtcgcgctggaaaaatctgaagacagccggggctctgcttcttcctcaggagagacaccgccggccgcccccacacgccccctcggcgcctccgggtgccccctgagagccggcgacagcgcccagccgggctgctgcggggcgacggaggactgaggggcgcgcggagcggagaccgaggagcgacttcaggaatacagataagtgtctggtggcttgacgtggattttaatgaatttggactccatgtggatttggtcgtctccctgattccgagctgcgggcagggagaggggcctcgcgccgccctcagcagccggcggcggccgaggtagaccgagcggggacggaaggacagaccgacgtcgccgagctggcgagggcttttccggctccggaatggcacatgtgggaatcccagtcttgttggctacaacatttttccctttcctaacaagttctaacagctgttctaacagctagtgatcaggggttcttcttgctggagaagaaagggctgagggcagagcagggcactctcactcagggtgaccagctccttgcctctctgtggataacagagcatgagaaagtgaagagatgcagcggagtgaggtgatggaagtctaaaataggaaggaattttgtgtgcaatatcagactctgggagcagttgacctggagagcctgggggagggcctgcctaacaagctttcaaaaaacaggagcgacttccactgggctgggataagacgtgccggtaggatagggaagactgggtttagtcctaatatcaaattgactggctgggtgaacttcaacagccttttaacctctctgggagatgaaaacgatggcttaaggggccagaaatagagatgctttgtaaaataaaattttaaaaaaagcaagtattttatagcataaaggctagagaccaaaatagataacaggattccctgaacattcctaagagggagaaagtatgttaaaaatagaaaaaccaaaatgcagaaggaggagactcacagagctaaaccaggatggggaccctgggtcaggccagcctctttgctcctcccggaaattatttttggtctgaccactctgccttgtgttttgcagaatcatgtgagggccaaccggggaaggtggagcagatgagcacacacaggagccgtctcctcaccgccgcccctctcagcatggaacagaggcggccctggccccgggccctggaggtggacagccgctctgtggtcctgctctcagtggtctgggtgctgctggcccccccagcagccggcatgcctcagttcagcaccttccactctgagaatcgtgactggaccttcaaccacttgaccgtccaccaagggacgggggccgtctatgtgggggccatcaaccgggtctataagctgacaggcaacctgaccatccaggtggctcataagacagggccagaagaggacaacaagtcttgttacccgcccctcatcgtgcagccctgcagcgaagtgctcaccctcaccaacaatgtcaacaagctgctcatcattgactactctgagaaccgcctgctggcctgtgggagcctctaccagggggtctgcaagctgctgcggctggatgacctcttcatcctggtggagccatcccacaagaaggagcactacctgtccagtgtcaacaagacgggcaccatgtacggggtgattgtgcgctctgagggtgaggatggcaagctcttcatcggcacggctgtggatgggaagcaggattacttcccgaccctgtccagccggaagctgccccgagaccctgagtcctcagccatgctcgactatgagctacacagcgattttgtctcctctctcatcaagatcccttcagacaccctggccctggtctcccactttgacatcttctacatctacggctttgctagtgggggctttgtctactttctcactgtccagcccgagacccctgagggtgtggccatcaactccgctggagacctcttctacacctcacgcatcgtgcggctctgcaaggatgaccccaagttccactcatacgtgtccctgcccttcggctgcacccgggccggggtggaataccgcctcctgcaggctgcttacctggccaagcctggggactcactggcccaggccttcaatatcaccagccaggacgatgtactctttgccatcttctccaaagggcagaagcagtatcaccacccgcccgatgactctgccctgtgtgccttccctatccgggccatcaacttgcagatcaaggagcgcctgcagtcctgctaccagggcgagggcaacctggagctcaactggctgctggggaaggacgtccagtgcaccaaggcgcctgtccccatcgatgataacttctgtggactggacatcaaccagcccctgggaggctcaactccagtggagggcctgaccctgtacaccaccagcagggaccgcatgacctctgtggcctcctacgtttacaacggctacagcgtggtttttgtggggactaagagtggcaagctgaaaaaggtaagagtctatgagttcagatgctccaatgccattcacctcctcagcaaagagtccctcttggaaggtagctattggtggagatttaactataggcaactttattttcttggggaacaaaggtgaaatggggaggtaagaaggggttaattttgtgacttagcttctagctacttcctccagccatcagtcattgggtatgtaaggaatgcaagcgtatttcaatatttcccaaactttaagaaaaaactttaagaaggtacatctgcaaaagcaaaattcgggccgacggtcccccccatggtggggtccagtacgagatggtctctgtgctcaaggacggaagccccatcctccgggacatggccttctccattgatcagcgctacctgtacgtcatgtctgagagacaggtcaccagggtccccgtggagtcatgtgagcagtatacgacttgtggggagtgcctgagctctggggaccctcactgtggctggtgtgccctgcacaacatgtgctcccgcagggacaaatgccaacaggcctgggaacctaatcgatttgctgccagcatcagccagtgtgtgagccttgcagtgcatcccagcagcatctcagtatctgagcacagccggttgcttagcctggtagtgagtgatgctcctgatctatctgcgggtatcgcctgtgcctttgggaacctgacagaggtggaggggcaggtgtccgggagccaggtcatctgcatctcacctgggcccaaggatgtccctgtcatcccgctggatcaagactggtttgggctggagctacagctgaggtccaaggagacagggaagatatttgtcagcaccgagttcaagttttacaactgcagtgcccaccaactgtgcctgtcctgtgtcaacagcgccttccgctgccattggtgcaagtaccgcaacctctgcactcatgaccccaccacctgctccttccaggagggccggatcaatatttcagaggactgtccccagctggtgcccacagaggagatcttgattccagtcggggaggtaaagccaatcacccttaaggcgcgaaatctgccccagccgcagtccggccagcgaggctatgagtgtgtcctcaacatacaaggagccatccaccgggtccccgctctgcgcttcaacagctccagcgttcagtgtcagaacagctcgtaccagtatgatggcatggacatcagcaatctggccgtggatttcgctgtggtgtggaacggcaatttcatcattgacaaccctcaggacctgaaagtccatctctacaagtgtgcagcccagcgggagagctgcggcctctgcctcaaggccgaccggaagtttgagtgtggctggtgcagcggcgagcgcaggtgcaccctccaccagcactgtaccagcccttccagcccctggctcgactggtccagccacaatgtcaagtgctccaaccctcaaatcaccgagattttgacggtgtctggaccgccggaaggagggacgcgagtgaccatccatggcgtgaacctgggtctggacttctccgagatcgcccaccatgtgcaggtggctggggtgccctgcacgcccctcccaggggaatacatcatcgctgagcagattgtctgtgagatgggccatgccctcgtgggaaccacctccgggccagtacgcctgtgtattggcgagtgtaagccagagttcatgacgaagtcccatcagcagtacaccttcgtgaacccttctgtgctgtcactcaacccaatccgaggtcccgagtcaggaggcactatggtgaccattaccggccattaccttggggctgggagcagcgtggcagtctacctgggcaaccagacctgcgagttctacgggaggtcaatgagtgagatcgtgtgtgtctcacccccatcatccaatggccttggcccggtccctgtttctgtgagtgtcgaccgagcccatgtggatagcaacctgcagtttgagtacatagatgaccctcgggtccagcgcatcgagccagagtggagcattgccagtggccacacacccctgaccatcacaggcttcaacctggatgtcattcaggagccaaggatccgagtcaaattcaatggcaaagaatctgtcaatgtgtgtaaagttgtgaacacaaccaccctcacctgcctggcaccctctctgaccacggactaccgccctggcctggacactgtggaacgcccagatgagtttggatttgtctttaacaatgtccaatccttgctaatttacaacgacaccaagtttatctactaccccaacccgacctttgaactgcttagccctactggagtcttggatcaaaagccaggatcgcccatcattctgaagggcaaaaacctctgccctcctgcctctggaggggccaaactcaactacactgtgctcatcggagagaccccttgtgctgtcaccgtatctgagacccagcttctctgcgagcctcccaacctcaccgggcagcacaaggtcatggttcacgtgggcgggatggtgttctcgcctggctcggtgagtgtcatctcagacagcttgctgaccctgccagccatcgtcagcatcgcggccggcggcagcctcctcctcatcatcgtcatcatcgtcctcattgcctacaagcgcaagtctcgagaaaatgacctcactctcaagcggctgcaaatgcagatggacaatctggagtcccgtgtggccttggagtgcaaggaagcttttgctgagctccagacggatatcaatgagttgaccagtgacctggaccgctcaggaatcccttacctggactatcgtacctacgctatgcgagtcctgttcccgggcatcgaggaccaccccgtcctgcgggagctggaggtacaaggaaacgggcagcagcacgtggagaaggccctgaagctctttgcccagctcatcaacaacaaggtgttcctgctgaccttcatccgcaccctggagctgcagcgcagtttctccatgcgcgaccggggcaacgtggcttcgctcatcatgaccggcctgcagggccgcctggaatatgccactgatgtcctcaagcagctgctctctgacctcatcgataagaacctggagaacaagaaccaccccaagctgctactccggaggacagagtctgtggctgaaaagatgctgaccaattggttcgccttcctcctgcacaagttcctaaaggagtgcgcaggggagccactcttcatgctatactgtgccatcaagcagcagatggagaagggccccattgatgccatcacgggcgaggcccgctactccctgagcgaggacaagctcatccggcagcagatcgagtacaagaccctgatcctgaactgcgtcaaccctgacaacgagaacagtccagagatcccagtgaaggtgttaaactgtgacaccatcacacaggtcaaggagaagattcttgatgccgtgtataagaatgtgccctattcccagcggccgagggcagtggacatggacttggagtggcgccaaggccggatcgcccgggtcgtgctgcaagatgaggacatcaccaccaagattgagggtgactggaagcggctcaacacactgatgcattatcaggtgtcagacaggtcggtggtggctctggtccccaaacagacctcctcctacaacatccctgcctctgccagcatctcccggacgtccatcagcagatacgactcctccttcaggtatacgggcagccccgacagcctgcggtcccgggccccgatgatcaccccagacctggaaagtggggtcaaggtgtggcatctggtgaagaaccatgaccacggtgaccagaaggagggtgaccggggcagcaagatggtgtccgagatctacctgacccggctactggccaccaagggcaccctgcagaagtttgtggacgacttgtttgagaccttgttcagcactgtgcaccggggcagcgctctccccctggccatcaagtacatgtttgatttcctagatgagcaggcagacaggcacagcatccatgacacagatgtgcggcacacctggaaaagcaactgcaggtggacaatttgacctttgatggggaagaatatcagtgggcagcagaaggggcacggcccgcatgcattctcaagtcttctctgcctttccccacagcctccctctgcgcttctgggtgaacgtgattaagaacccccagttcgtgtttgacatccacaagggcagcatcacggacgcctgcctctctgtggtggcccagaccttcatggactcttgttcaacgtcagagcaccggctgggcaaggactccccctccaacaagctgctctatgccaaggacatccccagctacaagagctgggtggagagatactacgcagacatcgccaagctcccagccatcagtgaccaggacatgaatgcctacctcgccgagcagtcccgcctgcacgccgtggagttcaacatgctgagtgccctcaatgagatctactcctatgtcagcaagtatagtgaggagctcatcggggccctagagcaggatgagcaggcacggcggcagcggctggcttataaggtggagcagctcattaatgccatgtccattgagagctgagaggaggagcctcgcattcctgggaagagggacctgtccaagctgtcacactgggagtctcagatggaaggacaagtgatggggatcaggccccagagcttgctgtcccctgagaccccatcctggggagaggggaggactcctctccctacgccagccaagtttcgtcatagccagttccagctgggagagacagtgggcgtcgtccatcctcagtgagaacaccagagaacccggggccgggagaaggtggttcttcaagccgagaggcacgagctggggacagttctgcctctgtgactgctgctttgcatgaaaactcatttgatgtatattggggaaataatgagaactttatttaatttttttaagaaaaagggaaaaaaacagaaataaaacaaaaagccgccctgttaatcccgtccaacttttgtttaattctgatttctgtctcccttccatcttttctcccattcctccttctttatataatgcctatttccaaatgccagagaaagcagagatgctgagagacattggagagaaaatgactgtctccttttccttgaaattaaaaaaaaaaaaaaaaagagaaagaggagaagaagaatgatgagcacaagtatgcaccaaacacttcgcaaaaacagaggccagtaaaacctggaattatcccggcagccagaggagtatggaacttccagaactttgcacaaattgcaaagccatcaagagctcaccctggctgactggaaactgagctttatctaccacacacctgtatattctcatcttttgagaggagatgtgtacctagatagtaccaatgctttttgctactgttttttgttttgttttatttaatcctaaacctcaacaaatgaggagctggtctttgatatgtttcctttcaatttccctaaagttactatgagaagtggggtgaggtgggcctctcccagaccagacacctggcagccctgcctcatatcaatccctgtcataaaccaggcaccctggggaaacggcctggaggtgtgtgggccaggcctccacgaggttccatttgaaagttgatttggagacataggtgtttgactttggagttcactccaatcatccagtggtccctggcaattaaaaagaaaacaaaaatcaaacactgtttacagcaagcaatacttgaagagcataggttacagaagctgcagtatttattattatgctttctttctttcattctctcgtgcctggagaggggagaccacccttcgctcatatacggaagctcctgaccatctgggcctacagcacttcctcagtagaaatgactgtggcatgcccacgttactaccttctgcctctctttctgcctctcacggacttgtgagtgtgaaggacaagtggatgacttctcactggactttccttctctgtctcttctgatgatgcctaaaactatggataaccaattctcctgagtgtagattccaaacaaagagaccaaagctccatgcccaggtccaaaggccccatagaagccagtgggagtcatcgagaggaaaggcgctctgtgagtgtcaggaccttggtggccaggatagccatcagagtgtccaggcctcccacattaccttggatccgagcagccagctccaactgttctgcaagcagcactggagtcagggggtaggaggacaagtggaagcaaaggtgtgggactggggaagacaaagaggaacaagctgcccttcctcacttttcaaagggtcaggaatcctaggctatgatgctgggaagctagaccagctcctccaagagagactagaccagggtcattttctctgttattaactctgggctccagcttctccgtgccctgctttacctccaagtggttccaatttccaaaggccctgctgaccacatgtgattcccaggagagggctgggggaggggagcgcagaggtctggcttccatccttggcgtgtagctttggatcgctgtctaaccacacagcagacgttgcccggtctccccagctctagtttcttgcctgaatgcggctgacaaatgggaagagaaaagcattcagcaaaatactcaggaaacttgctgttttcattataattcacaaccagccatgccaaggccactttcttttgaaaatccacttctttaaagtttctcaggccctattagtagcctgaaggaaatactaatgactggccttccgcactaagccaaagtgtttgctcttcatagcactcaaagcttatcagcgcagagcccataatttatggagataaaaggaaaggagatataggtaagaagagtgtgaccaggagaccttatgctacctgtaaaaaagttcagcccaccccatctaacttctgagctctgtttgggtgaagattttctggccgcatggctgctcagactggcatccaggctttgctccaccaagaagttaaaggcagtcggacatctcagtagcatctctaccagcccttaactcaatgcatctacctggcatctcccagcagttacttttggagacgattcactgcccctggggcgtttccttgaaggtttgtggagagcgtggagaatgatggggcaatggccaattggagggtggagagtgaagagccggagctggctgtgagtggtttggccacatttctcaggattccatgagagacttggggaacttgggctgacaaaggaagtagcctggggcatccttaaggaaggaattaagaaaagggaaaaagctggactcaagccacgccatgagggtgaaaggttataaggccctgccccctttccagctgcccacctgttcctcctccacacctcttcgctttgggccaccaagaaccaatgaagtccacaccctttggatgagaaaaagagggagttggttggcctctcttctccctgttatccaatttgaggatattttgaccttgggtaaggatgaagtgttaaagccacagctcctctccacaagaagccattcatcttgggggaggcagagagggaagtctctctccaaagtctatccagcttcgcttcgtttcattgatctgcacaagagacaatgctctggaaaaggaagaggaccccagaagggtgcttggcaagacagaggatgctaatgggcaatggagagcactccctccagctggcccctgctgctgcctcccgtcctctgcatggggtcaggtgcttctgtgcttgctgtcctacctctctccacagcagggctctcaaaaccattttgatcccccattggcagagggttcccctctttacagagttcagtcattaaaagcatggatcagctgttaatctcattggaggagggaactgtttcctgcattcattcatctgggaaccttcttgagtagccactgtctgccagccactgctctagagatgggaaaacagcacggaacaaaaccaaggtctttcttccagcgaatttatatccttcaggaagctggttcctgccaccaacttagcaggcaacagttctcctcccctagtggcacagggtaccagttttgtaggaaaagtggtccagcaaaggaagaaagcagaccaacccagctgccttaccttattctggggccattcccccagcgatgagagctgctcttgtttctactgccaccatctcttctggctgcacttcacctgctgcttgagcttctgaccttccttcagttccaccaaatgaggacaggaaatagcagtcaagacccctggccctgctgagcgtgaaacagaagcaatggatgagtgctggacgaagaatggcctgggcagaacaaatagggagcatttgaaagcttctggctgataaatctccaggtgcatcccggttgccacgcctgcccccattaacctgctcctggtaaatactgatccagcagctgctccaggagaggccgtctttttttcccagccacgctgtgtcttgcatgagactcctggggcctgggcacagagagaaaagaattgagactcaggaggctcagtgggtgagaaaatgcaaagtggcttcacagacacagggctgtgggagcagatcgacggggaacttgggagatgaacttcagggccttccgacgccttgtctcaggaacatgctttgagaaaaatggtagcatcctttccataactcagtctctcttccctagtttccctgaagtgtgacgttttagtatctggagctcagtgatccccatgaatgagggataaagtttcactcttggtattttctaactagtgctagggaaagtcctgagacacgatcacagccactgcttggcatacagggcctccacccaataagcaaactggagattcctcagcctctcgtggacacccacatctcattcttctcacagcagagaagctctcccttcagcctgagctgtcttctttctgctgcagtgcagcctgctccctcctaccctggcctcaaggaaggtaggaaacatcttctgcatttcaaagtcctcactttgacttatttggccttcatcttggcatggaaggtggcaggcagaatggaaatactccccccaaacagaacagatattcttgcgtgtgtaagggcagaagggacaagctctctatcccatgagactaggggccggagcccacctgcctttccccacaacttttcctgctcaaacccactcctcttgacacactggaatctgtattatatatatttttaagaaaatacaatgatggttgtctggttttgttgtttttacaggtgttgtggaataaaaactgtaagaaaattaagtatttaaaatgttccaataaagtggggttttttgttattctaatatattattgtgtacctattgtaaatatgaaacactcctattttgcaagctgaggacacaatttgtactgttgttatatataaataaagtttactgaattaaaaaaaccttaaatctttaaataaa

SEQ ID NO: 86 - DNA, 8084 bp, Homo sapiens
gtgacggcctcggccgcgggcgtttacactggctctgcctccggcatctcttcgccggtgcgtcctcgccgcgcccgtaggtcccggcagccgggccccgcctccttcggagtccgagcgatgggcggggaaagggacaggcaggtatagctctgtcggcgccgcggtgtccacctcagtcaggccacggtggaagacgcgtgccgcggcgcctggttgcctgcagcggcccggacccgagagaggaagctgaaccatctatctccagaaatgtcttcagaaagtaaagagcaacataacgtttcacccagagactcagctgaaggaaatgacagttatccatctgggatccatctggaacttcaaagggaatcaagtactgacttcaagcaatttgagaccaatgatcaatgcagaccttatcataggatccttattgagcgtcaagagaaatcagatacaaacttcaaggagtttgttattaaaaagctgcagaagaattgccagtgcagtccagccaaagccaaaaatatgattttaggtttccttcctgttttgcagtggctcccaaaatacgacctaaagaaaaacattttaggggatgtgatgtcaggcttgattgtgggcatattattggtgccccagtccattgcttattccctgctggctggccaagaacctgtctatggtctgtacacatctttttttgccagcatcatttattttctcttgggtacctcccgtcacatctctgtgggcatttttggagtactgtgccttatgattggtgagacagttgaccgagaactacagaaagctggctatgacaatgcccatagtgctccttccttaggaatggtttcaaatgggagcacattattaaatcatacatcagacaggatatgtgacaaaagttgctatgcaattatggttggcagcactgtaacctttatagctggagtttatcaggtagcgatgggcttctttcaagtgggttttgtttctgtctacctctcagatgccttgctgagtggatttgtcactggtgcctccttcactattcttacatctcaggccaagtatcttcttgggctcaaccttcctcggactaatggtgtgggctcactcatcactacctggatacatgtcttcagaaacatccataagaccaatctctgtgatcttatcaccagccttttgtgccttttggttcttttgccaaccaaagaactcaatgaacacttcaaatccaagcttaaggcaccgattcctattgaacttgttgttgttgtagcagccacattagcctctcattttggaaaactacatgaaaattataattctagtattgctggacatattcccactgggtttatgccacccaaagtaccagaatggaacctaattcctagtgtggctgtagatgcaatagctatttccatcattggttttgctatcactgtatcactttctgagatgtttgccaagaaacatggttacacagtcaaagcaaaccaggaaatgtatgccattggcttttgtaatatcatcccttccttcttccactgttttactactagtgcagctcttgcaaagacattggttaaagaatcaacaggctgccatactcagctttctggtgtggtaacagccctggttcttttgttggtcctcctagtaatagctcctttgttctattcccttcaaaaaagtgtccttggtgtgatcacaattgtaaatctacggggagcccttcgtaaatttagggatcttcccaaaatgtggagtattagtagaatggatacagttatctggtttgttactatgctgtcctctgcactgctaagtactgaaataggcctacttgttggggtttgtttttctatattttgtgtcatcctccgcactcagaagccaaagagttcactgcttggcttggtggaagagtctgaggtctttgaatctgtgtctgcttacaagaaccttcagattaagccaggcatcaagattttccgctttgtagcccctctctactacataaacaaagaatgctttaaatctgctttatacaaacaaactgtcaacccaatcttaataaaggtggcttggaagaaggcagcaaagagaaagatcaaagaaaaagtagtgactcttggtggaatccaggatgaaatgtcagtgcaactttcccatgatcccttggagctgcatactatagtgattgactgcagtgcaattcaatttttagatacagcagggatccacacactgaaagaagttcgcagagattatgaagccattggaatccaggttctgctggctcagtgcaatcccactgtgagggattccctaaccaacggagaatattgcaaaaaggaagaagaaaaccttctcttctatagtgtgtatgaagcgatggcttttgcagaagtatctaaaaatcagaaaggagtatgtgttcccaatggtctgagtcttagtagtgattaattgagaaggtagatagaagaatgtctagccaataggttaaaatttcaagtgtccaacatttcccagttccacagtgggaaattttgcacacttgaaattttaaccaagtggctagatattattcctcctttgaagctaatggcatttgtatatacacactgcagcagagcttgtagctggacagagtcaaaaagaagaaaatacggtttcaggctttcttgcagatatgaagtattcttggaatgcaataagtatgtattgaactgtactgtaaagtagctccaaaacttaattactctcctgttttaggggttatacatttggactgtgcattctccaagagatgaagcggtgaagttgggatttacattggaagtgctgtagacttctttatgtggctcagtggagagagggaaagaatgttgcacctgctctagtaccataggtcaagaggcttctggatcacaaagtcataactagacaggtttgttcttgtagttttctatccccagtctttgctccccagatggcagtagtttttagtaggaaagtgccattcctgtccttaaggcacagtctcatcagaagtctaatacctgggcaggtttataacatcctgagagccagcctgacattagacagaataccctttgtaatacattggaaatttttactcatgcctttttgtttaggataaataggtaagcacaaagagctcttcaaaatcagaaaaaacaataggagtccttccttgtcttttctgtgatctctgtccttgtttctgagactttctctaccattaagctctattttagctttcagttattctagtttgtttcccatggaatctgtcctaaactggtgtttttgtcagtgacagtcttgccagtcagcaatttctaacagcattttaaatgagtttgatgtacagtaaatattgatgacaatgacagcttttaactcttcaagtcacctaaagctattatgcaggaggatttagaagtcacattcataaaacccaagtgctatgggtgtattattcatgatagctggcccacaggtcatgaattgaggaggaatttgctttcaaaaagcaagaatgtccaacactgaaagtttatagttttatatttggaccttgaaaggtaagaaaaaaccaggttctccaaagttaggaatagggaactaatttatgaaacagccatcttaaaaaaaaaaaaagtaaactgcaaaagtacaaaatcatttttcaatctgttcccagtttctaaacaattttaaatatttatgagaagcaaaccctatgtgtagggcatctgttggagtgggatgcttttagacatatattaagtatgtacatgtttaatatgtatatttaaaatgcatatatattttattatatctatattatcctatatagatatatgtaacttagctttattgttagctccataagctgccagtgttgcttttctgttggtagagctctcccatttggtgacatggaaaatacctttccattatcacaacaaagcagttgctcagtagaaagtctagatttctgtcttataggtgatttctgtcttataggtgattataatcaagtgtaggcttcctgaattttgacatccttttagaacttgggtctggaattccagaaatgttaattgctgcttgtatttgttcttgtttgttttttagccagtatttgccctttctatccagccttatgaataatagcagtaaaatcacagtatcttggtcagtctttatttttttccttttttcttttttaagagacagtcatccaggccagagtgcagtttgatgatagcttactgaagcttcccactcctgggctcaagttatccttccattttggcctcctgagtagctagaccataggtatgcatcaccacaccctgctaattttttaaatttttttctagagagagggtctcactgtgttgcccaggctggtctcaaactccaggctcaagcaatccttcagcctcagcctcccagagtgttgggattacaggcgtgagccactgcacttggccaagttatttatttttaatctctcttgcccttctcccaaggcaggcttaagttgagactattataggtgtctaataacctgtgacagagtaatgagtacatgcttaagatgttataattagccaacaccaacacagcaaaaaatataattccagccaaagattctggaaaatccctcagaaggagggataacaggatttgacctttaccagcgatttctgtccatatgtggatgtaaacagttctggaacgttatgcatgcagttagcgaatccttgaattatgttctggtttgtacttgtcccatccatccaaacaagagattctgcttttggtagccatctgtagaaacatttaagatgtcactagaatttacatttcatcctctctacttgggttgaggttgcctatacttgcatattgttaaaatgttttggttgctgatattcagaggaatgaaacctggaaccaaagcctaatttgccgataaaaaaactgttttcggccaggtgcagtggctcatgcctgtaatcccagcacgttgggaggccgaggcgggtggatcacctgaagtcaggagttcgagaccatcctggctaacactgtgaaaccccgtctctactaaaaatacaaaaaattagcggggcatggtggcacgcgcctgtagtcccagctactcaggaggctgaggcaggagaattacttgaacccgggaggcggaggttgcagtaagcagagattgtgccactggactccagcctgggtgacagagcgagactccgtctcaaacaaacaaacaaaaaactgttttcatttgctctcttgaccaaaggataggactttagttctttaagcattattttaaacactatattgatacaaaaatatcttgcttactctaaactttagagtctaaatgaagctttttctcagtacaagattctgagtatcataaaatggttatttaattgaaacgtagtgtggtatactcttgatggttagaactcttacagccttatttatttttaagtttgttacagccaaagggttggagtgtgccagtgcacaggtagactaaggaaaacattatagaggagtgaagagaacagaccattgaaaagactattatctgaccagcggaggcagaaaagagaggaacccagttgaataggatccaatccctggttagcctctacacaataatagggagacaaggattaggagccatacctcccagagcaaggtatctttctagagcaaatttctctttctagaaggggagggtcacagggtcacagattcaccaaagctgaaagggctgaggagctcatggtagcctgggctgacctactctggagcacggtgtcttccttctaaactgagtgactgtagtactatctgtgcctctgatggtaataaaactgacaagatgtctaatttttttttaagtaggaccaaaggaaaacaagatttagatagtctgactttgcttttgaacaacagacattgcaagtcaaaattgttgtcaaatttacatatggtaaatgatgaactttaaaaatgtgtccaggtgttagatgagttcattagactcttttaatgctaatggctagtacgtttaaacaaaacagcagttctctgctgcaatattcccattgaccacttaaatgaccataagtggtcatttaagaacatgttagggttagccctgatctgaatataaaagtgagaaaagggctacagtgcatttcttggtaacttaaactgagtcttgaagttataatgatccattcgagttctgtgatccttattgttcttaattgtgtttctctacgtattgttacagatgagccatacgtttctttgtatcaatgtagacatgacttcagatacctctgaggacctacccagcagtctaggaccctgggccaagtgctgggactatggtactaaatccagtagatgggctgtgtagcaactctcccagggaacacactagggtacttagggaggtgctttgtggagcatgttgaagctttgagatctgagcaggaggcagtgatgtccctggtctattcagggaaagatttcagtgtgaaatggtaaacatccaattgacaggatttagattttgcttagtttttctgctttttaatgtttctatcccccatctcagtgttttctttatccatcccagtgatgccttatttgaaactgggcttaaactgcaaaaagaatgaagttggatttaggaagctgttagatcattgagtggtgttgagagtgaagtttcactagcagggaagtttccttgagcctaaaataaaaagaaaaaattaaaaagaatcagtttttttaattaaaaaaatagaaagctgttaggctcctaattcgtggggtttttttttgtaaaaacagtttagataatcctgaatgcaatcattaacttggttgctaattacaagaatgaaaattataatggaaaaggacaaaataatataccagctggtttgttattatagtccgtgtattaaaatactattgaaatacgttaaaggtaaatttttaaggtttaaaaaaaatttagtaacttacagggatggagaatttagatgtcagaggtggggagatttatttttataaggtaatttttatcctgataaggacttaaaaaaaagttttgcaactgaaattttaaagtaaacatgttaagtacagttaaaaagtaagcattgtagtaaatagtggattctctggtgtgtattttttatctcagtgttgaaaattggaaaagaatggactgaagtctaaaaactggaataatgaaggacactaaatgcctttattgtagatactatgtttgtaagtctatagctaagcaacttaagccaaaaaggtctttcaactgaagctttaatcaacttattttggagatgttctcttcccttatctcatgcgtcatccctaaaataataagatacatgggatcaaatagcccttgccttttcaacacaaatcagttggaaaattatggtttgagtcctgttgctgccatggcttctgtttctcagaaatgagtgtgtatgaacataccaatctatgtaataggctacctttttttgtcttctttggaactttgtacacaaaccaagacaatatcagggtgacaggtgaatgaacttaaattctcagtcttgtctattcaccaaaaaagtatactgcctgttttttctttaattattcaaggttgatgacttttaggaacatgttttatactgtattttttaattaaagcaagtgccttgatgtaattccatgtaaatcattgcttaaccctcttatgggatgaggatgagttattaatgtattgcagcctactggaaaggagggggagttggttaatagcagatacttttcttctagaagcttatgttttatgctgtttattatgtaagatcctgtatgtgtgttgagatttagaggtttcatttgttttgtctgctaataaattgttactctaataataaaaaaaa

SEQ ID NO: 87 - DNA, 7136 bp, Homo sapiens
agggaaggttggcagagggatccatgtgactgaggccggagcacggcaaagatgagcctgcccgcccgcctgctgcctggatgcggagggtgagggctggcgcacgggaggccgctggctgcgcattctgggcgccgagtgcccgggatgagctcacgcccgcgtctgcggctctctccacctgccgacctgccgggggcccactgagctgacggcgcacctgggctccggccgcagcgtggggcgcggcgcccgggagcaggtgtgcaggagcgcagcgcgcggcgagcgcagccctcgctccggagcccggccgcgccgcgtgcccgggcggctaggcagcggcggcggcggcggcgggcggcgggcgggcggcggcccccgggcaggtgccgagcggcgagcggagccgggccgggcggagcgcggggggcgaggccggcgcgtcgctcgcgggaggccggggagcggcaggggcatgtggatactggctctctccttgttccagagcttcgcgaatggttttcagtgaagacctacactccagcctctactttgtcaatgcatctctgcaagaggtagtgtttgccagcaccacggggactctggtgccctgccccgcagcaggcatccctcctgtgactctcagatggtacctagccacgggcgaggagatctacgatgtccccgggatccgccacgtccaccccaacggcactctccaaattttccccttccctccttcaagcttcagtaccttaatccatgataatacttattattgcacagctgaaaatccttcagggaaaattagaagtcaggatgtccacatcaaggctgttttacgggagccctatacagtccgtgtggaggaccagaaaaccatgagaggcaatgttgcggtcttcaagtgcattatcccctcctcggtggaggcgtacatcactgtcgtctcatgggagaaagacactgtttcacttgtctcaggatctagatttctcatcacatccacgggagccttgtatattaaagatgtacagaatgaagatggattgtataactaccgctgcatcacgcggcatcgatacaccggagagacgaggcagagcaacagcgccagactttttgtatcagacccagcgaactcagccccatccatactggatgggtttgaccatcgcaaagccatggctgggcagcgtgtggagctgccttgcaaagcgctcgggcaccctgagccagattaccgctggctgaaggacaacatgcccctggaactttcagggaggttccagaagaccgtgacggggctgctcattgagaacattcgcccctcggactcaggcagctatgtttgtgaagtgtccaacagatacggaactgctaaggtgataggccgcctgtacgtgaaacagccactgaaagccaccatcagtcccaggaaggttaaaagcagcgtgggtagccaagtttccttgtcctgcagcgtgacaggaactgaggaccaggaactctcctggtaccgcaatggtgaaatcctcaaccctggaaaaaatgtgaggatcacagggatcaaccacgaaaaccttataatggatcacatggtcaaaagtgacgggggcgcataccagtgctttgtgcgcaaggacaagctgtccgctcaagactatgtgcaggtggtccttgaagatggaactcccaaaattatttctgcctttagtgaaaaggtggtgagtccagcagagccggtttcccttatgtgcaacgtgaagggaacacctttgcccacgatcacgtggaccctggacgatgacccgattctcaagggtggcagtcaccgcatcagccagatgatcacgtcggaggggaacgtggtcagctacctgaacatctccagctcccaggtccgggacgggggagtctaccgctgcactgccaacaactcggcgggagtcgtcctgtaccaggctcgaataaacgtaagagggcctgcaagcattcgaccaatgaaaaacatcacagcaatagcaggacgggacacatacattcactgtcgtgtgattggctatccgtattactccattaaatggtacaagaactctaacctgcttcctttcaaccaccgccaagtggcatttgagaacaatggaactcttaaactttcagatgtgcaaaaggaagtggacgagggggagtacacgtgcaacgtgttggttcaaccacaactctccaccagccagagcgtccacgtgaccgtgaaagttccgcctttcatacaaccctttgagtttccaagattctccattgggcagcgggtcttcatcccctgtgttgtggtctcaggggacttacccatcacgatcacctggcagaaggatggccggccaatccctgggagccttggggtgaccattgacaatattgacttcacgagctccttgaggatttccaatctctcgctcatgcacaatgggaattacacctgcatagcccggaatgaggccgccgctgtggagcaccaaagccagttgattgtcagagttcctcccaagtttgtggttcagccacgggaccaggacgggatttatggcaaagcagtcatcctcaattgttctgctgagggttaccctgtacctaccatcgtgtggaaattctctaaaggtgctggggttccccagttccagccaattgccctaaatggccgaatccaagttctcagcaatgggtcgttgctgatcaagcatgtcgtggaggaagacagtggctactacctctgcaaggtcagcaacgatgtgggcgcagacgtcagcaagtccatgtacctcacggttaaaattcctgcgatgataacatcctatccaaatactaccctggccacgcaggggcagaaaaaggagatgagctgcacggcgcatggtgagaagcccattatagtccgctgggagaaggaggaccgaatcattaaccctgagatggcccgttatcttgtgtccaccaaggaggtgggagaagaggtgatttctactctgcagattttgccaactgtgagagaagattctggtttcttttcctgccatgctattaattcttatggggaggaccgtggaataattcagctcacagtgcaagagcccccagaccctcccgaaattgagatcaaagatgtcaaagcacgcacaattacgctcaggtggaccatggggtttgatggaaacagtcccatcacaggctacgatattgaatgcaaaaataaatcagactcctgggattctgctcagagaaccaaagatgtttcccctcagctgaactcggccaccatcattgatatccacccttcctccacctacagcatccgcatgtacgccaagaaccggattggcaagagcgagcccagcaacgagctcaccatcacggcggacgaggcagctcctgatggtccacctcaggaagttcacctggagcctatatcatctcagagcatcagggtcacatggaaggctcccaagaaacatttgcaaaatgggattatccgtggctaccaaataggttaccgagagtacagcactgggggtaacttccaattcaacattatcagtgtcgacaccagcggggacagtgaggtttacaccctggacaacctgaataagttcactcagtacggcctggtggtgcaggcctgtaaccgggccggcacggggccttcttctcaggaaatcatcaccaccactctcgaggatgtgcccagttacccccccgaaaatgtccaagccatagcaacatcaccagaaagcatatcaatatcctggtccacactttccaaggaagccttgaatggaattctccaggggttcagagtcatttactgggccaacctcatggacggagagctgggtgagattaaaaacatcaccaccacacagccttcactggagctggacgggctggaaaagtacaccaactacagcatccaggtgctggccttcacccgcgcaggagacggggtcaggagtgagcagatcttcacccggaccaaagaggatgttccaggtcctcccgcgggtgtgaaggcagcggcggcctcagcctccatggtctttgtgtcctggcttccccctctcaagctgaacggcatcatccgaaagtacactgtattctgctcccacccctatcccacagtgatcagcgagtttgaggcctctcccgactcgttttcctacagaattcccaacctgagtaggaatcgtcagtacagcgtctgggtggtggctgttacttcagccggaagaggcaacagcagtgaaatcatcacagtcgagccactagcaaaagctcctgcacgaatcctgaccttcagtgggacagtgactactccatggatgaaagacattgtcttgccttgtaaggctgttggggacccttctcctgcagtcaaatggatgaaagacagtaacgggacacccagtctagtaacgattgatgggcggaggagcatctttagcaacggaagcttcattattcgcacggtgaaagcagaagactccggctattacagctgcattgccaataacaactggggatctgatgaaattattttaaacttacaagtacaagttccaccagatcagcctcggcttacagtctccaagaccacgtcttcctccatcaccctttcttggctccctggagacaacgggggcagctctatcagaggatacatactgcagtactccgaggacaatagtgagcagtgggggagttttccaatcagccccagcgaacgttcctatcgcttggaaaatctcaaatgtgggacttggtataagttcacactgacagcccaaaatggagtgggcccagggcgcataagtgaaatcatagaagcaaagaccttaggaaaagagccccagttctcaaaggagcaggagctgtttgccagcatcaacaccacacgcgtgaggctgaacctcattggctggaatgatggcggctgccccatcacctccttcacactagagtacaggccctttgggaccacagtttggaccacagctcagaggacctctctctccaagtcctacatcctgtatgacctgcaggaagccacctggtatgagctgcagatgcgggtgtgcaacagtgcgggctgcgcggagaagcaggccaacttcgctacgctgaactacgatggcagtacaattcctccactcattaagtcagttgtccaaaacgaagaagggctgacgaccaacgaggggctcaagatgctggtgaccatctcctgtatcctggtgggggtcttgctgctgtttgtgctcctgctggttgtgcggaggaggcggcgggagcagaggctaaagaggctgcgagatgcaaagagtttagctgaaatgctcatgagtaagaatacccggacttcagatacgttaagcaagcaacagcagaccctgcgaatgcacatcgacatacccagggctcagcttttgattgaagagagagacacgatggagaccattgatgatcgctccacggttctgttgacggatgctgactttggagaggcagctaagcagaagtccctgacggtcactcacacggtccattaccaatcggtgtctcaggccactgggcccttagtggatgtttcagacgctcggccgggaacgaatcccaccaccaggaggaatgccaaggctgggcccacagcgagaaaccgctatgccagccagtggaccctcaaccgaccccaccccaccatctcagcacacaccctcaccacagactggaggctgccaacacccagggctgcaggatcagtagacaaagagagcgacagttacagcgtcagcccctcgcaagacacagatcgagcaagaagcagcatggtctccacagaaagtgcctcctccacttacgaagaactggccagggcctacgaacacgccaagatggaagagcaactgaggcacgccaagttcaccatcacggagtgcttcatatcagacacgtcatcggagcagttgacggcagggacaaatgagtacacggacagtctgacctccagcaccccttccgaatcgggaatctgcaggttcactgcatctccccccaaacctcaggatggaggaagagtaatgaatatggcagttccaaaggcacatcggccaggtgacctcatacatttgcctccataccttagaatggactttttgttaaaccgaggtggtccaggcaccagcagggacctgagcttaggacaagcatgcttggaacctcagaaaagccggaccctgaagcgccccacggtcctggagcccatcccgatggaagccgcctcctccgcctcctccacgagagaaggacagtcgtggcagccgggggccgtggccacattacctcagcgggagggagcagagctgggacaggcagctaaaatgagcagctcccaagaatcactgctcgactcccggggccatttgaaaggaaacaatccttacgcaaaatcttacaccctggtataacagacagcatgactggacagcggttgtaaatacaattcaaacaattcaatcaaagctaccttttttttacggaattccaatatttataattaaagaaaattgccaaaatatattaaaaaaaaaaaagagaaaatactgaaaccacagacagtgcaaagactctcctgctttttttctgtctgagtgtgagctccatccgcctgggcatctgattttttgggaaagaagtccagttttatgatcttcacaggctattgcatttttactgattttctacaaaagtgcatgggggggattaattaaaccttctgactggaagttctatcacacaagaggcaagaaagaaaacagggtgggtgggaaatcagcctatttgtgaatttaaaaggaacaccgatttgcgggcaggggaaaacttcagtcacgtttgcacacctttctttcccattagaaaccgggttctcaatttggtcttcttttgttgttaattaggatgagtgccgtcagtgaaggggtggggggaatcaatttggttttctctcttgtttcttttttaatttaatgagacactctttgcattttgtctaagcgaaataaaaaagaaaaggttgtctgcct

SEQ ID NO: 88 - DNA, 1856 bp, Homo sapiens
ttgaaaagggtatcattcatgtggtttcagtttagaagagtccctcagagctttgcctcaagcaatttcaaattgtagtgataccttaaatcatgtattcaggatgccttctttagcatttagaaccccaactagacttatactttgactaaagtcagaggcagaccaatttagggaacagattttgttctttgcttttatgatacatttgtaactcacagctgttagcatgacctcacatcactgcgtaggacccggaaatcacatctcctggtcaggtcacgaaaaagaacacaggcttgactattgtccagaagttactttccccttgactaaaggtttccccttagggtacacattgctatttaactttgcctcctacccttttttgttaccttccaaaatcaagacacttttaagaaacaaagatagttttctgaacattctgtgtcctgcctgtctcctgttgattcgcagatgtaatatcgagtattcatcaactggtctcaatttcctgaacacattcactgtatccctcattgtcaccgttatccccctgcttcaaaatgtgccagttccacttggtaataacgttgggaaaatgcaggtttatgaatgatgtggacttttagaggatcaaatcaataaattggattttttattttttgagggcagctgccctcactgttttaaataaagaatcttacataagaatgttgacaacattcacagtaagccattggcagaaaattgatctgcatgtcctagaccaatgattacaaggtgtctgtggtttagggggcccagcccatcattccttttccccttggcactcatgagagagatgccaagttcagtgtggatttttcttggtgctctatggagaaatggagtctgtgtgcttactgaagagtcccaaaaaccagagaccattttcatttactgccatcataaatattctccaccattcaagatgcctgtgtacacggctatttgggaaacttaagtgttggaggaggcaggggctgaaggtgtcaaaacctcctcagtaggataacccctttctcccctttggaccatctgccatctttcatgagtgtttcccatggtgtttttgcatccagagttgacaacaactcaattttgccttgaatttactcagtcttataaattaaaaatgtgcattttatataaagatgcattttatataaaaatgcacacctttaatctctatatggcagcatatacatatatatatataaaatgcacacttttaatctctatatggcagcatttttgaggctttatatctgcccgtgtaccctcaactgcctcctttttgcagagaacgatccccacaggaactggtctaagaacactgtctgcacatgattgatgcttaaaatccaatataccaccacatatcaaaggttgggattttcagagtccttcttgatttctgagctgaaaccttaacaaatagggaatttggcagggaagacacctgggtttttaattcagaaccctatttatatactgttaaaatttgaggtactgtagtttatataaaagtcggatgttaagatattatatttcagtactaggagcttctttgcagtcattaacatgacaaattaagtaataaatataaaagtgattgtccataaattatcattgaattttttgtttattttgtagtgttctgtatttatctgcactttgtgtatatatacacacatacatatgccaacatgtaaataacctcatgtttattcctaatctaaattgccacaatatttttaatgtatggttacactgtgttttaaattactttaaaaataaactttgtaagcaga

SEQ ID NO: 89 - DNA, 5282 bp, Homo sapiens
agagggagcgaaggaggcggggactgccaaggctccagcccggccgggctccgaggcgagaggctgcatggagtggccggcgcggctctgcgggctgtgggcgctgctgctctgcgccggcggcgggggcgggggcgggggcgccgcgcctacggaaactcagccacctgtgacaaatttgagtgtctctgttgaaaacctctgcacagtaatatggacatggaatccacccgagggagccagctcaaattgtagtctatggtattttagtcattttggcgacaaacaagataagaaaatagctccggaaactcgtcgttcaatagaagtacccctgaatgagaggatttgtctgcaagtggggtcccagtgtagcaccaatgagagtgagaagcctagcattttggttgaaaaatgcatctcacccccagaaggtgatcctgagtctgctgtgactgagcttcaatgcatttggcacaacctgagctacatgaagtgttcttggctccctggaaggaataccagtcccgacactaactatactctctactattggcacagaagcctggaaaaaattcatcaatgtgaaaacatctttagagaaggccaatactttggttgttcctttgatctgaccaaagtgaaggattccagttttgaacaacacagtgtccaaataatggtcaaggataatgcaggaaaaattaaaccatccttcaatatagtgcctttaacttcccgtgtgaaacctgatcctccacatattaaaaacctctccttccacaatgatgacctatatgtgcaatgggagaatccacagaattttattagcagatgcctattttatgaagtagaagtcaataacagccaaactgagacacataatgttttctacgtaaggttttaaaattattgtttttatttggctatttttcttttacttgaatttcttacattgaaatatcaatgaaacatagctcttacatttgtcaccttatgatgatgatggtaatgaaacttcttgtctaaaataaggcatggtggaagatttgaagatttatggtatgatagtatcagctgcaagtttcaagccatttattcatctgtaagcttcttagaaaggcctgtccaagaggctaaatgtgagaatccagaatttgagagaaatgtggagaatacatcttgtttcatggtccctggtgttcttcctgatactttgaacacagtcagaataagagtcaaaacaaataagttatgctatgaggatgacaaactctggagtaattggagccaagaaatgagtataggtatttaaaactagttaagatcttctgatttacctgagcgggtggggaaacccaccccatgagcatcccctgggctcacccagtgcacagagggaggcctcccgtggctgggcccctctcagtcagcccatgtggctgccatgacctggagcaccacagccgggggcgcccaccagctcaacaccaccacattcacgtggcagcacctccctgcctggcaaccgctgctgttggccagcattaggctgcagctcttcttctacgtgggcctggccttcatcagcctggacctctattactcctccaccagcatcaaggagctggagtacaactacaccggcgacccgggcaccagcaactgctcggtgtgtgctgtggctggccagggctgtgtgccactgcccatctgctcatgcgcctggtacttctcactgcctgagctcttccagggccctgtgtacccctactacgtgctgaccaacttctaccaaaacaaccggcggtatggagtgtccgcgacaacgcgcagctgagcgggctgcccagcacgctgcaccatccagtcaatgagtgcacccactgcgccgcctgcccatcgtgcaccctgcaatgtcatcaccaacagcctcttcaacgactcctcgctgtggcaccagtgctggcccggcgagccctacgtggaggtgccgcgctaccgcactgcacctgcatcacccggtagaccaactaccccatcaagttctgcaacccaccactggtcaacggcagcctggcactggccttccatggcacagcacccctgcccaactggcgctggctggtctacgacaagctcagccccatccccaacaacaacggcttcatcaaccaggacttcgtggtgtggatgcgcatggcagcgctgcccacgttccgcaagctgttccgcaagctgtacgggcacatccgccagggcaactactcagctgggctgccgcggtgtgtctactgtgtcaacatcacctacaactacctggtaagaagcgcaattccacactctacataaccatgttactcattgttccagtcatcgtcgcaggtgcaatcatagtactcctgctttacctaaaaaggctcaagattattatattccctccaattcctgatcctggcaagatttttaaagaaatgtttggagaccagaatgatgatactctgcactggaagaagtacgacatctatgagaagcaaaccaaggaggaaaccgactctgtagtgctgatagaaaacctgaagaaagcctctcagtgatggagataatttatttttaccttcactgtgaccttgagaagattcttcccattctccatttgttatctgggaacttattaaatggaaactgaaactactgcaccatttaaaaacaggcagctcataagagccacaggtctttatgttgagtcgcgcaccgaaaaactaaaaataatgggcgctttggagaagagtgtggagtcattctcattgaattataaaagccagcaggcttcaaactaggggacaaagcaaaaagtgatgatagtggtggagttaatcttatcaagagttgtgacaacttcctgagggatctatacttgctttgtgttctttgtgtcaacatgaacaaattttatttgtaggggaactcatttggggtgcaaatgctaatgtcaaacttgagtcacaaagaacatgtagaaaacaaaatggataaaatctgatatgtattgtttgggatcctattgaaccatgtttgtggctattaaaactcttttaacagtctgggctgggtccggtggctcacgcctgtaatcccagcaatttgggagtccgaggcgggcggatcactcgaggtcaggagttccagaccagcctgaccaaaatggtgaaacctcctctctactaaaactacaaaaattaactgggtgtggtggcgcgtgcctgtaatcccagctactcgggaagctgaggcaggtgaattgtttgaacctgggaggtggaggttgcagtgagcagagatcacaccactgcactctagcctgggtgacagagcaagactctgtctaaaaaacaaaacaaaacaaaacaaaacaaaaaaacctcttaatattctggagtcatcattcccttcgacagcattttcctctgctttgaaagccccagaaatcagtgttggccatgatgacaactacagaaaaaccagaggcagcttctttgccaagacctttcaaagccattttaggctgttaggggcagtggaggtagaatgactccttgggtattagagtttcaaccatgaagtctctaacaatgtattttcttcacctctgctactcaagtagcatttactgtgtctttggtttgtgctaggcccccgggtgtgaagcacagaccccttccaggggtttacagtctatttgagactcctcagttcttgccacttttttttttaatctccaccagtcatttttcagaccttttaactcctcaattccaacactgatttccccttttgcattctccctccttcccttccttgtagccttttgactttcattggaaattaggatgtaaatctgctcaggagacctggaggagcagaggataattagcatctcaggttaagtgtgagtaatctgagaaacaatgactaattcttgcatattttgtaacttccatgtgagggttttcagcattgatatttgtgcattttctaaacagagatgaggtggtatcttcacgtagaacattggtattcgcttgagaaaaaaagaatagttgaacctatttctctttctttacaagatgggtccaggattcctcttttctctgccataaatgattaattaaatagcttttgtgtcttacattggtagccagccagccaaggctctgtttatgcttttggggggcatatattgggttccattctcacctatccacacaacatatccgtatatatcccctctactcttacttcccccaaatttaaagaagtatgggaaatgagaggcatttcccccaccccatttctctcctcacacacagactcatattactggtaggaacttgagaactttatttccaagttgttcaaacatttaccaatcatattaatacaatgatgctatttgcaattcctgctcctaggggaggggagataagaaaccctcactctctacaggtttgggtacaagtggcaacctgcttccatggccgtgtagaagcatggtgccctggcttctctgaggaagctggggttcatgacaatggcagatgtaaagttattcttgaagtcagattgaggctgggagacagccgtagtagatgttctactttgttctgctgttctctagaaagaatatttggttttcctgtataggaatgagattaattcctttccaggtattttataattctgggaagcaaaacccatgcctccccctagccatttttactgttatcctatttagatggccatgaagaggatgctgtgaaattcccaacaaacattgatgctgacagtcatgcagtctgggagtggggaagtgatcttttgttcccatcctcttcttttagcagtaaaatagctgagggaaaagggagggaaaaggaagttatgggaatacctgtggtggttgtgatccctaggtcttgggagctcttggaggtgtctgtatcagtggatttcccatcccctgtgggaaattagtaggctcatttactgttttaggtctagcctatgtggattttttcctaacatacctaagcaaacccagtgtcaggatggtaattcttattctttcgttcagttaagtttttcccttcatctgggcactgaagggatatgtgaaacaatgttaacatttttggtagtcttcaaccagggattgtttctgtttaacttcttataggaaagcttgagtaaaataaatattgtctttttgtatgtcacccaaa

SEQ ID NO: 90 - DNA, 6935 bp, Homo sapiens
ggccaaaggtcaagatacttctctgggaaatgttgctgctgatgctgctttacaaagtcatacaatgagtgtttggtttaagaaagattttcatacttaaaagattttcatcttggaaatacatcaagtgaaaattaaattcttttgggaaacattttccttctgatatattatacttgtaatgggcgacatggcaaacaactcagttgcttacagtggtgtgaaaaactctttgaaggaagctaatcatgatggagactttggaattacgctcgcagagctgcgggctctcatggagctcaggtccacagatgcattacgaaaaatacaggaaagctatggagatgtctatggaatttgcaccaaattgaaaacatctcccaatgaaggtttaagtggaaaccctgcagatttagaaagaagagaagcagtgtttggaaagaattttatacctcctaaaaagccaaaaacctttcttcaattagtatgggaagcattacaagatgtcactttaattatattagaaattgcagccatagtatcattgggcctttctttttatcagcctccagaaggggataatgcactttgtggagaagtttctgttggggaggaagaaggtgaaggtgaaactggttggattgaaggagctgcaatcctcttgtctgtagtgtgtgtggtgttagtaacagctttcaatgactggagtaaggaaaaacagtttagaggtttgcagagccgaattgaacaagaacagaagttcactgtcatcaggggtggtcaggtcattcagatacctgtagctgacattactgttggagatattgctcaagtgaaatatggtgatcttcttccagctgacggcatacttattcaaggcaacgatcttaaaattgatgaaagctcattgactggtgaatcagatcatgttaaaaagtctttagataaggatcccttacttctatcagaggtactcatgtaatggaaggctctggaagaatggtagttacagctgtaggtgtaaattctcaaactggaattatctttaccttacttggagctggaggtgaagaggaagagaagaaagatgagaagaaaaaggaaaagaaaaataagaaacaagatggagctattgagaatcgcaacaaagcaaaagcccaggatggtgcagccatggaaatgcagccattgaagagtgaagaaggtggagatggtgatgaaaaagataaaaagaaagcaaatttgccaaaaaaggaaaaatctgttttacaagggaaacttacaaaactggctgttcagattggcaaagcaggtctgttgatgtctgccatcacagttatcattctagtattatattttgtcattgacaccttctgggttcagaaaagaccatggcttgctgagtgcacaccaatttatatacaatactttgtgaagttcttcattattggagttacagttttagtggtcgcagtgccagaaggtcttccacttgcagtcacgatctcactggcttattcagtcaaaaaaatgatgaaagataataacttagtaaggcatctggatgcttgtgaaaccatgggaaatgctacagctatttgttcagataaaacaggaactttgacaatgaacagaatgacagtcgttcaagcttacataaatgaaaaacattataaaaaggttcctgaaccagaagctattccaccaaatattttgtcctatcttgtaacaggaatttctgtgaattgtgcttatacatcaaaaatattgccaccagagaaagagggtggattacctcgtcacgttggtaataaaactgaatgtgccttgttgggacttcttttggatttaaaacgggattatcaggatgttagaaatgaaataccagaagaagcactgtacaaagtctacaccttcaattctgttaggaagtccatgagtactgtcctgaaaaattcagatggaagttatcgaatattcagcaagggtgcatctgagataattctgaaaaagtgtttcaaaatcttgagtgctaatggtgaggcaaaagtattcagaccaagggaccgtgatgatattgtaaaaactgtgattgaaccgatggcatcagaaggcttgagaaccatatgtcttgcattcagagattttccagcaggagaaccagaaccagagtgggataatgaaaatgatattgtcaccggccttacatgcattgctgttgtggggattgaagatcctgtgagacctgaggtgccagatgcaattaaaaagtgtcagagggctggaattactgtgcggatggtcactggtgataatattaatactgctcgggccattgctaccaaatgtggtattttacatcctggggaagattttctgtgcctagaaggtaaagattttaacagaagaatacgaaatgaaaaaggagagattgagcaagagaggatagacaagatttggccaaaacttcgagtacttgcaagatcatctcctactgataagcatacactggttaaaggtataattgacagcactgtctcagaccaacgccaggttgtagctgtaactggtgatggtacaaatgatggcccagcactaaagaaagcagatgttggatttgcaatgggtattgctggaactgatgtagctaaagaagcatccgatattattctcacagatgacaactttacaagcattgttaaagcagttatgtggggacgaaatgtctatgacagcatctcaaaattccttcagttccaacttactgttaatgtagtagcagtgattgttgcttttacgggcgcctgcattactcaagactcaccgcttaaggctgtgcagatgctgtgggtaaacctcataatggatacactcgcttccctggctctggcaacggaaccacccactgagtctctcttgcttcggaaaccttatggtagaaataagcctctcatctcacgtacaatgatgaagaatattttgggtcatgcattctatcaacttgtagtagtctttacactcttatttgctggagaaaagttttttgacattgatagtggaagaaatgctcctttgcatgctcctccttcagaacattatactattgtttttaatacctttgtgctgatgcaacttttcaacgaaataaatgcccggaaaattcatggtgaaagaaatgtattcgaaggaatctttaacaatgccatcttctgcacaattgttttaggcacttttgtggtacagataataattgtgcagtttggtggaaaacctttcagttgttcagaactttcaatagaacagtggctatggtcaatattcctaggaatgggaacattactctggggccagcttatttcaacaattccaactagccgtttaaaattcctcaaagaagctggtcatggaacacaaaaggaagaaatacctgaggaggaattagcagaggatgttgaagagattgatcacgctgaaagggagttgcggcgtggccaaatcttgtggtttagaggtctgaacagaatccaaacacagatggatgtagtgaatgctttccagagtggaagttccattcagggggctctaaggcggcaaccctccatcgccagccagcatcatgatgtaacaaatatttctacccctacacatgtagtgttttcctcttctactgcttctactactgtggggtattcgagtggtgaatgcatttcgtagttctttatatgaagggttagaaaaaccggaatcaagaagttcgattcacaactttatgacacatcctgagtttaggatagaagattcagagcctcatatcccccttattgatgacactgatgccgaagatgatgctcctacaaaacgtaactccagtcctccaccctctcccaacaaaaataacaatgctgttgacagtggaattcaccttacaatagaaatgaacaagtctgctacctcttcatccccaggaagcccactacatagtttggaaacatcactctgattgtaagctgaatgttaacacactagctgcattgtaaagaaacaaattgaaactgggtcttttcacatattgtgatggacaagctagtattcttgtctttggacttcaacagaagacacacttgtacgaatgtagatttatttttttaaaaaaaaaaaagcaaagctttctgccagactgagggtgctttttggggggtgggagaaatgaactgacagataaacagtaactcagcgtaagtgacctgtggatcatcagtagtacccaagcatggtcctgaacagtgtattagcagagctttagtttatctcagtcctggatgggagagagagggaggagtaaaactgggcaagacaaagagccctggatcgttgaattgatagtttaatttctgctgttggctgttaataatttggattatttatgtttataaatgatacagatctgtttacaaggtttgtagatactttttttgttcctgttcatagatgggaagcttccttataactgatgcagagaaaaattagtccttcaaatactgctgtattttcaggaaaaaaaaaaaaaggggtgtttctattgaaactgtactaaatttttgcctacaatttaccttgttaaatattgtagataaattgctaatactaatagccaaatagataacactaatgctttgtttaaaaaaacgaaaaaaacaaaacaaaacaaaaaaacatgagcagtggtgttctaatgaagttatgacatctgtcctaattagtttcttaaatacatttactacttaatggttttgaagcaactgtttaatttttaaaatttttgaaaacttgctaataaccttttgttcagaatttagtagattgtttaatgcaggacatcaactacataatgaaagatgcttgaaatgcttttgttatttcaggcaaatcaaattaaatcagactatcaaactacaagagaaccttagtcttttttgtttttgtctaaacatgttagtttagtgatgtcttggtgaactgtgagtgaactgtattgatttttctaatctttagagaccttcacacagcatgagggctgttggcattttgaaaaaggttaataagtagaagcatacatgttttccttttgtttttgaaacttgtttgtaaacataaataaatatgcccttttattaaataaattcatggcaatgtttttttaaaagacatttcagcttctttactcagttctgcatatacagtgcatcagtctgttctctttgaccacaattggaatacatttcaagatggtaacagccccatgaagtaccgctttaattccttgctggtaatctaatagaatcagattaagaaaattaacacaattttaccatttgacatactcttcattgaatttagtttgtctaaaatagtctcacaggtaaaaaacataacaacaatgaccaccattgtctttgatacatttattttaattcttaagtggccaaataacagattaggtaaaatgagattacatgaaaaggttctaaaatgatatatttagatgcaataattaaccatatgctagaatgcccacctctaagccaattggattctttagctctctttttctttccttcatctaccttcttctcttttttgcctctgtctttaccctttagaaactggcatgtgttagggcccagatttcaccagatacacaatcctcaggctgacataaagtttacgaggactgctactataactgagagtgctgaccaagcaaagaaacatttagttgatggtgcttgatatttttggtgggtgggggaaatctttttctcaccatcaaatctttgcagtaatcctctgcaggtcttagaaacacattggctctgtcagcatttgtaattgtacatttattcatcaggtatttatagtgaatcatactgtaaaaaagaggtagcatgatatgctggaaagcatattagactaggagtcaagacctggtttctagtcttggttttgccattaatgtgctgcatgatcttgggaaaatcatttaccctaaataagggtggtggactatcttgaagaaccctttcaactctaaaaattgaccctatcaactggagagcccacaaggcatagggaatagagaaaagggaaatgttttcagttttcttttttattttggttatgcttaaatatgaatgtaattaccaaaagatttagaagtgcatgtgctttggaggatttgtattgagcttttacagtattcatttttcaactcaaggcaatggctttctacaccaactctaatccataaacgggtcttatgacatctatgaagtagtagcaagacatgcttagtgtgtatttctctctttgagacactgtaatttctaccagaaatttccagagcattatgtaggtagaaaaaaatgcaagcaagctgttaaagatcttggatcccattatatagtatgtatagctgaaatctgtaattcaatcactttttctcttttatcctctaaccaaaaaattgtttaattttgcatcccaaatgtttttaatctttgtatattttttaaaaatccttttctcctcatcattgccttttttgtggttgtaaatagacttacttgcactttgaagatgagttactccttgtcatcttacaaatatgtgatatggtaattttcataacagatgtcagttttgaaccaagaattggtgatttgtttataagaaaaaaactggcttcatttctgtgaaattgctctttgaaaatttctttttacacgtgtaagccaactgagataccgtgatggtgttgatttctttcaatgatgcttaccatctattttagccactgagccttttattatttgtctatttgtaaagtttatttgtcttaactcatttaataaatatactgtttatctgtttctgaa

SEQ ID NO: 91 - DNA, 3741 bp, Homo sapiens
ctctccggccgcgcagccgctgccgcccacccgcacccgccgtcatgctccgggccgcgctgcccgcgctcctgctgccgttgctgggcctcgccgctgctgccgtcgcggactgtccttcatctacttggattcagttccaagacagttgttacatttttctccaagaagccatcaaagtagaaagcatagaggatgtcagaaatcagtgtactgaccatggagcggacatgataagcatacataatgaagaagaaaatgcttttatactggatactttgaaaaagcaatggaaaggcccagatgatatcctactaggcatgttttatgacacagatgatgcgagtttcaagtggtttgataattcaaatatgacatttgataagtggacagaccaagatgatgatgaggatttagttgacacctgtgcttttctgcacatcaagacaggtgaatggaaaaaaggaaattgtgaagtttcttctgtggaaggaacactatgcaaaacagctatcccatacaaaaggaaatatttatcagataaccacattttaatatcagcattggtgattgctagcacggtaattttgacagttttgggagcaatcatttggttcctgtacaaaaaacattctgattctcgtttcaccacagttttttcaaccgcaccccaatcaccttataatgaagactgtgttttggtagttggagaagaaaatgaatatcctgttcaatttgactaagtttttggtaatcttgcactaagacatcaacaaaatgccctggcagagataacttgggaaagattttaatataaaacttgacattggatattagagctttaatggtattccttattccagtaacatttttatgtactcatctgctgtgaaaagtctttaggttcattaaaaaaacaggttttagaaatgatcttagatctaatatagtgattttaagcatcccgtcaaaggcagaatctgtcacttgaatgaaggaaagcttaaagcccaagcagataaaaataaaagcccagcctatttgtcttgcctgctgtatcttccctatttagttgacccactttagtttatatgtttattagtaaacatgaaatggggaataagtgattttaagtacatcccatacatttaaatatctttgataattgttatttttttggcagataattcctctagaatgtgtatctttttatgatttagatgaagaaaattttacaacttttaacaccccacaccaattttagtttcattacttttacacacaccattttatcacaaatgactcaagttttaatgaatgtttataaattatttgaaacaaaatatgatcgctgtgtccaggatggcatagagaaagctggcaattaggttaacacttacatattatagtgcccctttaaggatttctctcttgccaccataccttttgtactttcccctatacaagatgtatctcattctcctcaagcatttataaatttttccttcaatgacatgaaaactgtgcaagcaaaaaccgaagaaaaacacttaagtacaactgtagtgacagtgatcaaagttttcagtgcatttattgtacattttaagaaaaaggtgaaaatcatttggggagtaaaaaaatgaaaaagctgaaacgagtaattttcctcaccatcaataaaccaaaaacaggaaagataaagaatgtataaatttcacgtaaattagtcacgtatcacttatcaatggggatacgttctaagaaatgcatagttagggaatcttgtgtgaaaatcagcttgtatttacacaaacccagatggtagagcctattttgtcccaaacctacacagcatgttactgtgctgaatactgcagacaattgtaacacaatatttgtgtatctaaatatagaaaaggtacagtaaaaatatggtctactaaggaaacactgttctatatgtggtccattactgactgaagtatactgtctagaagtctgaggctcaaagaaaagtaatccctcttctgaatccacaccccatcaattatcttactttcttctggggagatagatagatatactatctcactagcttgactaatggcaacaaagttccagcttgtgtagtctctttttattgaccacatgaatcgaaaacactcatcacaattaatggcactatcattaatgagacatgagtaactaaaaagtgatagaaaactattaacagtgcggctacatggtactgaaaatgcaggcattacaccagctgttacacaagcacaagcatgctctgtaagagctttacatttctgagattttgtatagtgattgagatgtctattttattattgatagactattactaatgtcaatattgaacactaccctggaattcctgcctggttttcctacccaaattgtaccactccttgaagaactacaggcacagtaaaaaaaatatggcgtattatgtgaactaaaagagttctaaaggagttcttaaaggagtggtagaatttgggtaggaaagtgattaagtccaacttaaaaccaacagtctcaaacgtctacaactacaatgtccaatgagccactagccacatgaggctatttaagtaaatttagtttaaaatccagttttcgaattacattagccacattgtcaagtgttcaaatcacaggtggttagtggctactgtactgggcaacatacattatagaacattttcattataggaagttttattgggcagtgctgctcttaaatcctaccttccactcaactcccatacaactttcttttgtacattttgatactttctacctaatggcagctcttccaaaatagctgctttaaactctgatttaattttcaatatttggtttcatttttcaacaggccaagaggcctctggtaatgaagtgctatatatatatatatgatggagtctcactgtgctgcccaggctacagtgcagtggctcgatcttggctctctccaatctccgccttgcaggttttcaagcaattctcctgcctcagcctccttagtagctgggaccacagacatctgtcaccacacccagctaactttttgtatttttggtagagacggggtttcgccatattgactgggctggtctcaaactcctgacctcaagtgatccacccaccttggtctcccaaagtgctgggattacatgcgtgagccaccacacttggcctacattttttctttatataccagaacatctataacaggcaccttatctactcattagtgaagagataattggattacacaggcaggcttgtttactacatccagaatgtagaaactgctttcttcaacatcttggttctagctagtaataacaatataattctttggcagatattcagaataacattttaaactacattttcttagaaaattgcattcttgtagtgagcagtgtatggtctcttttgttcagaatttaaaactgataaccaatgaaagccttttctcttattcctctaccgtcatttacatgataatctgaagctaatatgacaatatttaaatactaagtggtactagggaactacaagaatactgtaaagcttaagccattgttatcactgtcatttagcatttaataacaaaactatacagaattatgtgcataccaatgaatgttttgtaccatctagttaaattttttaaataaagttttatgggttaagcag

SEQ ID NO: 92 - DNA, 7681 bp, Homo sapiens
agagggaggtggcgatggtgcgcccggtggcggtggcggcggcggttgcggaggcttccttggtcggattgcaacgaggagaagatgactgaccaaccgactggctgaatgaatgaatggcggagccgagcgcgccatgaggagcctgccgagcctgggcggcctcgccctgttgtgctgcgccgccgccgccgccgccgccgccgtcgcctcagccgcctcggcggggaatgtcaccggtggcggcggggccgcggggcaggtggacgcgtcgccgggccccgggttgcggggcgagcccagccaccccttccctagggcgacggctcccacggcccaggccccgaggaccgggcccccgcgcgccaccgtccaccgacccctggctgcgacttctccagcccagtccccggagaccacccctctttgggcgactgctggaccctcttccaccacctttcaggcgccgctcggcccctcgccgaccacccctccggcggcggaacgcacttcgaccacctctcaggcgccgaccagacccgcgccgaccaccctttcgacgaccactggcccggcgccgaccacccctgtagcgaccaccgtaccggcgcccacgactccccggaccccgacccccgatctccccagcagcagcaacagcagcgtcctccccaccccacctgccaccgaggccccctcttcgcctcctccagagtatgtatgtaactgctctgtggttggaagcctgaatgtgaatcgctgcaaccagaccacagggcagtgtgagtgtcggccaggttatcaggggcttcactgtgaaacctgcaaagagggcttttacctaaattacacttctgggctctgtcagccatgtgactgtagtccacatggagctctcagcataccgtgcaacaggtaagcaacagagggtggaactgaagtttattttattttagcaaggggaaaaaaaaggctgctactctcaaggaccatactggtttaaacaaagggggatgagggtcatagatttacaaaatattttatatacttttattctcttactttatatgttatatttaatgtcaggatttaaaaacatctaatttactgatttagttcttcaaaagcactagagtcgccaatttttctctgggataatttctgtaaatttcatgggaaaaaattattgaagaataaatctgctttctggaagggctttcaggcatgaaacctgctaggaggtttagaaatgttcttatgtttattaatataccattggagtttgaggaaatttgttgtttggtttatttttctctctaatcaaaattctacatttgtttctttggacatctaaagcttaacctgggggtaccctaatttatttaactagtggtaagtagactggttttactctatttaccagtacatttttgagaccaaaagtagattaagcaggaattatctttaaactattatgttatttggaggtaatttaatctagtggaataatgtactgttatctaagcatttgccttgtactgcactgaaagtaattattctttgaccttatgtgaggcacttggctttttgtggaccccaagtcaaaaaactgaagagacagtattaaataatgaaaaaaataatgacaggttatactcagtgtaacctgggtataacccaagatctgctgccacttaggagctgtgttccttgggcaagtaatttcctttcactgagcttgtttcttctcaaggttgttgtgaagattaaatgagttgatatatataaaatgcctagcacatgtcactcaataaattctggtttgttttaatttcaaaggaatattatggactgaaatgagagaacatgttttaagaacttttagctccttgacaaagaagtgctttatactttagcactaaatattttaaatgctttataaatgatattatactgttatggaatattgtatcatattgtagtttattaaaaatgtagaagaggctgggcgcggtggctcacgcctgtaatcctagcactttgggaggccaaggcgggtggatcacttgaggccaggagttctagatgagcctggccagcacagtgaaaccccgtctctactaaaaatacaaacaaattagctgggcgtggtggcacacacctgtagtcccagctactcgggaggctgaggcaggagaatcggttgaacccgggaggtggaggttgcagtgagctgagatcgcgccactgcactccagcctggtgagagagggagactctgtcttaaaaaaaaaaaaattctgggaaatgccagtgcaaagtgggtgtcattggctctatatgtgaccgatgccaagatggatattatggctttagtaagaatggctgcttgccctgccaatgcaataatcggtctgccagttgcgatgccctcacaggtgcttgtttaaactgccaggaaaatagcaaaggaaatcactgtgaagaatgtaaagaaggattttatcagagtcctgatgccactaaagaatgtcttcgctgcccttgttcagcagtgacatctacaggcagctgctctataaaatcgagtgaattggaacctgaatgtgaccagtgtaaagatggttacataggcccgaactgcaataaatgtgaaaatggctattacaattttgacagcatctgtagaaagtgccaatgtcacggccatgtggacccagttaaaactccaaagatttgtaagcccgagagtggtgagtgcatcaactgcctccataacaccactgggttttggtgtgagaactgcctagaaggttatgttcacgacctcgagggaaattgcatcaagaaagaagttattcttccaacacctgaaggttctaccattttggtttccaatgcctctttgaccacatcagtgcccacccctgttataaatagtacttttacccctacaaccctgcagactatcttttcagtaagcacttctgaaaacagcacttcagctttagctgatgtatcatggacccaatttaacatcatcattttgacagtcatcatcattgttgtggtgctgctaatgggatttgtgggggctgtatatatgtaccgcgagtaccaaaaccggaaactcaatgcccccttttggaccatcgagctgaaagaagacaatatcagtttcagcagctaccatgacagcattcccaatgcagatgtttcgggattgttggaagatgatggcaatgaagtggctcccaatgggcagctgaccctgacgacgcccatacataactacaaagcctaaggagctagaactgttctgaattgttaaaccacagtgcttgctaagacagagtcagcccctgggccagacaaagcctggctagagtttgctgagaaagcaaaggcaaatagtgcatctgaaattttcaggtacaaatttgtaatgcgcttagcctatctattgctcttagttttcccatgaagatctgaagcgttcactgtcattaggacttgaagtaaagtatatttttgtaccaaaccacatgggagtatggaaaggctgaaccccatagtgcagcccaaaaccactttgacctccagatagactcctggggaagcattcaccaagccagtggtaacaagatgatgaatgtggagggggaaaagactgctggaagacttcatctccattcctgaaacattttttttaaaacagtgtcagggattatattcgttttactatacaaaaggacatcattgaggaaaagcttgtttctaggctgtatcacagtaaataatcttgattgtttctagaacaggggtagaaaagtcccaagatcttcagaagggcttggttttttcctcccaggattcttgctcagtgatgagttgaaagcacaggataagcttctaagggaggaaggcagcattggggagcaggaggctgatggtcctcctcagggtctcagtgtaaatgataaattgtctaaaaataaggaatattcctgcctctagagaaataaggtgtacatagttaatgtagcatatctggtcgacgttgtatttgtatctatttgtaaaaaaaaaatcatgtcatattttatcatctggaatttatttgtacagcagttaatggtgttgtaaaaagaaaaatatggggattgcttaaaatactgtaaaatagatggcaatattgctagagctgggactctggtgagcatccgtcatttttagtccttcttgaggacattgctgaaatttataagaggtcgaatgtttctttctttcctttctcagtctaaaagtagagttatatgctctttgacttactatgattcaagcaatagattttgaagtcagtaatcgttaagctgggacataggatgcattctccaaaaacattaatctaattagacattagccaccctatatattttacatagattaatataaaacatatcctcattaaaaaatgtttttcttgaatgtaaaagatagtcttccaaaggatagaaatattttagttccaagagaaaagccatcatattacttgggatctgtagttttcatgcctatgaaatatttataatcctccctcaccccaaataaaaaatctcctacatgtgaacatagcctgtcactcatttgccatgaggtatgtgccatctccctgcagtgctatagttctcccattgtcttcctgtctggttaatgagcagctttgtagatgggtgtgtctagttagttcttgctttttgatggagttttttcctagaggccaactactgttgctctcgtttattatgatattgacattttgggttaagcaaggtgggtgggaaaggtggtcagatgttaaatataacttattaggaggaacagtgaactgtgaagtggttagaaaaaaaataaaaacttcttattagattagacctaggaaattcaagctgacccctttgcctaacttccctagagaaaaacctagaacttggtcatccctttataggagacccctaagttgttctcagggtttggagatgatgttctggagggagtacaagcaaataatctacttctggtaatctgagggtgctttgcgtatttggccattgctcagaagaatagaggttacattatattacattatatgaaaattatttagtttttctatagccctttgtagtttgcaaagcacttttccatatgtgtgtcctctcttccacaccatagccccctgaggaagtaattgttgtccccattttatagatgaaaaggctgaggcacagaggagctaaatatcttgttcaaggctatacaatgtgtgtgattattaggcttggaatcagggcctctaactctaaagcacatgttttttcaactatatgcagaaattgcctagccatggacacaagaaagctgggaggaagagttctacttgtggatgtttttaattttttttaaatatcaggagcaatccagggccatacagctatgaagcacttagtgaaaagaacacaagaagatttactaactgaagttagtattagtgattagaaaacaaaactgccagtttgtgcttcattaaggtgaactcatctctccaagcaggaagggaaaatttgctttccctagcagttgctgcatatgtgtgtacagactgcacaattctaagaaattgtgcaaaatggcatacctgtctttctcccagatacaccgccccctgccccccccaaaaaaggtcaggattaaaggtggtgagaagtgaacatttattaaacagaagttaaaccaatagagagaaaggaggtttgttggagtctaagaggattttgaccatgtagaaattccttgaaacagaccttaaaaggtattgaaaaattgaatcacaaagaaagtttacctttaaatacttgttaatggctcctagatcatggttataatttttctcaatgggaaaaaaagtcttaaaatttgttttaaataagatcctctaatgtctcgagctttttgattctggaaataatttgctttaaaatataaatcaatcagaaagtgatctaccactgaaatcattctaggaaactagcatgggatgcactgcacaatgttctttcctctaaaggcatgggccccataaactgtggcatctggcagcaggatgccatcagtcctttagaaagcctaattttgggccgggtgcggtggctcacgcctgtaatcccagcactttgggaggccgaggcgggtggatcacaaggtcaggagttcgagaccagcctggtcaacatggcgaaatcccgtctctactaaaaacacaaaaattagccgggtgtacgtgcctgtagtctcagctacttgggaggctgaggcaggagaatcacttgaacctgggaggcagaggttacagtgagccgagatggcgccatttcactccagcctgggcgacagagcaagactctgtctcaaaaaaaaggaagaaaaagaaagcctaatattgggagaatgtttgtgtaaggattggaaatctgtttatttttaaataagatagcactgatgtgaatcttatttggaaattacagatactgccattaagcgatgcttttatcttcattaattcattttggtaagcgcctatgcatttctgatggttaggtgccctaggtagtgttaagtatgtccgtgtcctcccttactcccctctcgctccctctaccctctatcccctagggttcttttattaatggaatttctccagttatagagaaaaaaatgacatttgaaaactaaagctcatttatattaatactaaggtcctgtgggcctagtgcgttactcttcccagtgatacctagattttaagagtagagaacagaggaaacatgggatgagaggagagaggttttttagacaacatttgtagacacctcaaattatatcactgttctctagcgccaatattcccaggtaaattgaccattaaagcaatactcactgacctactagtttattttggtcagctgagtaccatcaggatatttaaccctttaagtgctgttttgggagtagaaaactaaagcaacaatacttcctcttgacagctttgattggaatggggttattagatcattcaccttggtcctacactttttaggatgcttggtgaacataacaccacttataatgaacatccctggttcctatattttgggctatgtgggtaggaattgttacttgttactgcagcagcagccctagaaagtaagcccagggcttcagatctaagttagtccaaaagctaaatgatttaaagtcaagttgtaatgctaggcataagcactctataatacattaaattataggccgagcaattagggaatgtttctgaaacattaaacttgtatttatgtcactaaaattctaacacaaacttaaaaaatgtgtctcatacatatgctgtactaggcttcatcatgcatttctaaatttgtgtatgatttgaatatatgaaagaatttatacaagagtgttatttaaaattattaaaaataaatgtatataatttgtacctattgtagatttgttgtttacttttttgtgtggtcagagttgtttcatgtcttcaaatacatgccaaggatcatttactttcagcccacttcataaaaatctttgaactctt

SEQ ID NO: 93 - DNA, 4093 bp, Homo sapiens
ggacgctcttgcggtcccagagtggagtggaaggtctggagctttgggaggagacggggaggacagactggaggcgtgttcctccggagttttctttttcgtgcgagccctcgcgcgcgcgtacagtcatcccgctggtctgacgattgtggagaggcggtggagaggcttcatccatcccacccggtcgtcgccggggattggggtcccagcgagacctccccgggagaagcagtgcccaggaggttttctgaagccggggaagctgtgcagccgaagccgccgccgcgccggagcccgggacaccggccaccctccgcgccacccaccctcgccggctccggcttcctctggcccaggcgccgcgcggacccggcagctgtctgcgcacgccgagctccacggtgaaaaaaaagtgaaggtgtaaaagcagcacaagtgcaataagagatatttcctcaaatttgcctcaagatggaaaccctttgcctcagggcatccttttggctggcactggttggatgtgtaatcagtgataatcctgagagatacagcacaaatctaagcaatcatgtggatgatttcaccacttttcgtggcacagagctcagcttcctggttaccactcatcaacccactaatttggtcctacccagcaatggctcaatgcacaactattgcccacagcagactaaaattacttcagctttcaaatacattaacactgtgatatcttgtactattttcatcgtgggaatggtggggaatgcaactctgctcaggatcatttaccagaacaaatgtatgaggaatggccccaacgcgctgatagccagtcttgcccttggagaccttatctatgtggtcattgatctccctatcaatgtatttaagctgctggctgggcgctggccttttgatcacaatgactttggcgtatttctttgcaagctgttcccctttttgcagaagtcctcggtggggatcaccgtcctcaacctctgcgctcttagtgttgacaggtacagagcagttgcctcctggagtcgtgttcagggaattgggattcctttggtaactgccattgaaattgtctccatctggatcctgtcctttatcctggccattcctgaagcgattggcttcgtcatggtaccctttgaatataggggtgaacagcataaaacctgtatgctcaatgccacatcaaaattcatggagttctaccaagatgtaaaggactggtggctcttcgggttctatttctgtatgcccttggtgtgcactgcgatcttctacaccctcatgacttgtgagatgttgaacagaaggaatggcagcttgagaattgccctcagtgaacatcttaagcagcgtcgagaagtggcaaaaacagttttctgcttggttgtaatttttgctctttgctggttccctcttcatttaagccgtatattgaagaaaactgtgtataacgagatggacaagaaccgatgtgaattacttagtttcttactgctcatggattacatcggtattaacttggcaaccatgaattcatgtataaaccccatagctctgtattttgtgagcaagaaatttaaaaattgtttccagtcatgcctctgctgctgctgttaccagtccaaaagtctgatgacctcggtccccatgaacggaacaagcatccagtggaagaaccacgatcaaaacaaccacaacacagaccggagcagccataaggacagcatgaactgaccacccttagaagcactcctcggtactcccataatcctctcggagaaaaaaatcacaaggcaactgtgagtccgggaatctcttctctgatccttcttccttaattcactcccacacccaagaagaaatgctttccaaaaccgcaagggtagactggtttatccacccacaacatctacgaatcgtacttctttaattgatctaatttacatattctgcgtgttgtattcagcactaaaaaatggtgggagctgggggagaatgaagactgttaaatgaaaccagaaggatatttactacttttgcatgaaaatagagctttcaagtacatggctagcttttatggcagttctggtgaatgttcaatgggaactggtcaccatgaaactttagagattaacgacaagattttctactttttttaagtgatttttttgtccttcagccaaacacaatatgggctcaagtcacttttatttgaaatgtcatttggtgccagtattttttaactgcataatagcctaacatgattatttgaacttatttacacatagtttgaaaaaaaaaagacaaaaatagtattcaggtgagcaattagattagtattttccacgtcactgtttatttttttaaaacacaaattctaaagctacaacaaatactacaggcccttaaagcacagtctgatgacacatttggcagtttaatagatgttactcaaagaattttttaagaactgtattttattttttaaatggtgttttattacaagggaccttgaacatgttttgtatgttaaattcaaaagtaatgcttcaatcagatagttctttttcacaagttcaatctgtttttcatgtaaattttgtatgaaaaatcaatgtcaagtaccaaaatgttaatgtatgtgtcatttaactctgcctgagactttcagtgcactgtatatagaagtctaaaacacacctaagagaaaaagatcgaatttttcagatgattcagaaattttcattcaggtatttgtaatagtgacatatatatgtatatacatatcacctcctattctcttaatttttcttaaaatgttaactggcagtaagtcttttttgatcattcccttttccatataggaaacataattttgaagtggccagatgagtttatcatgtcagtgaaaaataattacccacaaatgccaccagaacttacgattcttcacttcttggggttttcagtatgaacctaactccccaccccaacatctccctcccacattgtcaccatttcaaagggcccacagtgacttttgctgggcattttcccagatgtttacagactgtgagtacagcagaaaatcttttactagtgtgtgtgtgtatatatataaacaattgtaaatttcttttagcccatttttctagactgtctctgtggaatatatttgtgtgtgtgatatatgcatgtgtgtgatggtatgtatggatttaatctaatctaataattgtgccccgcagttgtgccaaagtgcatagtctgagtaaaatctaggtgattgttcatcatgacaacctgcctcagtccattttaacctgtagcaaccttctgcattcataaatcttgtaatcatgttaccattacaaatgggatataagaggcagcgtgaaagcagatgagctgtggactagcaatatagggttttgtttggttggttggtttgataaagcagtatttggggtcatattgtttcctgtgctggagcaaaagtcattacactttgaagtattatattgttcttatcctcaattcaatgtggtgatgaaattgccaggttgtctgatatttctttcagacttcgccagacagattgctgataataaattaggtaagataatttgttgggccatattttaggacaggtaaaataacatcaggttccagttgcttgaattgcaaggctaagaagtactgcccttttgtgtgttagcagtcaaatctattattccactggcgcatcatatgcagtgatatatgcctataatataagccataggttcacaccattttgtttagacaattgtctttttttcaagatgctttgtttctttcatatgaaaaaaatgcattttataaattcagaaagtcatagatttctgaaggcgtcaacgtgcattttatttatggactggtaagtaactgtggtttactagcaggaatatttccaatttctacctttactacatcttttcaacaagtaactttgtagaaatgagccagaagccaaggccctgagttggcagtggcccataagtgtaaaataaaagtttacagaaacctt

SEQ ID NO: 94 - DNA, 4109 bp, Homo sapiens
tttgtcatcagctcgctctccattggcggggagcggagagcagcgaagaagggggtggggaggggaggggaagggaagggggtggaaactgcctggagccgtttctccgcgccgctgttggtgctgccgctgcctcctcctcctccgccgccgccgccgccgccgccgcctcctccggctcttcgctcggcccctctccgcctccatgtgccggatagcgggagcgctgcggaccctgctgccgctgctggcggccctgcttcaggcgtctgtagaggcttctggtgaaatcgcattatgcaagactggatttcctgaagatgtttacagtgcagtcttatcgaaggatgtgcatgaaggacagcctcttctcaatgtgaagtttagcaactgcaatggaaaaagaaaagtacaatatgagagcagtgagcctgcagattttaaggtggatgaagatggcatggtgtatgccgtgagaagctttccactctcttctgagcatgccaagttcctgatatatgcccaagacaaagagacccaggaaaagtggcaagtggcagtaaaattgagcctgaagccaaccttaactgaggagtcagtgaaggagtcagcagaagttgaagaaatagtgttcccaagacaattcagtaagcacagtggccacctacaaaggcagaagagagactgggtcatccctccaatcaacttgccagaaaactccaggggaccttttcctcaagagcttgtcaggatcaggtctgatagagataaaaacctttcactgcggtacagtgtaactgggccaggagctgaccagcctccaactggtatcttcattatcaaccccatctcgggtcagctgtcggtgacaaagcccctggatcgcgagcagatagcccggtttcatttgagggcacatgcagtagatattaatggaaatcaagtggagaaccccattgacattgtcatcaatgttattgacatgaatgacaacagacctgagttcttacaccaggtttggaatgggacagttcctgagggatcaaagcctggaacatatgtgatgaccgtaacagcaattgatgctgacgatcccaatgccctcaatgggatgttgaggtacagaatcgtgtctcaggctccaagcaccccttcacccaacatgtttacaatcaacaatgagactggtgacatcatcacagtggcagctggacttgatcgagaaaaagtgcaacagtatacgttaataattcaagctacagacatggaaggcaatcccacatatggcctttcaaacacagccacggccgtcatcacagtgacagatgtcaatgacaatcctccagagtttactgccatgacgttttatggtgaagttcctgagaacagggtagacatcatagtagctaatctaactgtgaccgataaggatcaaccccatacaccagcctggaacgcagtgtacagaatcagtggcggagatcctactggacggttcgccatccagaccgacccaaacagcaacgacgggttagtcaccgtggtcaaaccaatcgactttgaaacaaataggatgtttgtccttactgttgctgcagaaaatcaagtgccattagccaagggaattcagcacccccctcagtcaactgcaaccgtgtctgttacagttattgacgtaaatgaaaacccttattttgcccccaatcctaagatcattcgccaagaagaagggcttcatgccggtaccatgttgacaacattcactgctcaggacccagatcgatatatgcagcaaaatattagatacactaaattatctgatcctgccaattggctaaaaatagatcctgtgaatggacaaataactacaattgctgttttggaccgagaatcaccaaatgtgaaaaacaatatatataatgctactttccttgcttctgacaatggaattcctcctatgagtggaacaggaacgctgcagatctatttacttgatattaatgacaatgcccctcaagtgttacctcaagaggcagagacttgcgaaactccagaccccaattcaattaatattacagcacttgattatgacattgatccaaatgctggaccatttgcttttgatcttcctttatctccagtgactattaagagaaattggaccatcactcggcttaatggtgattttgctcagcttaatttaaagataaaatttcttgaagctggtatctatgaagttcccatcataatcacagattcgggtaatcctcccaaatcaaatatttccatcctgcgtgtgaaggtttgccagtgtgactccaacggggactgcacagatgtggacaggattgtgggtgcggggcttggcaccggtgccatcattgccatcctgctctgcatcatcatcctgcttatccttgtgctgatgtttgtggtatggatgaaacgccgggataaagaacgccaggccaaacaacttttaattgatccagaagatgatgtaagagataatattttaaaatatgatgaagaaggtggaggagaagaagaccaggactatgacttgagccagctgcagcagcctgacactgtggagcctgatgccatcaagcctgtgggaatccgacgaatggatgaaagacccatccacgccgagccccagtatccggtccgatctgcagccccacaccctggagacattggggacttcattaatgagggccttaaagcggctgacaatgaccccacagctccaccatatgactccctgttagtgtttgactatgaaggcagtggctccactgctgggtccttgagctcccttaattcctcaagtagtggtggtgagcaggactatgattacctgaacgactgggggccacggttcaagaaacttgctgacatgtatggtggaggtgatgactgaacttcagggtgaacttggtttttggacaagtacaaacaatttcaactgatattcccaaaaagcattcagaagctaggctttaactttgtagtctactagcacagtgcttgctggaggctttggcataggctgcaaaccaatttgggctcagagggaatatcagtgatccatactgtttggaaaaacactgagctcagttacacttgaattttacagtacagaagcactgggattttatgtgcctttttgtacctttttcagattggaattagttttctgtttaaggctttaatggtactgatttctgaaacgataagtaaaagacaaaatattttgtggtgggagcagtaagttaaaccatgatatgcttcaacacgcttttgttacattgcatttgcttttattaaaatacaaaattaaacaaacaaaaaaactcatggagcgattttattatcttgggggatgagaccatgagattggaaaatgtacattacttctagttttagactttagtttgtttttttttttttcactaaaatcttaaaacttactcagctggttgcaaataaagggagttttcatatcaccaatttgtagcaaaattgaattttttcataaactagaatgttagacacattttggtcttaatccatgtacacttttttatttctgtatttttccacttcactgtaaaaatagtatgtgtacataatgttttattggcatagtctatggagaagtgcagaaacttcagaacatgtgtatgtattatttggactatggattcaggttttttgcatgtttatatctttcgttatggataaagtatttacaaaacagtgacatttgattcaattgttgagctgtagttagaatactcaatttttaatttttttaatttttttattttttattttctttttggtttggggagggagaaaagttcttagcacaaatgttttacataatttgtaccaaaaaaaaaaaaaaaggaaaggaaagaaaggggtggcctgacactggtggcactactaagtgtgtgtttttttaaaaaaaaaatggaaaaaaaaaagcttttaaactggagagacttctgacaacagctttgcctctgtattgtgtaccagaatataaatgatacacctctgaccccagcgttctgaataaaatgctaattttggat

SEQ ID NO: 95 - DNA, 3666 bp, Homo sapiens
ctccgctcccgggtttatgccattctcctgcctcagcctccggagtagctgggactacaggttttgtgatgactgctccctggccttttggttccgagggagtgcagggcagcagtgtgaagacctgtttacgtccactccccactccccggggctggcttcgggacgaattcactgtggtattaacagagcccgggacagagcctggcagaaggcagatggatgctcgtgcccgtcggctggatgaatgaaaggtgagcagcaaaggcgataccaggatcgtccacggcgggactggaggaggagaatgggactgtgcggagcctgcgggaagaatctgaaagtgtctgtgtgatggagagagacatggaaaaggcgacgtcccagcggctggaactggggcggaggaacgggaacagggaaggcctgagttaggcaccacaaaggttttcaggagaaaagtggggcgagccgagagggtaggtgcgtgcccgggactctgccgatgcgggccgcgccccctggggccaagagactccacgtcccgctcagggcaaagggtgtggggagaagcggtcacgcccctcggctggaatccgtgaggaccaggtgagcagccttctcccagccgggactcagggcgctgtctccccgagcctgggcgggcggcgggtggcgcgcccagaagtggcccggcgccgccggatgggcggctctgcccctcagatctgcgggagggagattcggctggttcttggaaaggggagaactcgaccagccctcggcgccttctgggccaagcttaacccccgtgcaacctttggacaaaggcatatgggatgagaacgtctgttggcctggtgcactgtgcgtcctctgagaggtgaaggagcactgtgtggtcagagggctgcgagctctctgtttgggttccgaggaagacagaatgggctgaactggaactgacctaaatgtcagcaagaggaggtctttttcagtgtgctcaatatggtcaccaagcctggaaacatagagtctcaccctgttgcttaggcagatggcgcgatctcggctcctgggttcaagcaattctcctgcctcagcctcctgaatagccgggattacaggccttatctttccagtcgtccagcatgctctgcccaccccacgccgaggtgcactgaccatgagcctcaactcctccctcagctgcaggaaggagctgagtaatctcactgaggaggagggtggcgaagggggcgtcatcatcacccagttcatcgccatcattgtcatcaccatttttgtctgcctgggaaacctggtcatcgtggtcaccttgtacaagaagtcctacctcctcaccctcagcaacaagttcgtcttcagcctgactctgtccaacttcctgctgtccgtgttggtgctgccttttgtggtgacgagctccatccgcagggaatggatctttggtgtagtgtggtgcaacttctctgccctcctctacctgctgatcagctctgccagcatgctaaccctcggggtcattgccatcgaccgctactatgctgtcctgtaccccatggtgtaccccatgaagatcacagggaaccgggctgtgatggcacttgtctacatctggcttcactcgctcatcggctgcctgccacccctgtttggttggtcatccgtggagtttgacgagttcaaatggatgtgtgtggctgcttggcaccgggagcctggctacacggccttctggcagatctggtgtgccctcttcccctttctggtcatgctggtgtgctatggcttcatcttccgcgtggccagggtcaaggcacgcaaggtgcactgtggcacagtcgtcatcgtggaggaggatgctcagaggaccgggaggaagaactccagcacctccacctcctcttcaggcagcaggaggaatgcctttcagggtgtggtctactcggccaaccagtgcaaagccctcatcaccatcctggtggtcctcggtgccttcatggtcacctggggcccctacatggttgtcatcgcctctgaggccctctgggggaaaagctccgtctccccgagcctggagacttgggccacatggctgtcctttgccagcgctgtctgccaccccctgatctatggactctggaacaagacagttcgcaaagaactactgggcatgtgctttggggaccggtattatcgggaaccatttgtgcaacgacagaggacttccaggctcttcagcatttccaacaggatcacagacctgggcctgtccccacacctcactgcgctcatggcaggtggacagcccctggggcacagcagcagcacgggggacactggcttcagctgctcccaggactcaggtaacctgcgtgctttataagcctctcacctgtcgcgttttccctgtgttgcgtttcccccgtgtcgcgtttcccctgtgcaggctcaagagctggcggaggggcatttcccacggtgggacagatatgatgctgcttgaggactacacgtctgatgacaaccctccctctcactgcacttgcccacccaagagaaggagctcggtgacatttgaggatgaagtggaacaaatcaaagaagctgccaagaactcgattcttcatgtgaaagctgaagtacacaagtccttggacagttacgcagcaagcttggccaaagccattgaggccgaagccaaaatcaacttatttggggaggaggctttgccaggggtcttggttacagcacggactgtcccggggggcggcttcgggggccgccgaggcagcagaactcttgtgagccagaggctgcagttgcagagcatcgaagaaggagatgttttagctgccgagcagagatgagggcctcagggtgccgtggggctgcagcctgagaggctggcccggggaggagttcccatcaccgcctgtgccgcggccttgggagcatgtcactgtgtacagctggccacacacagggaaggagcagcatctggtatgcagccaccaggacaaggactgaaaataatgtctacagtccacagcttcagcatttccagagaccacatgtgagcttcttttaggtcccagtgatgggaccagaagcatctaaagcaaaaaaaaaaccaaaaaaaaatctagagatgtggctgtggctttttgggaggtggggcatgggaggaccagagacgaagggcttggaaggagacccccacatgcatcatttcctcctcttcacagtgtgctgggagtccagccgtgcactgtgccagatgcctcaggaggagaaccctccccagtgtactgtgaaggatgacacagcacttcttcctaatgacacgcgaccgtcctggtgcctctacatggttgatgcgggcagtgtgggaccctcagttctaggactggtccgcagagaaagcacccaggagcagagcgcttcggagcggtcctcagtggcgccacctgctggtgctaatagggacagccacaggcctcttgcagactggcccaccctgcctacttccctactgacaagttctttggtatttcaaaagggagaaaccactataaaagacaagaggaagggcaggtactaggtgtttcatttccagaattaaaaaaaaaatccatttaa

SEQ ID NO: 96 - DNA, 3959 bp, Homo sapiens
gcggtggcgcgggagcggccccggggaccccgcgctgctgacggcggcgaccgcggccggaggcgggcgcgggtctcggaggcggtcgcctcagcaccgccccacgggcggccccagcccctcccgcagccctcctccctcccgctcccttcccgccgcctcctccccgccctcctccctcctcgctcgcgggccgggcccggcatggtgcggcgtcgccgccgatggcgctgaggcggagcatggggcggccggggctcccgccgctgccgctgccgccgccaccgcggctcgggctgctgctggcggctctggcttctctgctgctcccggagtccgccgccgcaggtctgaagctcatgggagccccggtgaagctgacagtgtctcaggggcagccggtgaagctcaactgcagtgtggaggggatggaggagcctgacatccagtgggtgaaggatggggctgtggtccagaacttggaccagttgtacatcccagtcagcgagcagcactggatcggcttcctcagcctgaagtcagtggagcgctctgacgccggccggtactggtgccaggtggaggatgggggtgaaaccgagatctcccagccagtgtggctcacggtagaaggtgtgccatttttcacagtggagccaaaagatctggcagtgccacccaatgcccctttccaactgtcttgtgaggctgtgggtccccctgaacctgttaccattgtctggtggagaggaactacgaagatcgggggacccgctccctctccatctgttttaaatgtaacaggggtgacccagagcaccatgttttcctgtgaagctcacaacctaaaaggcctggcctcttctcgcacagccactgttcaccttcaagcactgcctgcagcccccttcaacatcaccgtgacaaagctttccagcagcaacgctagtgtggcctggatgccaggtgctgatggccgagctctgctacagtcctgtacagttcaggtgacacaggccccaggaggctgggaagtcctggctgttgtggtccctgtgcccccctttacctgcctgctccgggacctggtgcctgccaccaactacagcctcagggtgcgctgtgccaatgccttggggccctctccctatgctgactgggtgccctttcagaccaagggtctagccccagccagcgctccccaaaacctccatgccatccgcacagattcaggcctcatcttggagtgggaagaagtgatccccgaggcccctttggaaggccccctgggaccctacaaactgtcctgggttcaagacaatggaacccaggatgagctgacagtggaggggaccagggccaatttgacaggctgggatccccaaaaggacctgatcgtacgtgtgtgcgtctccaatgcagttggctgtggaccctggagtcagccactggtggtctcttctcatgaccgtgcaggccagcagggccctcctcacagccgcacatcctgggtacctgtggtccttggtgtgctaacggccctggtgacggctgctgccctggccctcatcctgcttcgaaagagacggaaagagacgcggtttgggcaagcctttgacagtgtcatggcccggggagagccagccgttcacttccgggcagcccggtccttcaatcgagaaaggcccgagcgcatcgaggccacattggacagcttgggcatcagcgatgaactaaaggaaaaactggaggatgtgctcatcccagagcagcagttcaccctgggccggatgttgggcaaaggagagtttggttcagtgcgggaggcccagctgaagcaagaggatggctcctttgtgaaagtggctgtgaagatgctgaaagctgacatcattgcctcaagcgacattgaagagttcctcagggaagcagcttgcatgaaggagtttgaccatccacacgtggccaaacttgttggggtaagcctccggagcagggctaaaggccgtctccccatccccatggtcatcttgcccttcatgaagcatggggacctgcatgccttcctgctcgcctcccggattggggagaacccctttaacctacccctccagaccctgatccggttcatggtggacattgcctgcggcatggagtacctgagctctcggaacttcatccaccgagacctggctgctcggaattgcatgctggcagaggacatgacagtgtgtgtggctgacttcggactctcccggaagatctacagtggggactactatcgtcaaggctgtgcctccaaactgcctgtcaagtggctggccctggagagcctggccgacaacctgtatactgtgcagagtgacgtgtgggcgttcggggtgaccatgtgggagatcatgacacgtgggcagacgccatatgctggcatcgaaaacgctgagatttacaactacctcattggcgggaaccgcctgaaacagcctccggagtgtatggaggacgtgtatgatctcatgtaccagtgctggagtgctgaccccaagcagcgcccgagctttacttgtctgcgaatggaactggagaacatcttgggccagctgtctgtgctatctgccagccaggaccccttatacatcaacatcgagagagctgaggagcccactgcgggaggcagcctggagctacctggcagggatcagccctacagtggggctggggatggcagtggcatgggggcagtgggtggcactcccagtgactgtcggtacatactcacccccggagggctggctgagcagccagggcaggcagagcaccagccagagagtcccctcaatgagacacagaggcttttgctgctgcagcaagggctactgccacacagtagctgttagcccacaggcagagggcatcggggccatttggccggctctggtggccactgagctggctgactaagccccgtctgaccccagcccagacagcaaggtgtggaggctcctgtggtagtcctcccaagctgtgctgggaagcccggactgaccaaatcacccaatcccagttcttcctgcaaccactctgtggccagcctggcatcagtttaggccttggcttgatggaagtgggccagtcctggttgtctgaacccaggcagctggcaggagtggggtggttatgtttccatggttaccatgggtgtggatggcagtgtggggagggcaggtccagctctgtgggccctaccctcctgctgagctgcccctgctgcttaagtgcatgcattgagctgcctccagcctggtggcccagctattaccacacttggggtttaaatatccaggtgtgcccctccaagtcacaaagagatgtccttgtaatattcccttttaggtgagggttggtaaggggttggtatctcaggtctgaatcttcaccatctttctgattccgcaccctgcctacgccaggagaagttgaggggagcatgcttccctgcagctgaccgggtcacacaaaggcatgctggagtacccagcctatcaggtgcccctcttccaaaggcagcgtgccgagccagcaagaggaaggggtgctgtgaggcttgcccaggagcaagtgaggccggagaggagttcaggaacccttctccatacccacaatctgagcacgctaccaaatctcaaaatatcctaagactaacaaaggcagctgtgtctgagcccaacccttctaaacggtgacctttagtgccaacttcccctctaactggacagcctcttctgtcccaagtctccagagagaaatcaggcctgatgagggggaattcctggaacctggaccccagccttggtgggggagcctctggaatgcatggggcgggtcctagctgttagggacatttccaagctgttagttgctgtttaaaatagaaataaaattgaagactaaagacctaa

SEQ ID NO: 97 - DNA, 7179 bp, Homo sapiens
agttgtacgttcgaaacctgtcgccgtcacttgcgcgtttggcattatccattgtcaccgcggaggaacgagcgctcgagatatcatcagtgcccgcaaatctccgcgccaaggcgctgagctactcctttccgaggtgcgcctctggtcctccgtccctggtgcccagcagcggcgaggcggcatctccgctcccgccgccgtgtccaccgagccctgggatcagggtggcagttctcaacgatgggcaggagggacctcggcggcgacccctaaaacaataccatgccccgggatccccgctgctgccgcgccagcgtcttccctttccacctccctgaccctgtcggattcggatgagcccattgcaaggagaagacgcagccgtcagattgcagattgagcttaaccaagaagttcgtaggctaatcaaggctggcttgacctacaaaagaagaagagagttctgcctgcccacttgggcttgtgttgacacggctgataacttgccatcacctgttgccagtgtggaaaaattctccctgttgaattttttgcacatggaggacagcagcaaagagggcaacacaggctgataagaccagagacagcagggagattattttaccatacgccctcaggacgttccctctagctggagttctggacttcaacagaaccccatccagtcattttgattttgctgtttattttttttttctttttctttttcccaccacattgtattttatttccgtacttcagaaatgggcctacagaccacaaagtggcccagccatggggcttttttcctgaagtcttggcttatcatttccctggggctctactcacaggtgtccaaactcctggcctgccctagtgtgtgccgctgcgacaggaactttgtctactgtaatgagcgaagcttgacctcagtgcctcttgggatcccggagggcgtaactgtactctacctccacaacaaccaaattaataatgctggatttcctgcagaactgcacaatgtacagtcggtgcacacggtctacctgtatggcaaccaactggacgaattccccatgaaccttcccaagaatgtcagagttctccatttgcaggaaaacaatattcagaccatttcacgggctgctcttgcccagctcttgaagcttgaagagctgcacctggatgacaactccatatccacagtgggggtggaagacggggccttccgggaggctattagcctcaaattgttgtttttgtctaagaatcacctgagcagtgtgcctgttgggcttcctgtggacttgcaagagctgagagtggatgaaaatcgaattgctgtcatatccgacatggccttccagaatctcacgagcttggagcgtcttattgtggacgggaacctcctgaccaacaagggtatcgccgagggcaccttcagccatctcaccaagctcaaggaattttcaattgtacgtaattcgctgtcccaccctcctcccgatctcccaggtacgcatctgatcaggctctatttgcaggacaaccagataaaccacattcctttgacagccttctcaaatctgcgtaagctggaacggctggatatatccaacaaccaactgcggatgctgactcaaggggtttttgataatctctccaacctgaagcagctcactgctcggaataacccttggttttgtgactgcagtattaaatgggtcacagaatggctcaaatatatcccttcatctctcaacgtgcggggtttcatgtgccaaggtcctgaacaagtccgggggatggccgtcagggaattaaatatgaatcttttgtcctgtcccaccacgacccccggcctgcctctcttcaccccagccccaagtacagcttctccgaccactcagcctcccaccctctctattccaaaccctagcagaagctacacgcctccaactcctaccacatcgaaacttcccacgattcctgactgggatggcagagaaagagtgaccccacctatttctgaacggatccagctctctatccattttgtgaatgatacttccattcaagtcagctggctctctctcttcaccgtgatggcatacaaactcacatgggtgaaaatgggccacagtttagtagggggcatcgttcaggagcgcatagtcagcggtgagaagcaacacctgagcctggttaacttagagccccgatccacctatcggatttgtttagtgccactggatgcttttaactaccgcgcggtagaagacaccatttgttcagaggccaccacccatgcctcctatctgaacaacggcagcaacacagcgtccagccatgagcagacgacgtcccacagcatgggctccccctttctgctggcgggcttgatcgggggcgcggtgatatttgtgctggtggtcttgctcagcgtcttttgctggcatatgcacaaaaaggggcgctacacctcccagaagtggaaatacaaccggggccggcggaaagatgattattgcgaggcaggcaccaagaaggacaactccatcctggagatgacagaaaccagttttcagatcgtctccttaaataacgatcaactccttaaaggagatttcagactgcagcccatttacaccccaaatgggggcattaattacacagactgccatatccccaacaacatgcgatactgcaacagcagcgtgccagacctggagcactgccatacgtgacagccagaggcccagcgttatcaaggcggacaattagactcttgagaacacactcgtgtgtgcacataaagacacgcagattacatttgataaatgttacacagatgcatttgtgcatttgaatactctgtaatttatacggtgtactatataatgggatttaaaaaaagtgctatcttttctatttcaagttaattacaaacagttttgtaactctttgctttttaaatcttaaaaaaaaaaaagttgctgaagtactgtacagggttgtacaatgagaacccaatgccaaggcaaaaagaacgagtgatttttccttaggatacacatcaaccactttgctgttgaagctgtcagaataaattcctggtggtcagatgaaagggcagattaaatggactcatcagggtaagaggaataatatgggtaaaacaagaaatggcccgatagtttcacactattcctatacctccaggtccggaagacaggtaaaaaattctataatgtaagaatggaggtagttaccctgatttgaccctgtgtgggaaatgctgaaagcaccaggaggaagccggttcccgtgagataagttaacccggcctgacagaatcaagaaaattgagatgagatttgaaaggacccgaaaatgcaggggttggctttctgactgggaacttaaaaatcactcttcatgcttccctggtcctatgtgataacagagttagagacttgagtctgatttcagtcatcttcagggaccagtctgatgttgtagcaagaagactccctttaaaagtgttactgttcaaatcatatatcaggttgaatcacattcaacagagatatattctagaatacttttttagaagaggctaataaagggaagaattatattgaatggaattatttttgataatgagaattatttgggtagattcactgaggctatgtcaacatgatatttagaccaacaggtgatcaatgtttggaaaatacaacaatgacttatttaaaaattacccttcctgctatttagacaaaaacaactgatcagtggttctgttatgtcagctgactttgttagtatcatgttgaaatagcttgaagtaatatcttttatccccttgcaaattcttgtcttccaatcatctcccatatattttcataattagttgtttatgacacctttgtttttctccctctgttcagtatttcaaggaaaattatggatgccagtcttggctgcacaagatatccattacgtacttatacattttaaaatgagtactaattttcactgctaataattctgtaaggacacatcaaagctggccaaaataatgaattttttttaaaaagcaatacctggtttccaccttggactgactttgatcctgttccacttttgaaattttatttgttccttttccatcgtggatgttcctctactttggcaattgtggagggctaatcaatcttatgttagcaggacaacccatgaaaaacaagtcagagagtgaaggctttttcccctaatcctggcagagcagggcgtagaaaagagaggatgtccgtgcttaattctagatacttttgagacaacaccttcagaaaacacataatttaatctttgccatccttagatagagaagggctatagatcacatacgttatcaaaaactactcccttggaaaaaatatctttcgaaaatcaaatttaaacatttcactctgtgctgcatatttcttttaccattgaccattattatagggacccatgaagtaaatgtcacaatcatcttactagctctctctctctcagcaaaataaaactgtgatgtgtcttctttgtaaaagtttaggtataaaatgctatgcaactttttctttatagtaagagctttattttctttaataatatagcccaacttatatgttttaatctcccttgtccctcagaataagcagaaaatataactgcagctgtatgtcgtagacacaagaattgaaactgtgcagtcagtagagctgaacttagctatgaattaatttaaattaattctaaagtgactctggtttccattttagtctattagctagagggttttggctgttgctttttttaaagttaggtccacacagtgaagggaaaagagtctgtgaaggtgatcagtgtagcagtaagacatctaaaatcaagacaatgacatgggggctttgtgtacttagctggataattcccttctactgtcctcttccccttggctgtgtagataaaattgtgcattcaaatgatggtactttgacttttgagggtttttatttctgttattcacaaaatactcattctcatttatgtatattgtatgtttaacccccagtgggatttctggctgctgaaaccactttgggccaggaagaacaaggatgaagaggttcctgtcatttcttatggggttcacagaattatttggggcttaaatggtacaatggagacagtcatgtgcaatgcttaagatggtctgacagggtcccttttgctggaggtgttcctgaagagattgaacctagtaacaggctttattttcaccttgtgtacaacatggcaaagactgctaagattaaaatccgtctcccatttgttacagcctcacctgcaccaggatagaaagcacgtgatggaatctgtgatgtctaatgtgtcttatgaaaattgccaaacaactgtccctggggattctgctttgattggcatttttagtcatgggaatgtatatttgctgatatatctgctctgtgtttgggcctctcttgctgtcattatgatgtattttgagatgattagtcaagagtcaaggttgcgagtacaggccaagaccatgggaaaaaaagccatgctcactggccaataaagagcttgatgctgcctggccaaatgaggtgactcagatagaatctgatcccattcagagcttggtaaatgtcactgtacagaagacattgaaaaggaagaggcatagtcatgatcaaaaggatatattgacagttatctatagccagggtagttgttaatacctgcttgtttggggagatatgtttgattatagagagactctgggccaccctcaaacaccgtcagatgcattagcagcccactgcatgggacaatcgcaggcagatacgaggaatgtatcccctgcctattttccttgtgtaacaaatggaaaacattctcccctgtgagaaataatgcaatttctaattatctggatgttcgttgaaaatatattagacattctccctgaggttaaaaacaaaaagtacgtgaccagtctggtaagaagtattaatgaagtagctaatattacagcttcattttctactagcacctatcataatggtcttagtcatttcacacaaatcagaacttccttccccaccagggaggacaacatcttcatgctgtgattgaagcatccattcagaacacgaggcaatattgcagtccacagggaatggatgcttcacttgatctccggaccttggctgcagaggccatcgcagcttttgaaaagtgaaggggttaattcccattggtgtctttgcttatagcatttttctctaacctataacaaggagacattacattttactttagaacatgagaatagcagttttgctcatgacttaccattccagctgcatgggaaagcaaagcagaaaacagtgccccaaatggaaaaaagatactcacacagaacaaaacagttcttggtcttgttcttggtcttgtcaaaccttgcctgatgctctttctaaagtcaaaatatgaatgctaagaaggcataacctacatccttctctgatttcttcagcagggtcaaaagacagttactagcaatggggaatgcttgtcactgtggagaaagagttttgtatatgtctgataccgttgttataacaaaacaaatttttttactatagttttttgttttctacctgcacacccaccagaagagcacaaagcaaggccattgcaacaggcatttaaaaattattatcaaacatgcacatgcttgtacacacacacacacacacacacaaacaggggcatttgtaaaggtgtccctggaatgtaagatttataatgtttaaggcaaggtgaaggcattgccaagtgtgtgtcgctcataggactagtgtatattcactgaaagttaacctgatgatttgttattgtttgaaccatatgctgatttgcttctggtttctgtttagtgtgttctctctgataaggggctgaaagattctgcatcacacatcctctgagacctaccatgtcgcacactttgttaatgacaaacttcactctacactatacagtaccttgttgatatattcagtaaagtcttattttaaaagaaaacca

SEQ ID NO: 98 - DNA, 3780 bp, Homo sapiens
cttagaccttggttagatttgaaccaaggccctcctcggcctcccaaagtgctgggattacaggcgtgagccactgcccagctgaaaattgatacatttttcaaatgagaagtatttttttcaaatgggtgttggaaagtgagtttcctcacattgttcatgttgtgacactaggttggtgctatgtaatgacatggatatgaacgagctgcctacgaacctccccgtggacactgtgaagcttcgcatagagaagactgtcatccgcagaatctctgcggaggccttctattacctggtggagctccagtatctctgggtgacttacaattccgtggccagcattgaccccagcagcttttacaacctgaagcaactgcatgagttgcgcttggatgggaattctctggctgctttcccttgggcatctctgctggacatgccccttctgaggaccctggacttgcacaataacaaaataaccagtgtgccaaatgaggcgctcaggtatctgaagaaccttgcctacttggatttatcaagcaacagactcaccacattgccaccagatttcctggagagctggactcatttagtttcaacaccttctggagtcctggacctttccccaagcaggattattcttggctgatagaacgttacggctgtaaaaagctctagcatttatctagtcaactctcccattttgccgatgagaaaacaggctcagcaaggttgcatcacccaggtcacagaattaactaatggttgagcctcatcaggaacccaggcacagtaaagttggtctacaggacaatccttggttctgtgactgtcatatttccaaaatgattgagttgtcaaaggtcgttgaccctgctatagtgcttctggatccactgatgacttgcagtgaacctgagcgcctcacaggaattttgtttcagcgggctgaattggagcattgtctgaaaccatcagtgatgacctcagccaccaaaatcatgtctgctctgggcagtaatgttctactgcggtgtgatgccactggcttccccaccccacagatcacatggaccagatctgacagctcgccagttaattatacagtaatacaagaatctccagaggaaggagtcagatggtccataatgagcttgacaggcatttcttccaaagacgctggggattacaaatgtaaggccaaaaatctggctgggatgtcagaagctgtggttactgtgacagtgcttggcattaccacaactccaataccaccagacacttctgaaagaactggagatcatcctgagtgggatgtccagccgggatctggaagatctacatctgtatctagcgcatcatcatatctttggtcctcttccttctcccccacatcttctttttctgcttctactttgtctcctccctctactgcttccttctctttatctcctttctcctcctccactgtttcttcaaccacaactctgagcacaagcatctcagcaagtaccaccatggccaacaagcgatcattccagctccaccaaggtgggaaaagaaatttaaaggtggcaaagaatggaagtaagcttcctccagccagcacaagtaagaaagaagagctggcattgttggatcaaacaatgcttacggagacaaatgccgcaatagaaaacctcagggtggtcagtgagactaaagagagtgtgacattgacgtggaatatgatcaacaccacacataactctgcagtgactgtgttgtattccaagtatggtgggaaggacctgctgctgttgaatgcagactccagcaagaaccaagtaaccatagatggcttggaacccggtgggcaatacatggcctgtgtctgtccaaaaggagtgcctccccagaaagaccaatgcatcaccttttctactgaaagagttgaaggagatgattctcaatggtctctccttctcgtggtgaccagtactgcctgtgttgttatcttaccattgatttgtttcttgttgtacaaagtttgcaaactgcaatgtaaatcagaacctttttgggaagatgatttggcaaaggagacttatatccaatttgagaccctgtttcccaggtctcaaagtgtaggtgagctctggacacgaagccacagggatgactcagagaaattgctgctttgttctaggtcaagtgtggaatctcaggtgacttttaaaagtgaaggttccagaccagagtattattgctaaggttctgcagctcaggtgcatgtgagctacaaaactagcatctaagggtataattgaccctaggtttggatgacttttggacagactttcacattgtacatgaaaatcacaaatggaatgcttttaagtatgtttaaaaaataccatgagacctctgaactgaaaagacaaataatgttgattttttttcttgtgtggaaaaggtctacagaaataatttttagagtggtgcttaataaattattaatactttttagggtaatgttttagttcttaaaaataagttcatgtgaaagtagcaagtgaactctgtatttaaaaatatagttttttgagtcatgaggaaacattagcaaaaccagctaagccttgatgtttattcatgttcgaagtgcattatagcatttgctgtggatgttttctgacattgcctaatggagagcgtgggatcataaaggattttgtgttcactaaggttaaatctaactcacgggagagagagggctctgtctcttggtaccattatgcattgtgatactatagagttgtgttcatatttcttgtaagaaaaatttttgcttttctttagaaatataggtattagcaaaagtaagtatacaaagaggattatgacaaatagaccatttctttaaaaatggtaactgttgcatttaaacacatcgactgacagattatatggatatttaaaaataactttaaatcaatcttttaatattttgctgtttgctcttatgttctcccttctttcttccttccttgtcttccctccctttccttccttcattctttctttcttctgctctgtcagaagatatacaagtagccaaagcatcacgagccaagctgtttgtcttttgccatattgtcttttgattctcttgataaagagaaagcttttgaaattacttactgccctttgaaagtctgttttacaaccccaaaggatattttaggactttaaaagggaagcttcagtggattcatttggttagattcttttcctaggttaaaaacatcggggaacttaaatacataggaaaggagttcacaaataaaatttagtttttttagaaagagaatattttaataactgtagtatactacaagaaacatctcatggctttaagattaacgatagcgataaggcccactcaagcatctcacagtggtgatattacatgtcacttagcaggatgcaacctggcctagggatttccagaagacaaggccacctcagcacagatgcaactttcataaattttagaacaaagcctaaccttactagattaaacttgctctatgaaagaaacacttggtaattgacccagactgaatacatgtataagaaatgggaaagatctcccaaactctgagaacggtcctcaaatagaagctctcctagtcagttggtcatctgacctctgactatatccggcctatgacaccagccagctcctgctttctgtcttgtaagagcactgctggaataaactacttgagcatt

SEQ ID NO: 99 - DNA, 6237 bp, Homo sapiens
gaatgcaggtgagaaaaggcacggactctgcggctgcgaacccaaacttgggcaccgcacggtgcgcactgctcagccttcgcccccgtgggcgaaaggctgctgcggtttcaggcggctgcttcgtgactaatgaccttgcgcagagttgttaagaaaaaagagaaacccgcgctctccggggtgagaagggactgactctgggcgtctctgaagatggctcgggcttctctttggcgcgccggggggaccctgacactgaccgctctgtgacgcgagtagtctcccctgcaccgtgcccgaagcgacgtgccgggggatttttcattctcgatctgttgactggctcccccgctgcatgagcagagtcggagttgagactggcttgttgctggccccagcgcctggtgcaggaagcgactcacgtttgtctgggtggccggagccggagcagagcctgggtttggagtgagtgcctggaacgtgaattggactcaactcgagtagcagcaaagaccagcgggctggcaggcgggggaggctgcaggctcattccccacctcttcccagccccactgcccgtctgccggagcggttctggccccttccgacagagcggggactagagccggggattctccgcccgctgaggggatgactctgggttgggggagcgccgaacccgcggcgcgcagtgtcccgtgaactgtgagtactgcgactgaacggcggcaggcgagcgggcgattagcacccattgcatgaattatgaaacaataactttcggaagaagcaggaggaaaaaaagaagcatctatcgctgccctcccacccccattcccggccaactctccacgccgcttttgccccctccctcccctccctctcgctccttcctttccgggagaggggagaggactcgggggagggcaggcggccggccccggaggaggggggcgccgagggggctgtggttagaaggagcagtagcagcagcagcaggagaagatgctgaggatgcggaccgcgggatgggcgcgcggctggtgcttgggctgctgcctcctcctgccgctctcgctcagcctggcggccgccaagcagctcctccggtaccggctggccgaggagggccccgccgacgtccgcatcggcaacgtggcttcagacctgggcatcgtgaccggatcgggtgaggtgactttcagcctggagtccggttccgagtacctgaagatcgacaacctcactggcgagctgagcacgagcgagcggcgcatcgaccgcgagaagctgccccagtgtcagatgatcttcgacgagaacgagtgcttcctggacttcgaggtgtcggtgatcgggccctcgcagagctgggtggacctgtttgagggtcaggtcatcgtgcttgacatcaacgacaacacgcccaccttcccgtcgcccgtgctcacgctcacggtggaggagaatcggccggtgggcacactttacctgctgcccacagccaccgaccgcgacttcggccgcaacggcatcgagcgctacgagctgctccaggagcccggaggcggcggcagcggcggcgagagccggcgcgccggggcggccgacagcgccccctaccccgggggcggcgggaacggcgcgagcggcggcggctcgggaggctccaagcggcggctggacgcatcagagggcggcggcggcaccaaccccggcggccgcagcagcgtgttcgagctgcaggtggcggacaccccggacggcgagaagcagccgcagctgatcgtgaagggggcgctggaccgcgagcagcgcgactcctacgagctgaccctgcgagtgcgcgacggcggcgacccgcctcgctcctcgcaggccatcctacgggtcctcatcaccgacgtgaacgacaacagcccccgcttcgagaagagcgtgtacgaggccgacttggctgagaacagcgccccggggacccccatcctgcaactgcgcgcagccgacttggacgtgggggtcaacgggcagatcgaatacgtgttcggggcggccaccgagtcggtgaggcggctgctgcgccttgacgagacgtccggctggctcagcgtcctgcaccggatcgaccgcgaggaggtgaaccagctgcgcttcacggtcatggcccgcgaccgcgggcagccccccaagaccgacaaggccaccgtggtccttaacatcaaagacgagaacgacaacgtgccgtccattgaaatccgcaagattgggcgcatccccctcaaggacggggtggccaacgtggccgaggacgttctggtcgacacccccatcgctctggtgcaggtgtccgaccgagaccaaggcgagaacggggtggtcacctgcaccgtggtgggcgacgtgcccttccagctcaagccagccagcgacaccgagggcgaccagaacaagaaaaagtacttcttgcacacctcgacccctctggactatgaggccacccgggagttcaacgtggtcatcgtggcggtggactcaggcagccccagcctctcgagcaacaactccctgattgtcaaggtgggagacaccaacgacaacccgcccatgttcggccagtcggtggtggaggtttacttccctgagaacaacatcccgggcgagagggtggccacggtgctggcgacagacgcagacagcggtaagaacgccgagatcgcctactcgctggactcctctgtgatggggatctttgccatcgatcccgattctggggacatcctggtcaataccgtgctggaccgcgagcagactgacaggtatgagtttaaagttaacgccaaagacaaaggcatccccgtgctgcagggcagcactacggtgattgtgcaggtggctgataaaaatgacaatgaccctaagtttatgcaggacgtcttcaccttttatgtgaaagaaaacttgcagcccaacagccctgtggggatggtcaccgtgatggatgctgacaaggggcggaatgcagagatgagcctgtacatagaggagaacaataacattttttctattgaaaatgacacggggaccatttactccacaatgtcttttgaccgggaacatcagaccacatacactttcagagtcaaggctgtggatgggggagatcctcccagatctgccacagctacagtctcgctttttgtgatggatgaaaatgacaatgctcccacagttacccttcccaaaaacatttcctacactttactgccaccttcgagtaatgtcaggacagtagtagctacagtgttggcaacagacagtgatgatggcatcaatgcagacctgaactacagcattgtgggaggaaatcccttcaagctgtttgaaattgatcccactagtggtgtggtttccttagtgggaaaactcacccaaaagcattatggcttgcacaggttggtggtgcaagtgaatgacagtgggcagccttcccagtccaccacgactctggtgcacgtgtttgtcaatgaaagtgtttctaatgcaactgcgattgactcccagatagctagaagtttgcacatcccactcacccaggatatagctggtgacccaagctatgaaattagcaaacagagactcagtattgtcattggcgtggttgctggcattatgacggtgattctaatcatcttaattgtagtgatggcaaggtactgcaggtccaaaaataaaaatggctatgaagccggcaaaaaagatcacgaagacttttttacaccccaacagcatgacaaatctaaaaagcctaaaaaggacaagaaaaacaaaaaatctaagcagcctctctacagcagcattgtcactgtggaggcttctaagccaaatggacagaggtatgatagtgtcaatgagaagctgtcagacagcccaagcatggggcgatacaggtccgttaatggtgggcccggcagtcctgacctggcaaggcattacaaatctagttccccattgcctactgttcagcttcatccccagtcaccaactgcaggaaaaaaacaccaggccgtacaagatctaccaccagccaacacatttgtgggagcaggagacaacatttcaattggatcagatcactgctctgagtacagctgtcaaaccaataacaagtacagcaaacaggtaagatgtatcccaaatatatttaaatatcccagggagggctaataactctgagacagattatcttctgtaaagttttgtcttctcgtttttaaagttattaaaattttaacagtaggaatttaatgttaatttttgcaccattaatttagcaaaggccatctacaagaggtataccactgtattttgcaaattagaattaaggttcactaaactactgaaagaagtattcagagtaggcagtgtttggcagttctctttgcacttgacatccctaattcatactacatttttttgtttccagaataaatatgtgtgtattacttagatggttagttttcacctgaaattattttcttctgtggcaactaagtggataattacatccagagaaaaagtttctaaagttactactggtgtctatgcaaattggattccatagaagttttagctatgttatttacaatgcaggattttacagataaatagatgctgattcatgcagatgtagtactaagtctgagatattgaaatactgactactttgatgaaactgctggtttaaaaatatttactgatatgcaaatgtcatgcaaaactccactttcaatcttttatatctataataatcgatacctataacaattagtgttctataatgatatgcaattaccatttgcattctttctgtttggtattaaaagtttgcaaacaaaaatacattgcatgagccatttatatgcgtctacatccatacattactgtgtttggctgaattccactctaatatgatgctccattatgcaccatactgtgatgacctttctactccgaaacctgctggagcctgcccttggccgtggggtgtcagccaatcactgcttgttccacttgttgtacattttatttttgagtctttttctttctcatatacagaaaaatagtatgaaaataaaataaatgtatgaaacagtattaatgcagaaatgtgctactaatggatgtctgagtcaccagaaattccattcttaaagaggcggttagcacctattagacgtaacagtgatgtcttttaaaaaatccaaaagcatattgcaacaataagtttgagactttgtgtgaacaaagggaaattcagcctcttatgtctttgtctttaatacattaaatactgattttgaataaaaatctaaattgatcaatccatttcgtagagtgacgttttctgttgtgagtcagcctcaggacccacatcaggggtcactgcagagttgctatgacagcgggctggaggagtcagaaacaccaagcagtaagagttcatcagggccaagactgggtgcgcttccactcccagaggacaactatgaaaggaccacgccggatggcagtgttgattcaaggcctcttccagatgtagccctgactgggaagtgcactcgtgagtgtgatgagtatggccactcagactcctgctggatgccggtccgcacttctccggagaggaagaagagccagcctaaactgtccactttcatgcctgttgatgaacgaggaagccaggaaaagctggccaatggggaggccgccatcatgggtgaccgcaacagaaacctcctgaacaaaaagttgacctcatcctatgagaccttcagtgcagctagtttcagcaaaaatgaggaagccaaccctgaggatattccccttacaaaaacaggggaatataagccatctcctgtcaatactctcactagaagagaagtttacctgtaggctataaaggagcaacagcaaagttctttacatgtatgaaaaggagaataaggggcaaaaaccttacaaagcaaaacgtttaatcacaaagagggggctaccaaagagacaaagctttgcctgccacttctgcctccagatcaggcctttagtgatactgttagcctgattctactgtacaatgtagaaaccatccttgttacttgcatgtctaaccccttcactgattcccaacactcactttctcttccccacccctctccaaaaaaaaaaaaacaaaaa

SEQ ID NO: 100 - DNA, 7242 bp, Homo sapiens
agacgcgcgggcgcgggggacggcgcaggggccgcctggctggagcagccagaggggatagcttcgtcgagaacggaggacaccggcggtccagggtcctgggcagtcgcgccagagctgagcggagggcgcggcgcgagaacgacgaatctttgtgacattctctctcagcattctttatcccctgtttgctgaagacttcgacaaaagctggtcttagctgttggcattctcctgagaaaaggatagcttcagaaatcagaaaaacatttgggaggtgtctagcccagtggaccttctgaagagcaatgctaagaagacgtttggtttaaagaattaaaaggaagaacaacttaagagcttcttcaaagtttcccgcatgaaaattacttaaacgttgcacacaacgtttcacaaaatcttttgtgaaagaagaaaaggaaattcagtgtgtgagtctcagcaggagttaagctaatgcagcttaaaataatgccgaaaaagaagcgcttatctgcgggcagagtgcccctgattctcttcctgtgccagatgattagtgcactggaagtacctcttgatccaaaacttcttgaagacttggtacagcctccaaccatcacccaacagtctccaaaagattacattattgaccctcgggagaatattgtaatccagtgtgaagccaaagggaaaccgcccccaagcttttcctggacccgtaatgggactcattttgacatcgataaagaccctctggtcaccatgaagcctggcacaggaacgctcataattaacatcatgagcgaagggaaagctgagacctatgaaggagtctatcagtgtacagcaaggaacgaacgcggagctgcagtttctaataacattgttgtccgcccatccagatcaccattgtggaccaaagaaaaacttgaaccaatcacacttcaaagtggtcagtctttagtacttccctgcagacccccaattggattaccaccacctataatattttggatggataattcctttcaaagacttccacaaagtgagagagtttctcaaggtttgaatggggacctttatttttccaatgtcctcccagaggacacccgcgaagactatatctgttatgctagatttaatcatactcaaaccatacagcagaagcaacctatttctgtgaaggtgatttcagtggatgaattgaatgacactatagctgctaatttgagtgacactgagttttatggtgctaaatcaagtagagagaggccaccaacatttttaactccagaaggcaatgcaagtaacaaagaggaattaagaggaaatgtgctttcactggagtgcattgcagaaggactgcctaccccaattatttactgggcaaaggaagatggaatgctacccaaaaacaggacagtttataagaactttgagaaaaccttgcagatcattcatgtttcagaagcagactctggaaattaccaatgtatagcaaaaaacgcattaggagccatccaccataccatttctgttagagttaaagcggctccatactggatcacagcccctcaaaatcttgtgctgtccccaggagaggatgggaccttgatctgcagagctaatggcaaccccaaacccagaattagctggttaacaaatggagtcccaatagaaattgcccctgatgaccccagcagaaaaatagatggcgataccattattttttcaaatgttcaagaaagatcaagtgcagtctatcagtgcaatgcctctaatgaatatggatatttactggcaaacgcatttgtaaatgtgctggctgagccaccacgaatcctcacacctgcaaacacactctaccaggtcattgcaaacaggcctgctttactagactgtgccttctttgggtctcctctcccaaccatcgagtggtttaaaggagctaaaggaagtgctcttcatgaagatatttatgttttacatgaaaatggaactttggaaattcctgtggcccaaaaggacagtacaggaacttatacgtgtgttgcaaggaataaattagggatggcgaagaatgaagttcacttagaaatcaaagatcctacatggatcgttaaacagcccgaatatgcagttgtgcaaagagggagcatggtgtcctttgaatgcaaagtgaaacatgatcacaccttatccctcactgtcctgtggctgaaggacaacagggaactgcccagtgatgaaaggttcactgttgacaaggatcatctagtggtagctgatgtcagtgacgatgacagcgggacctacacgtgtgtggccaacaccactctggacagcgtctccgccagcgctgtgcttagcgttgttgctcctactccaactccagctcccgtttacgatgtcccaaatcctccctttgacttagaactgacagatcaacttgacaaaagtgttcagctgtcatggaccccaggcgatgacaacaatagccccattacaaaattcatcatcgaatatgaagatgcaatgcacaagccagggctgtggcaccaccaaactgaagtttctggaacacagaccacagcccagctgaagctgtctccttacgtgaactactccttccgcgtgatggcagtgaacagcattgggaagagcttgcccagcgaggcgtctgagcagtatttgacgaaagcctcagaaccagataaaaaccccacagctgtggaaggactgggatcagagcctgataatttggtgattacgtggaagcccttgaatggtttcgaatctaatgggccaggccttcagtacaaagttagctggcgccagaaagatggtgatgatgaatggacatctgtggttgtggcaaatgtatccaaatatattgtctcaggcacgccaacctttgttccatacctgatcaaagttcaggccctgaatgacatggggtttgcccccgagccagctgtagtcatgggacattctggagaagacctcccaatggtggctcctgggaacgtgcgtgtgaatgtggtgaacagtaccttagccgaggtgcactgggacccagtacctctgaaaagcatccgaggacacctacaaggctatcgggcaataatttactattggaagacccagagttcatctaaaagaaacagacgtcacattgagaaaaagatcctcaccttccaaggcagcaagactcatggcatgttgccggggctagagccctttagccactacacactgaatgtccgagtggtcaatgggaaaggggagggcccagccagccctgacagagtctttaatactccagaaggagacaagtactgcctctttttaaaatattaggtttgagtccatctaaaggcaaagtcattatgtgttttgagaggatggttttattaaatataaatgtaaatgacaagagagaaaaaggaagagaataactaaatgggtgcctgtcacaggtttgtactaatgtattttcagctgaatcaggaatgagttactgaaactcaaaaccttgaatcgtgcgagcacggtgaaatgtcaatttaatacatgttgaaacattcagaaatccccagtgctccctcgtctttgaagattgtgaatccaacactggactctctcactttggaatgggatccaccgagccacccgaatggcattttgacagagtacaccttaaagtatcagccaattaacagcacacatgaattaggccctctggtagatttgaaaattcctgccaacaagacacggtggactttaaaaaatttaaatttcagcactcgatataagttttatttctatgcacaaacatcagcaggatcaggaagtcaaattacagaggaagcagtaacaactgtggatgaagctggtattcttccacctgatgtaggtgcaggcaaagttcaagcagtaaatcccaggatcagcaatcttactgctgcagctgctgagacctatgccaatatcagttgggaatatgagggaccagagcatgtgaacttttatgttgaatatggtgtagcaggcagcaaagaagaatggagaaaagaaattgtaaatggttctcggagcttctttgggttaaagggtctaatgccaggaacagcatacaaagttcgagttggtgctgtgggggactctggttttgtgagttcagaggatgtgtttgagacaggcccagcgatggcaagccggcaggtggatattgcaactcagggctggttcattggtctgatgtgtgctgttgctctccttatcttaattttgctgattgtttgcttcatcagaagaaacaagggtggtaaatatccagttaaagaaaaggaagatgcccatgctgaccctgaaatccagcctatgaaggaagatgatgggacatttggagaatacaggaaaccgtttctacatggctggctctaagccagatgatatttcatagtgcaaagagggatagaacctcactggtggccaaatgtgattatatgctataaccctgtgcccctactctgacacccacccccaagcagttaccctctgttggaagcctgcagctttctttgtttgtttctttaattatacagacagtaggatctgcatccttactagcatatagaaaaatcagagaaacaatgcaaccaagagtgctgttttcatttgtttcttctgcatccttttaatggaattttgtaggtctcttgaaagtgatgcagaagaccacaagcctttgaaaaaaggaagtcgaactccttcagacaggactgtgaaaaaagaagatagtgacgacagcctagttgactatggagaaggggttaatggccagttcaatgaggatggctcctttattggacaatacagtggtaagaaagagaaagagccggctgaaggaaacgaaagctcagaggcaccttctcctgtcaacgccatgaattcctttgtttaatttttaagctctttgccaatattccatttctctagaatgtttatcctaagcacttgtttgtcagccctctcatactatgaacatatgggtagagagtatattttctgctgtatgttagtattatgagaatagttacagcaaaaacataactcagtcaaatgatatgttaatatgaactggaatgcaaagtgcatactttttcattcaaaatgggtattcttgatttcctcagaactgataaaaaataatgcaacatcaccaacagatcctgttatttcctctgcaggatacagttcaatatgatgcatgaaaaatgctccacatttaaaggacatacccgtgtatgttatgaaaacatggtttgatactttgtttatactaccctcagctgaacccctatatatgaattccgttttcattgtcaagaatgttactgtagtattctctagaacttcaatgtctttgtggacattgttgtgaaattggtgactatgtatagctgtcgttagtctttttgggagactgttaggaacagtttgtacagtatatacttgctaaatgagttcattatgacagtcacattgctgatgcttactgagaactattacctactcttggctcctgttactccgtaggcttcttaatcttccaggcattacagcagcacagtgttctactttttacatcatttctatgttcggttgtttttaggcataaacaatgtgtattgcagtgcatttcggcatttgtgccatactgaaagaatcaaaaacaaatcatccaaattaaatttcaaacattatttcagagaacacagggcaagacacatacagtgccttcagatattaagcattccacaacatcgtgcattctgtatcagctggtccagtccattctgggtcctagattactgtcattgtctaaaagtaacttttaaaaagcagagttcatgaaaactgcaatgctgggaaaagaaggaaacatgaaaataaaaataagacagtttattagaaatagcatttcctcataagcataaaaagaaaatctttgttgccaactgaagcacatgatgattttgtggtcctttatggtttctattacattcagtaagaaagatgtcaacatgctagaaaattaattttaaaactaagttattccaacactaaaagcatacaacagcatgccaacagtaatatattattctccaagactttacctatgtaagtgttcaaaactctgcagcattaaacaacgtgtatgcaaattgttatggatacatttcagaatctaagaaatcaggcaagtgcttaaaaggccaacggtccaagggattacatctgcagtttaaaaagtaaatatatattctatcgtattcataaacaatatctatcaaatgggttacctccaaatatgaaaatctataacaacctatggttgaaggaatgctcagtttcatttgccaataaattggtttctcataacttgcatcaagtttaattttaagtaaagctttttatatgtagatattttgttgaatttgtaaatacacttaaaatgtagatgctatatgcttataggtgttacatacaaataaacatgcaatgtttatgttgtactgtataagaggtaagctaattaatgcagtgaatgggattggaaagcatctacttaaatatctattgggttcccccctccccccaccttttttgctgtgaaactgaaatagtgaacttttctacgtattgacagcagatttttcgatgaaatcttcagagctttgcctatggggcacagtaggcctagtaacctggcatgtttgatatatgtaggtaaagcataatttaaagtaatcccaggtaaagatggccctaaatactttcatgtctctatattcatttttcacagatccacctgtctcttgaaaatataaaaagacaaaacaggtttgccttggcatcagagagcacaaagattaaaagttactttaaatttgccaatattttgggagaacaataaaactacattttttcctcttccatactggtagatgcgaaatttatctgtgcatgaaagggtcacttctgtaatagtgcaacagatttggtattaaaaattaaatgtggttttaaaagttcctctctcttttgtaatttatgttcccaattgagtgtgaatgtccaagtaatggtgtatgtaatggtacaggcaaatgtgactggatttccctcaaaaaagtaactattaaacagtcttgatctctttgtgacttttaa

SEQ ID NO: 101 - DNA, 2499 bp, Homo sapiens
gtttgaatccaaagtccacggcactcctaaccgctgctcaacgctgccccacaagaacgtccagctggcaagacccgggtggggctcgttgctctccccgcttcacctccctgcttcacggccgggggtgtgctggctaagttcgctcatctgccaagcttcaggacacagacctatgtgagcaagcgataaacaaatgcaaataaatgtaactttccacattagctaaaaattcagagaacgtcaagcccagggaaatgggacggatcccagttagcccgcggctccaatctggtccccccccaaccccgagcctcgcggcgagaaaggaagcggctccggatggagagtaaagtgacaatcggagaagggcaggctgcctttcctcccgggggagccaaggggacctgcagagggcggtttctctccgcttttcctgtcccaccccgtcggcctgccccccaccccctccggcctctgcgccaaccccgcgcgccacccgcggcttcctccgctcggggtcctcgttcggcctctgctggcctccgcgactccgcggtgcccgcccccgttgagttcaaaaggacgcgcggagcggcgccggcccttcaccagcagcccgtccgactggaaagacattcgccgcagccacctcggccgtggcaggaaccgaaacccggagcggccgaagctcagcgctccgctggggcagagggtcgcggcggctgggaacgccgctccccgacgcaccggccgcccccagcgcagcgcgctccgcggggtgctgatctgcctcttctccaagaaactcaaccactagtgacaatgaccagcctcctgactactccttctccaagagaagaactgatgaccaccccaattttacagcccactgaggccctgtccccagaagatggagccagcacagcactcattgcagttgttatcaccgttgtcttcctcaccctgctctcggtcgtgatcttgatcttcttttacctgtacaagaacaaaggcagctacgtcacctatgaacctacagaaggtgagcccagtgccatcgtccagatggagagtgacttggccaagggcagcgagaaagaggaatatttcatctaatgactcccaggccccaaggagcttattcctggctccatcgctaacacgttgactgcttattatgggaaagttttctctgaagccagggagaagcattgattgatgtgggcaaatccaagctccagccaggtcgcagtcccaaatgccgacatcactgactccagggaccagggacatggagaaagctgtttatgatatctttaaccaggccctcttactagagctggtgtttgtgactggccaacaagatgtggctatgccaggggacatctgagtatgtgcccagtcatcttttttcacaggttgaagggagagaaaagattttgagttaaggtcattggctgctctactctgtcccctacctggtcacctagtgatagccccagtggagatactgtccatacaaggtcttcccagaggctggataccacagtaaaaggccaggccaggaggggtaggagactatggagatcttacctcctgataaatgtgctacaccccctaatctgagcccttcctttccgtgttccccaacaacctcatgcttacgtgatttttattcaaattaaaaattttcattgctacagaaatcagattctcatgtgcaagaagtaactacattttgacttatttttgcttaaacatttttgacattttcttttccctatttaacgcctttacatatgttctcttccaagcaataagaaccctaggaaagttctagaagtttgcagaactatctcagggatttgagacaaagatggtgcaggaaagcttgttccaggggaacatcattagaaacataccctgggagggccgggttcggtggctcacgcctgtgatcccagcactttgggaggccgaggcaggcggatcacaaggttaggagatcgagaccatcctggctaacacggtgaaaccccgtctctactaaaaatatataaaaaaaatagctgggcgtggtggcgggcgcccatagtcccagctgcttgggaggctgaggcaggagaatggcttgaacccaggaggcggagcttgcagtgagctgagattgcaccactatactccagcctgggcaacagagtgagactccgtctcaaaaaaaaaaaaaaaaaaaaaagtaccctgggagatgagttggttcaagcctccatcctggcaagggccagaatttcccagaatcccttctacatatatacagaaggaaccagaaaaaatcaacctaccacctttcccagtgtatcctcagaatcaagccaagaagcttcttggattttagtctcaagataagttgtgtttaaaaggcacattttggtataaattattagctcatcagatattgttcactttggaattaaagctagatctcctttgaagtct

SEQ ID NO: 102 - DNA, 1863 bp, Homo sapiens
atctgaagaaagatttggccaggggcagctgtgctggcttatgctcttctccttctgctgctgccatcctccagcaagatgctagggtctttggggctttgggcattacttcccacagctgtggaagcacccccaaacaggcgaacctgtgtgttctttgaggcccctggagtgcggggaagcacaaagacactgggagagctgctagatacaggcacagagctccccagagctatccgctgcctctacagccgctgctgctttgggatctggaacctgacccaagaccgggcacaggtggaaatgcaaggatgccgagacagtgatgagccaggctgtgagtccctccactgtgacccaagtccccgagcccaccccagccctggctccactctcttcacctgctcctgtggcactgacttctgcaatgccaattacagccatctgcctcctccagggagccctgggactcctggctcccagggtccccaggctgccccaggtgagtccatctggatggcactggtgctgctggggctgttcctcctcctcctgctgctgctgggcagcatcatcttggccctgctacagcgaaagaactacagagtgcgaggtgagccagtgccagagccaaggccagactcaggcagggactggagtgtggagctgcaggagctgcctgagctgtgtttctcccaggtaatccgggaaggaggtcatgcagtggtttgggccgggcagctgcaaggaaaactggttgccatcaaggccttcccaccgaggtctgtggctcagttccaagctgagagagcattgtacgaacttccaggcctacagcacgaccacattgtccgatttatcactgccagccgggggggtcctggccgcctgctctctgggcccctgctggtactggaactgcatcccaagggctccctgtgccactacttgacccagtacaccagtgactggggaagttccctgcggatggcactgtccctggcccagggcctggcatttctccatgaggagcgctggcagaatggccaatataaaccaggtattgcccaccgagatctgagcagccagaatgtgctcattcgggaagatggatcgtgtgccattggagacctgggccttgccttggtgctccctggcctcactcagccccctgcctggacccctactcaaccacaaggcccagctgccatcatggaagctggcacccagaggtacatggcaccagagctcttggacaagactctggacctacaggattggggcatggccctccgacgagctgatatttactctttggctctgctcctgtgggagatactgagccgctgcccagatttgaggcctgacagcagtccaccacccttccaactggcctatgaggcagaactgggcaatacccctacctctgatgagctatgggccttggcagtgcaggagaggaggcgtccctacatcccatccacctggcgctgctttgccacaaggaccctgatgggctgagggagctcctagaagactgttgggatgcagacccagaagcacggctgacagctgagtgtgtacagcagcgcctggctgccttggcccatcctcaagagagccacccctttccagagagctgtccacgtggctgcccacctctctgcccagaagactgtacttcaattcctgcccctaccatcctcccctgtaggcctcagcggagtgcctgccacttcagcgttcagcaaggcccttgttccaggaatcctcagcctgcctgtaccctttctcctgtgtaaatatgcagtttatgtgtcatcaatgtacatgccaacataaatatggcgattgtatagctgt

SEQ ID NO: 103 - DNA, 3542 bp, Homo sapiens
agcggcgcccggtcccgggtccacagccgcactcactccgccgcgctctccgccaccgccaccactgcggccaccgccaatgaaacgcctcccgctcctagtggttttttccactttgttgaattgttcctatactcaaaattgcaccaagacaccttgtctcccaaatgcaaaatgtgaaatacgcaatggaattgaagcctgctattgcaacatgggattttcaggaaatggtgtcacaatttgtgaagatgataatgaatgtggaaatttaactcagtcctgtggcgaaaatgctaattgcactaacacagaaggaagttattattgtatgtgtgtacctggcttcagatccagcagtaaccaagacaggtttatcactaatgatggaaccgtctgtatagaaaatgtgaatgcaaactgccatttagataatgtctgtatagctgcaaatattaataaaactttaacaaaaatcagatccataaaagaacctgtggctttgctacaagaagtctatagaaattctgtgacagatctttcaccaacagatataattacatatatagaaatattagctgaatcatcttcattactaggttacaagaacaacactatctcagccaaggacaccctttctaactcaactcttactgaatttgtaaaaaccgtgaataattttgttcaaagggatacatttgtagtttgggacaagttatctgtgaatcataggagaacacatcttacaaaactcatgcacactgttgaacaagctactttaaggatatcccagagcttccaaaagaccacagagtttgatacaaattcaacggatatagctctcaaagttttcttttttgattcatataacatgaaacatattcatcctcatatgaatatggatggagactacataaatatatttccaaagagaaaagctgcatatgattcaaatggcaatgttgcagttgcatttgtatattataagagtattggtcctttgctttcatcatctgacaacttcttattgaaacctcaaaattatgataattctgaagaggaggaaagagtcatatcttcagtaatttcagtctcaatgagctcaaacccacccacattatatgaacttgaaaaaataacatttacattaagtcatcgaaaggtcacagataggtataggagtctatgtgcattttggaattactcacctgataccatgaatggcagctggtcttcagagggctgtgagctgacatactcaaatgagacccacacctcatgccgctgtaatcacctgacacattttgcaattttgatgtcctctggtccttccattggtattaaagattataatattcttacaaggatcactcaactaggaataattatttcactgatttgtcttgccatatgcatttttaccttctggttcttcagtgaaattcaaagcaccaggacaacaattcacaaaaatctttgctgtagcctatttcttgctgaacttgtttttcttgttgggatcaatacaaatactaataagctcttctgttcaatcattgccggactgctacactacttctttttagctgcttttgcatggatgtgcattgaaggcatacatctctatctcattgttgtgggtgtcatctacaacaagggatttttgcacaagaatttttatatctttggctatctaagcccagccgtggtagttggattttcggcagcactaggatacagatattatggcacaaccaaagtatgttggcttagcaccgaaaacaactttatttggagttttataggaccagcatgcctaatcattcttgttaatctcttggcttttggagtcatcatatacaaagtttttcgtcacactgcagggttgaaaccagaagttagttgctttgagaacataaggtcttgtgcaagaggagccctcgctcttctgttccttctcggcaccacctggatctttggggttctccatgttgtgcacgcatcagtggttacagcttacctcttcacagtcagcaatgctttccaggggatgttcatttttttattcctgtgtgttttatctagaaagattcaagaagaatattacagattgttcaaaaatgtcccctgttgttttggatgtttaaggtaaacatagagaatggtggataattacaactgcacaaaaataaaaattccaagctgtggatgaccaatgtataaaaatgactcatcaaattatccaattattaactactagacaaaaagtattttaaatcagtttttctgtttatgctataggaactgtagataataaggtaaaattatgtatcatatagatatactatgtttttctatgtgaaatagttctgtcaaaaatagtattgcagatatttggaaagtaattggtttctcaggagtgatatcactgcacccaaggaaagattttctttctaacacgagaagtatatgaatgtcctgaaggaaaccactggcttgatatttctgtgactcgtgttgcctttgaaactagtcccctaccacctcggtaatgagctccattacagaaagtggaacataagagaatgaaggggcagaatatcaaacagtgaaaagggaatgataagatgtattttgaatgaactgttttttctgtagactagctgagaaattgttgacataaaataaagaattgaagaaacacattttaccattttgtgaattgttctgaacttaaatgtccactaaaacaacttagacttctgtttgctaaatctgtttctttttctaatattctaaaaaaaaaaaaaaggtttacctccacaaattgaaaaaaaaaaagtgaaaaaaatctgtttctaaggttagactgagatatatactatttccttacttatttcacagattgtgactttggatagttaatcagtaaaatataaatgtgtcaagatataatattgtttatacctatcaatgtaaaaacagtgtaataaagctgaagtattctattacctttcagtgaagtgaaagttatactatctcattagtatatttgaatcctttattatttttaattttataaatatcacagttcacattgcaatattccctttaatttactatttttaaaggggtattgtaaatatgaaagtatttataaagtgaattgctattttttctgttcagaaaagtacacacttaaaattgttattgttaacaatgtgtaaacacatttaaaattgttattgttaacaaagaaatcatggagaactgtagaggttttcacagtggatccattttctgacagttttctactatctattaaatcatatctgcttaaatatatagcttctatctgtctttaaatcttctcattaaaatgtataagcagtgattttgatctcaaaaataggtaatttttctttgccgacctgtaaaagtgtgccaatacactaaatttgtgattttaaattaattcctccagctgttgaaatgaagtctgccaaatcttgctctaacaaataaaatgttatctaaatgaa

SEQ ID NO: 104 - DNA, 2681 bp, Homo sapiens
aaaggtatctgttaagctaggtaggaactgcagtcggctggttgcttctcatctggagaaagcaggcaactgggcagtgattgaagtgtccagcagggggctggcattctctgtctataagtaacactggttcctcttcagagcctcagctcagcggagctgccgtttgctggtgaagcccgtgacgtgcaaagcatcctgcctataggatttgaggatttctcagtgcagtttttttctacccactttaaacctccagattctaaatatcaggaaagacgctgtgggaaaatagcaggccaaaagttcttagtaaactgcagccagggagactcagactagaatggaggtagaaagaactgatgcagagtgggtttaattctaagcctttttgtggctaagttttgttgttgttaacttattgaatttagagttgtattgcactggtcatgtgaaagccagagcagcaccagtgtcaaaatagtgacagagagttttgaataccatagttagtatatatgtactcagagtatttttattaaagaaggcaaagagcccggcatagatcttatcttcatcttcactcggttgcaaaatcaatagttaagaaatagcatctaagggaacttttaggtgggaaaaaaaatctagagatggctctaaatgactgtttccttctgaacttggaggtggaccatttcatgcactgcaacatctccagtcacagtgcggatctccccgtgaacgatgactggtcccacccggggatcctctatgtcatccctgcagtttatggggttatcattctgataggcctcattggcaacatcactttgatcaagatcttctgtacagtcaagtccatgcgaaacgttccaaacctgttcatttccagtctggctttgggagacctgctcctcctaataacgtgtgctccagtggatgccagcaggtacctggctgacagatggctatttggcaggattggctgcaaactgatcccctttatacagcttacctctgttggggtgtctgtcttcacactcacggcgctctcggcagacagatacaaagccattgtccggccaatggatatccaggcctctcatgccctgatgaagatctgcctcaaagccgcctttatctggatcatctccatgctgctggccattccagaggccgtgttttctgacctccatcccttccatgaggaaagcaccaaccagaccttcattagctgtgccccatacccacactctaatgagcttcaccccaaaatccattctatggcttcctttctggtcttctacgtcattccactgtcgatcatctctgtttactactacttcattgctaaaaatctgatccagagtgcttacaatcttcccgtggaagggaatatacatgtcaagaagcagattgaatcccggaagcgacttgccaagacagtgctggtgtttgtgggcctgttcgccttctgctggctccccaatcatgtcatctacctgtaccgctcctaccactactctgaggtggacacctccatgctccactttgtcaccagcatctgtgcccgcctcctggccttcaccaactcctgcgtgaacccctttgccctctacctgctgagcaagagtttcaggaaacagttcaacactcagctgctctgttgccagcctggcctgatcatccggtctcacagcactggaaggagtacaacctgcatgacctccctcaagagtaccaacccctccgtggccacctttagcctcatcaatggaaacatctgtcacgagcggtatgtctagattgacccttgattttgccccctgagggacggttttgctttatggctagacaggaacccttgcatccattgttgtgtctgtgccctccaaagagccttcagaatgctcctgagtggtgtaggtgggggtggggaggcccaaatgatggatcaccattatattttgaaagaagccatcaagtcttaagtttttcatttcaacttgtgaacgtttcttctgatgtgaagcaaaccttcccttttcagaaaagggaacaagtagaaaattattttttaagcctcaagccctgttaaatggtcgtggccaattatgtcatagaaactgtatgaacaaccagatttacatagcagagaaatcatacattgaatgcttactttgtgaaagacttcaccttgtcatttctttaagcagacgctagtactttagaaatataacttgactctgttttcaggaatatctgtaatacacaaaccaaggaacaacttttatttacactcctaatatgaaaagtcaatcctgtgagagagctccatgtatgagggacactctccaagttgataacaatggaagcgagtttaatataaaacaattccctaagcatttattttttttttaaaaagatgttactgaggacctagaagaaatgctcaatacatactttgaaagcaaaaatacaatcaaacacattgacacgtatataaagatccacgcgtggctgtgcgtgatatctcacactctgaattcttacttgatggaggttttgtttgctgctacggttttaatcatccagggtgccattccaccatagaagagcaatccttttaggaaaaaaaaaatcatgctattaattaatcaaatatctataaatgcata

SEQ ID NO: 105 - DNA, 6377 bp, Homo sapiens
ctgggatagaagcggcaggagcagcgttggcaccggcgaaccatggctgggattttctatttcgccctattttcgtgtctcttcgggatttgcgacgctgtcacaggttccagggtataccccgcgaatgaagttaccttattggattccagatctgttcagggagaacttgggtggatagcaagccctctggaaggagggtgggaggaagtgagtatcatggatgaaaaaaatacaccaatccgaacctaccaagtgtgcaatgtgatggaacccagccagaataactggctacgaactgattggatcacccgagaaggggctcagagggtgtatattgagattaaattcaccttgagggactgcaatagtcttccgggcgtcatggggacttgcaaggagacgtttaacctgtactactatgaatcagacaacgacaaagagcgtttcatcagagagaaccagtttgtcaaaattgacaccattgctgctgatgagagcttcacccaagtggacattggtgacagaatcatgaagctgaacaccgagatccgggatgtagggccattaagcaaaaaggggttttacctggcttttcaggatgtgggggcctgcatcgccctggtatcagtccgtgtgttctataaaaagtgtccactcacagtccgcaatctggcccagtttcctgacaccatcacaggggctgatacgtcttccctggtggaagttcgaggctcctgtgtcaacaactcagaagagaaagatgtgccaaaaatgtactgtggggcagatggtgaatggctggtacccattggcaactgcctatgcaacgctgggcatgaggagcggagcggagaatgccaagcttgcaaaattggatattacaaggctctctccacggatgccacctgtgccaagtgcccaccccacagctactctgtctgggaaggagccacctcgtgcacctgtgaccgaggctttttcagagctgacaacgatgctgcctctatgccctgcacccgtccaccatctgctcccctgaacttgatttcaaatgtcaacgagacatctgtgaacttggaatggagtagccctcagaatacaggtggccgccaggacatttcctataatgtggtatgcaagaaatgtggagctggtgaccccagcaagtgccgaccctgtggaagtggggtccactacaccccacagcagaatggcttgaagaccaccaaagtctccatcactgacctcctagctcataccaattacacctttgaaatctgggctgtgaatggagtgtccaaatataaccctaacccagaccaatcagtttctgtcactgtgaccaccaaccaagcagcaccatcatccattgctttggtccaggctaaagaagtcacaagatacagtgtggcactggcttggctggaaccagatcggcccaatggggtaatcctggaatatgaagtcaagtattatgagaaggatcagaatgagcgaagctatcgtatagttcggacagctgccaggaacacagatatcaaaggcctgaaccctctcacttcctatgttttccacgtgcgagccaggacagcagctggctatggagacttcagtgagcccttggaggttacaaccaacacagtgccttcccggatcattggagatggggctaactccacagtccttctggtctctgtctcgggcagtgtggtgctggtggtaattctcattgcagcttttgtcatcagccggagacggagtaaatacagtaaagccaaacaagaagcggatgaagagaaacatttgaatcaaggtgtaagaacatatgtggacccctttacgtacgaagatcccaaccaagcagtgcgagagtttgccaaagaaattgacgcatcctgcattaagattgaaaaagttataggagttggtgaatttggtgaggtatgcagtgggcgtctcaaagtgcctggcaagagagagatctgtgtggctatcaagactctgaaagctggttatacagacaaacagaggagagacttcctgagtgaggccagcatcatgggacagtttgaccatccgaacatcattcacttggaaggcgtggtcactaaatgtaaaccagtaatgatcataacagagtacatggagaatggctccttggatgcattcctcaggaaaaatgatggcagatttacagtcattcagctggtgggcatgcttcgtggcattgggtctgggatgaagtatttatctgatatgagctatgtgcatcgtgatctggccgcacggaacatcctggtgaacagcaacttggtctgcaaagtgtctgattttggcatgtcccgagtgcttgaggatgatccggaagcagcttacaccaccaggggtggcaagattcctatccggtggactgcgccagaagcaattgcctatcgtaaattcacatcagcaagtgatgtatggagctatggaatcgttatgtgggaagtgatgtcgtacggggagaggccctattgggatatgtccaatcaagatgtgattaaagccattgaggaaggctatcggttaccccctccaatggactgccccattgcgctccaccagctgatgctagactgctggcagaaggagaggagcgacaggcctaaatttgggcagattgtcaacatgttggacaaactcatccgcaaccccaacagcttgaagaggacagggacggagagctccagacctaacactgccttgttggatccaagctcccctgaattctctgctgtggtatcagtgggcgattggctccaggccattaaaatggaccggtataaggataacttcacagctgctggttataccacactagaggctgtggtgcacgtgaaccaggagtaagtactcaacgatgtaacacgaaaggggacctggcaagaattggtatcacagccatcacgcaccagaataagattttgagcagtgtccaggcaatgcgaacccaaatgcagcagatgcacggcagaatggttcccgtctgagccagtactgaataaactcaaaactcttgaaattagtttacctcatccatgcactttaattgaagaactgcactttttttacttcgtcttcgccctctgaaattaaagaaatgaaaaaaaaaaacaatatctgcagcgttgcttggtgcacagattgctgaaactgtggggcttacagaaatgactgccggtcatttgaatgagacctggaacaaatcgtttctcagaagtacttttctgttcatcaccagtctgtaaaatacatgtacctatagaaatagaacactgcctctgagttttgatgctgtatttgctgccagacactgagcttctgagacatccctgattctctctccatttggaattacaaccattgtattttgtttgtggcataaattacagtcatctgtctttcactggaatgaagaccatgcctaggaacattttttaaggactcagctgtggcttttagggcttggttcataccatgggggaaaaaaaagtcctaggagaaagcgacgtggctcattagtgttgcctcttcagtgctcaagccgcctggtggattcctatgacacagggggcctggaaagaaagggaaagtggatttaaaatatatatatacgtaacccaagccccataacccctaactggacaaatgaggtctgtttctttgggcctgaggctgtgccatataaagtcttattttgggactttacaaacttgtcctaactatcttgtggatagtgggctgtgacaatctggaatagagaacgttcacacttcgctcctttaaagaagcgaccccagatctgcaagggagtagattctgctatcttggcctcacagcccttcctgttgattacaaagcccgtggaagaaaacagaacacaccctcctcagttccgtctaaatgtgtttcttctgcttcaattacaccagttctggggcaaagacactgatgaaacaacacccatacctgaaaagaataaatgtgtgactttcaaatcccctttcgcagtgaaagaaacagcaaacacttaagattcagcatctgttctccagttgcactgaggaatgcactgtctcgcagcaccagctctgcagagcccttgccccagactctttgcggttttatttatatgtatttccatatttcattcctgtgtgtcactgctgcattggtgtggcagcaagtgaccaaatgctacaggtcttactatggacaccaggtcaggtgcaaccacacaaaacaaagccagttccatgagctgcctatgatatgcattgcggaagtaacattttacccagggtgtgccattgcagtgatataaatatatttttttcttagactaaatatgagctgactatctcttttgatgtgtgtacataggtgtgagtgtgtctgtatgcgtgcctgtctgtgtgcgggtgtgtgtatgtgcgtagcctcatgcttaggactacccatgaatgttgtggaatgctacacctggagagttctggttttccaccagtttcaagatgaagaactacatgatacagtggacctggagaccatccccttggaaagacaacccagagatgttcagcatcctgtatctacacgcatcctgtatctacacgtgtattttgtagctgtcacactaaccttaataagaattctacagctttggacagaggcattttcaccttaatggtgaagtaatttaaaatataaatccattcaggtgacaacccatcatcaaaattacaaattttctgattgaactcatctgaatcatcagttccttgatggagagagagaaggagatggaatgtgtctggtaaccccaaatggagtacaagtagcctttgttttcctgcataaatggacttgttgaatgcgaacgaatatatgcaattcatatacttttggagatgaacgtagatatgtgtgtcagctttgagatggtgtgtcctggattaatactttgtctcccaatatcacagaaaaatacatgccagtgactcttgaggttaaggtagttgggatgaaatggcctcaggcaatttcacattccctaattacctggaaagttctacagtaattaatatgcagctaactcctgttgccctcacaagagcatcagccttctagaatcggagctccggagtgtgaagattcagtattgatatgatatgtataccaaactccagccaacttactgccatttttcataatctgagtggctgccttgcttatcctaagctgtggttgcagaaaccgtggccatttatataagctataacatcaaatcagggaaaaatgaggaaaaaaaatagattctgaaccatttattgttgaataagtagagaaaatcatcaataaatatttattacattctgacagggtgtgtggcattgtgttctatgccagagtgacaaagttgattcacccctttttggggaccttaatatattttttaagggatgtgcctatgcattgatgcctgaaaaatatgtataaagaaatgaggttgactcttctgagcagttcatcttttccagaggtaagggtaggaggccaacttcagggtctgggtctgagcccgtgggcaagccctggccgagtgagctccaatgctaactcatgtgccgatctctagagcagtgggaaactaccccgctgcaccaaatcaagtagcttcaccttgtgtatgcaggccccaagttattttttagcaatcttacgagtgaaatgttctggtgggttgaaaaacgttcttattttaaagaaaggttgtgctcgctacactgctggtgtgtgcattctgagacctcttgtattcaatctgtgaaggatatgtgtattaatccgtacacccgtatagcctcaatatttgtctgaagacacttaaattctgacccataaaggaaagttctagaagcaatattttcacttatttaacattctccaaacaacatcaagcattgatacacactgaagagtgcgtttattttttgtatcactctaagtatgttggaatatgcaaggactgtggttcaaattagaatgtataaggcatattataatttagttcatactgaataagaaattaacagaacattgttcggttcacacgttccaaactttgagtgatttctggagttagacatagattttctattttgttttaatttgtcaaggtatttttcttcccttcatgaactttaggtacacataacttatgtcatttatttatggtcttttatacctagtttgtaaaattgtaaaatagcaaactaaatgcaaagagtttgcatttgaaaataataaagtagttgccgtatacaaccctgcaa

SEQ ID NO: 106 - DNA, 2389 bp, Homo sapiens
gcgcgcgtggaggccggggcggggcgggcgcagccggcgctgagcttgcagggccgctcccctcacccgcccccttcgagtccccgggcttcgccccacccggcccgtgggggagtatctgtcctgccgccttcgcccacgccctgcactccgggaccgtccctgcgcgctctgggcgcaccatggcccgcggggctgcgctggcgctgctgctcttcggcctgctgggtgttctggtcgccgccccggggtttggggacctgcgtcttcaggccgcgcgcggaggccgccctggagttgcctgtcacagccacgccctgcgtcccgggcctaaatttggaatcgctaggagcctgagacccgggtggtggggggaagggaaggaaaagttagaaaaaaactttgagccctgaaaatgttcaaaaatactctgtggatgcgggctccgggaatttcagcgcgtgctgtgcgccaagcaacacggggcgcagaaagaaacgtgtgcttaccaaattgtccatctgcggcggtggagaattcggaaaacagaaaaagtgggcagggaagaaagagccacggtcaccctcccacgccctaaaccgggcctatttctaattattactttaatcatgtttttctgtttccctccctttgaaacggaaacggagaccctgccggatgtggtatgttataaattcttttttcatgttatatggtggtttcgatttatccgatgcccttcctgacaatgaaaacaagaaacccactgcaatccccaagaaacccagtgctggggatgactttgacttaggagatgctgttgttgatggagaaaatgacgacccacgaccaccgaacccacccaaaccgatgccaaatccaaaccccaaccaccctagttcctccggtagcttttcagatgctgaccttgcggatggcgtttcaggtggagaaggaaaaggaggcagtgatggtggaggcagccacaggaaagaaggggaagaggccgacgccccaggcgtgatccccgggattgtgggggctgtcgtggtcgccgtggctggagccatctctagcttcattgcttaccagaaaaagaagctatgcttcaaagaaaatggtcagctggcaggctctttgggaccttgtattgggatccgccgtgaagctgatggctgaagacctaggggtgagcagagaacccagcccaggcctgcggagcgtcctgaccgtaatcgttttatctgctaagacatagccttaaagcaaacccttccatctgccgctcccctcgccctgctggcaaattcccaccacgatgggattctcaatcacatggcggattctctgccttcagttccatatgcttttgcctttctggatgcacagaagctcattatagcaaatcatatttctgcataagagcttcagaaaatgaagagaaatgcagatattttcttttaaacatgaatctaacagaaaaaagagcttccatgtgcgtgttcctcagtgtttagggagaagaaagcaacccttaaaatagaggaaaatgaagctgcttggattaccctgttgaagttcatctctgcctgtgccatgcatgaaaaaatactggcaaagtcttcacttacatgagtgttagactccatgttcccagtgggtctcggggttcagaactgagtgctctcatccaagcaataggagcgtcgacctcaggaaagcccaagtgttttgtgtgtattttgaggagtgggttatctgttgcactgagcctctctgtgtattttcttcttcttttcagcagaacaaggggaggtggacatggagagccaccggaatgccaacgcagagccagctgttcagcgtactcttttagagaaatagaagattgtcggcagaaacagcccaggcgttggcagcagggttagaacagctgcctgaggctcctccctgaaggacacctgcctgagagcagagatggaggccttctgttcacggcggattctttgttttaatcttgcgatgtgctttgcttgttgctgggcggatgatgtttactaacgatgaattttacatccaaagggggataggcacttggacccccattctccaaggcccgggggggcggtttcccatgggatgtgaaaggctggccattattaagtccctgtaactcaaatgtcaaccccaccgaggcacccccccgtcccccagaatcttggctgtttacaaatcacgtgtccatcgagcacgtctgaaacccctggtagccccgacttctttttaattaaaataaggtaagcccttcaatttgtttcttcaatatttctttcatttgtagggatatttgtttttcatatcagactaataaaaagaaattagaaaccaa

SEQ ID NO: 107 - DNA, 5190 bp, Homo sapiens; identical to SEQ ID NO: 44

SEQ ID NO: 108 - DNA, 3381 bp, Homo sapiens
ataagagctgggcccggcccacggcggcggcggcggcggcggagagagctggctcagggcgtccgctaggctcggacgacctgctgagcctcccaaaccgcttccataaggctttgcctttccaacttcagctacagtgttagctaagtttggaaagaaggaaaaaagaaaatccctgggccccttttcttttgttctttgccaaagtcgtcgttgtagtctttttgcccaaggctgttgtgtttttagaggtgctatctccagttccttgcactcctgttaacaagcacctcagcgagagcagcagcagcgatagcagccgcagaagagccagcggggtcgcctagtgtcatgaccagggcgggagatcacaaccgccagagaggatgctgtggatccttggccgactacctgacctctgcaaaattccttctctaccttggtcattctctctctacttggggagatcggatgtggcactttgcggtgtctgtgtttctggtagagctctatggaaacagcctccttttgacagcagtctacgggctggtggtggcagggtctgttctggtcctgggagccatcatcggtgactgggtggacaagaatgctagacttaaagtggcccagacctcgctggtggtacagaatgtttcagtcatcctgtgtggaatcatcctgatgatggttttcttacataaacatgagcttctgaccatgtaccatggatgggttctcacttcctgctatatcctgatcatcactattgcaaatattgcaaatttggccagtactgctactgcaatcacaatccaaagggattggattgttgttgttgcaggagaagacagaagcaaactagcaaatatgaatgccacaatacgaaggattgaccagttaaccaacatcttagcccccatggctgttggccagattatgacatttggctccccagtcatcggctgtggctttatttcgggatggaacttggtatccatgtgcgtggagtacgttctgctctggaaggtttaccagaaaaccccagctctagctgtgaaagctggtcttaaagaagaggaaactgaattgaaacagctgaatttacacaaagatactgagccaaaacccctggagggaactcatctaatgggtgtgaaagactctaacatccatgagcttgaacatgagcaagagcctacttgtgcctcccagatggctgagcccttccgtaccttccgagatggatgggtctcctactacaaccagcctgtgtttctggctggcatgggtcttgctttcctttatatgactgtcctgggctttgactgcatcaccacagggtacgcctacactcagggactgagtggttccatcctcagtattttgatgggagcatcagctataactggaataatgggaactgtagcttttacttggctacgtcgaaaatgtggtttggttcggacaggtctgatctcaggattggcacagctttcctgtttgatcttgtgtgtgatctctgtattcatgcctggaagccccctggacttgtccgtttctccttttgaagatatccgatcaaggttcattcaaggagagtcaattacacctaccaagatacctgaaattacaactgaaatatacatgtctaatgggtctaattctgctaatattgtcccggagacaagtcctgaatctgtgcccataatctctgtcagtctgctgtttgcaggcgtcattgctgctagaatcggtctttggtcctttgatttaactgtgacacagttgctgcaagaaaatgtaattgaatctgaaagaggcattataaatggtgtacagaactccatgaactatcttcttgatcttctgcatttcatcatggtcatcctggctccaaatcctgaagcttttggcttgctcgtattgatttcagtctcctttgtggcaatgggccacattatgtatttccgatttgcccaaaatactctgggaaacaagctctttgcttgcggtcctgatgcaaaagaagttaggaaggaaaatcaagcaaatacatctgttgtttgagacagtttaactgttgctatcctgttactagattatatagagcacatgtgcttattttgtactgcagaattccaataaatggctgggtgttttgctctgtttttaccacagctgtgccttgagaactaaaagctgtttaggaaacctaagtcagcagaaattaactgattaatttcccttatgttgaggcatggaaaaaaaattggaaaagaaaaactcagtttaaatacggagactataatgataacactgaattcccctatttctcatgagtagatacaatcttacgtaaaagagtggttagtcacgtgaattcagttatcatttgacagattcttatctgtactagaattcagatatgtcagttttctgcaaaactcactcttgttcaagactagctaatttatttttttgcatcttagttatttttaaaaacaaattcttcaagtatgaagactaaattttgataactaatattatccttattgatcctattgatcttaaggtatttacatgtatgtggaaaaacaaaacacttaactagaattctctaataaggtttatggtttagcttaaagagcacctttgtatttttattatcagatggggcaacatattgtatgaagcatatgtagcacttcacagcatggttatcatgtaagctgcaggtagaagcaaagctgtaaagtagatttatcacacaatgactgcatacagacttcaaatatgtcaatagtttggtcatagaacctagaagccaaaagccacacagaagggcaagaatcccaatttaactcatgttatcatcattagtgatctgtgttgtagaacatgagggtgtaagccttcagcctggcaagttacatgtagaaagcccacacttgtgaaggttttgttttacaaatcacttgatttaacacactcaggtagaatatttttatttttactgttttatacccagaagttatttctacattgttctacagcaagaatattcataaaagtatccctttcaaatgcctttgagaagaatagaagaaaaaaagtttgtatatattttaaaaaattgttttaaaagtcagtttgcaacatgtctgtaccaagatggtactttgccttaaccgtttatatgcactttcatggagactgcaatacgttgctatgagcactttctttatccttggagtttaatcctttgcttcatctttctacagtatgacataatgatttgctatgttgtaaaatctttgtaaaaaatttctatataaaaatattttgaaaatcttaaaaaaaaaaaaaaaaaaaaaaaaaaaa

SEQ ID NO: 109 - DNA, 2869 bp, Homo sapiens
actgcccccgccactcctttagactctggacgtgcggggactggtggcgctcggcctcgcgttataaaaagcggtggggcagggccggcgagacaatctgggaggcgggtaccgggcctcacggatccgcgccgcgccccccacctgtggctgcgcgcggggtgggctgcgctcccctgggcggcgccgggcgcccggggctggtggcgagatgggccgctactctggcaagacgtgccggctgctcttcatgctggtgctcaccgtcgccttcttcgtggcggagctggtctccggctacctgggcaactccatcgcgctgctctccgactccttcaacatgctctccgacctgatctcgctgtgcgtgggcctgagcgccggctacatcgcccggcgccccacccggggcttcagcgccacctacggctacgcccgcgccgaggtggtgggcgcgctgagcaacgcggtcttcctcaccgcgctctgcttcaccatcttcgtggaggccgtgctgcgcctggcccggcccgagcgcatcgatgaccccgagctggtgctcatcgtcggcgtcctggggctgttggtcaacgtggtggggctgctcatcttccaggactgcgccgcctggttcgcgtgctgcctccggggacgcagtcgccgcctgcagcagcggcagcagctggcggagggctgtgtccccggcgctttcggggggcctcagggcgcggaggacccgcggcgcgcggcggacccgacagccccaggctcggactcggccgtaaccctccgggggacctcggtggaaaggaagcgggagaagggggcgaccgtgttcgcaaacgtagcaggtgattccttcaacacccagaatgagccagaagacatgatgaaaaaagagaaaaagtctgaagctctgaatatcagaggtgtacttttgcatgtgatgggagatgccctggggtccgtggttgtggtcatcacggccatcatattctatgtgcttcccctgaagagtgaggacccgtgtaactggcagtgttacattgaccccagcctgactgtcctcatggtcatcatcattttgtcatctgccttcccgcttatcaaggagaccgctgccattctgctacagatggtcccaaaaggagtcaacatggaagagctgatgagtaaactctctgctgtgcctggaattagcagtgtacatgaagtgcacatctgggaacttgtaagtggaaagattattgccaccctgcacatcaagtatcctaaggacaggggatatcaagatgccagcacaaaaattcgagaaatcttccaccatgcgggaatccacaatgtgaccatccagtttgaaaatgtggacttgaaggaacccctggagcagaaggacttactgttgctctgcaactcaccctgcatctccaagggctgtgctaagcagctgtgttgtccccccggggcactgcctctggctcacgtcaatggctgtgctgagcacaatggtgggccctctctagacacatacggaagtgatggcctcagtagaagagacgcaagagaagtggctattgaagtgtctttggatagctgtctgagtgaccacggacaaagtcttaacaaaactcaggaggaccaatgttatgtcaacagaacgcatttttaatctggtactcacataatcagaccatatagacgaggcactttggaaccacaagcttggctcacaaaaagagctttctgggttgtaggcccagactagacttgcagcatgcatgctctgtgttcactaggggttggctgtttgggattttagttaaacgtgtctgtgaatttttatgtaactaactcctttccattcccctgggtgtctcatgctgctctttgactgtttcagcttgaacatgcattttctaaagcaaactgcactagtgtatatatcagggacattaaagtctgggactggggctcaatagctgcggatacagtgttcaaagaagttcttgtttctaaactgattagaacttctagctaatgctcaggtgagatcatagcttaaatacattgaaaaaactaaagtaccacaatagctgtatttttcccaatccccttaacgatcataaaagaggcaagttaagtatttctggcactgaagaaatatcttttttctttgattcatttttgaataaatataaaatgaataactattaaggtagaaaatattctcagaacattctagaggaggtaaaggttagtaggagggcgttggccatctctacattttgtgaggtgagagaaaactaatgtttactttctgctgtgaactgaactgcagctatagaatgtttcaaatgcttaaatatataatacatttttttccatggaagtgagggaatatttcagtttcctgaagtatgacacaaatactcatatactgtcttttagagtcagtatagttggagctgttttcatttagtgctttgataatgatttacttatttttccaaatttcgtttgaattttctttcatatgattgcattgatctatgcagcatttaccagaaaagagtattcctgggatagcagaatgcataacactgagtgttaattcttgtgaaataaataagctagactgccttctctttaattagacatattttaaagtatttattatagttgtcaactagtaactcaatgaaaaagttgatgcccaagggagaaatgagaattagcttaattgctgcctttaatgtgtttttgaggaacttaaaattttctttcatgtcgctgatccatattaccaagttcaaataaaatttttataatcggattcagacccataaccaaactaaaaaaaaaaaaaaaa

SEQ ID NO: 110 - DNA, 2120 bp, Homo sapiens
cgggaacccaggcggggcgagccgcgggagagtggagggcaggcgcctgggctgggggcggggaccaggcggggcagggggcagggagaggagggcggcgggagcctgagccggaatcgcagcgtgagcaggtggagccgcggtgggagcccgccgggtcgagctgagtaaggcggcgggctcggcgggggccatggagctgctaaagctgaaccggagcgtgcagggaaccggacccgggccgggggcttccctgtgccgcccgggggcgcctctcctcaacagcagcagtgtgggcaacctcagctgcgagccccctcgcattcgcggagccgggacacgagaattggagctggccattagaatcactctttacgcagtgatcttcctgatgagcgttggaggaaatatgctcatcatcgtggtcctgggactgagccgccgcctgaggactgtcaccaatgccttcctcctctcactggcagtcagcgacctcctgctggctgtggcttgcatgcccttcaccctcctgcccaatctcatgggcacattcatctttggcaccgtcatctgcaaggcggtttcctacctcatgggggtgtctgtgagtgtgtccacgctaagcctcgtggccatcgcactggagcggtacagcgccatctgccgaccactgcaggcacgagtgtggcagacgcgctcccacgcggctcgcgtgattgtagccacgtggctgctgtccggactactcatggtgccctaccccgtgtacactgtcgtgcaaccagtggggcctcgtgtgctgcagtgcgtgcatcgctggcccagtgcgcgggtccgccagacctggtccgtactgctgcttctgctcttgttcttcatcccgggtgtggttatggccgtggcctacgggcttatctctcgcgagctctacttagggcttcgctttgacggcgacagtgacagcgacagccaaagcagggtccgaaaccaaggcgggctgccaggggctgttcaccagaacgggcgttgccggcctgagactggcgcggttggcgaagacagcgatggctgctacgtgcaacttccacgttcccggcctgccctggagctgacggcgctgacggctcctgggccgggatccggctcccggcccacccaggccaagctgctggctaagaagcgcgtggtgcgaatgttgctggtgatcgttgtgcttttttttctgtgttggttgccagtttatagtgccaacacgtggcgcgcctttgatggcccgggtgcacaccgagcactctcgggtgctcctatctccttcattcacttgctgagctacgcctcggcctgtgtcaaccccctggtctactgcttcatgcaccgtcgctttcgccaggcctgcctggaaacttgcgctcgctgctgcccccggcctccacgagctcgccccagggctcttcccgatgaggaccctcccactccctccattgcttcgctgtccaggcttagctacaccaccatcagcacactgggccctggctgaggagtagaggggccgtgggggttgaggcagggcaaatgacatgcactgacccttccagacatagaaaacacaaaccacaactgacacaggaaaccaacacccaaagcatggactaaccccaacgcacaggaaaaggtagcttacctgacacaagaggaataagaatggagcagtacatgggaaaggaggcatgcctctgatatgggactgagcctggcccatagaaacatgacactgaccttggagagacacagcgtccctagcagtgaactatttctacacagtgggaactctgacaagggctgacctgcctctcacacacatagattaatggcactgattgttttagagactatggagcctggcacaggactgactctgggatgctcctagtttgacctcacagtgacccttcccaatcagcactgaaaataccatcaggcctaatctcatacctctgaccaacaggctgttctgcactgaaaaggttcttcatccctttccagttaaggaccgtggccctgccctctccttccttacccaaactgttcaagaaataataaattgtttggcttcctcctga

SEQ ID NO: 111 - DNA, 1594 bp, Homo sapiens
ggaattcctctctttattgtcagggtcctctccctaggaggcctgcccccgctaaccggctttttgcccaaatgggccattatcgaagaattcacaaaaaacaatagcctcatcatccccaccatcatagccaccatcaccctccttaacctctacttctacctacgcctaatctactccacctcaatcacactactccccatatctaacaacgtaaaaataaaatgacagtttaacatacaaaacccaccccattcctccccacactcatcgcccttaccacgctactcctacctatctccccttttatactaataatgtctgttgtgtcttgttgcgggcaccgcagtcgccgtgaagatggcgtctaccagccgtttggatgctcttccaagagtcacatgtccaaaccatccagatgcgattttagtggaggactacagagccggtgatatgatctgtcctgaatgtggcttggttgtaggtgaccgggttattgatgtgggatctgaatggcgaactttcagcaatgacaaagcaacaaaagatccatctcgagttggagattctcagaatcctcttctgagtgatggagatttgtctaccatgattggcaagggcacaggagctgcaagttttgacgaatttggcaattctaagtaccagaatcggagaacaatgagcagttctgatcgggcaatgatgaatgcattcaaagaaatcactaccatggcagacagaatcaatctacctcgaaatatagttgatcgaacaaataatttattcaagcaagtatatgaacagaagagcctgaagggaagagctaatgatgctatagcttctgcttgtctctatattgcctgtagacaagaaggggttcctaggacatttaaagaaatatgtgccgtatcacgaatttctaagaaagaaattggtcggtgttttaaacttattttgaaagcgctagaaaccagtgtggatttgattacaactggggacttcatgtccaggttctgttccaacctttgtcttcctaaacaagtacagatggcagctacacatatagcccgtaaagctgtggaattggacttggttcctgggaggagccccatctctgtggcagcggcagctatttacatggcctcacaggcatcagctgaaaagaggacccaaaaagaaattggagatattgctggtgttgctgatgttacaatcagacagtcctatagactgatctatcctcgagccccagatctgtttcctacagacttcaaatttgacaccccagtggacaaactaccacagctataaattgaggcagctaacgtcaaattcttgaatacaaaactttgcctgttgtacatagcctatacaaaatgctgggttgagcctttcatgaggaaaaacaaaagacatggtacgcattccagggctgaatactattgcttggcattctgtatgtatatactagtgaaacatatttaatgatttaaatttcttatcaaatttcttttgtagcaatctaggaaactgtattttggaagatatttgaaattatgtaattcttgaataaaacatttttcaaaacggaatt

SEQ ID NO: 112 - DNA, 3134 bp, Homo sapiens
agagcggcgcgcgcggcagccccgaggcagcagagcgcggagccgggagcgcggggagcgcgggccggcggcggcgagggaggacgggggcgcagacggccggcgcgcggcgcggctaccatgggcgtgcggtgagcagccgctcgggacgacttcctcggctgcgcggcgctcgcgcggagctccccggccggcggtgcgtccccacggtcaccatgaaagacgacttcgcagaggaggaggaggtgcaatccttcggttacaagcggtttggtattcaggaaggaacacaatgtaccaaatgtaaaaataactgggcactgaagttttctatcatattattatacattttgtgtgccttgctaacaatcacagtagccattttgggatataaagttgtagagaaaatggacaatgtcacaggtggcatggaaacatctcgccaaacctatgatgacaagctcacagcagtggaaagtgacctgaaaaaattaggtgaccaaactgggaagaaagctatcagcaccaactcagaactctccaccttcagatcagacattctagatctccgtcagcaacttcgtgagattacagaaaaaaccagcaagaacaaggatacgctggagaagttacaggcgagcggggatgctctggtggacaggcagagtcaattgaaagaaactttggagaataactctttcctcatcaccactgtaaacaaaaccctccaggcgtataatggctatgtcacgaatctgcagcaagataccagcgtgctccagggcaatctgcagaaccaaatgtattctcataatgtggtcatcatgaacctcaacaacctgaacctgacccaggtgcagcagaggaacctcatcacgaatctgcagcggtctgtggatgacacaagccaggctatccagcgaatcaagaacgactttcaaaatctgcagcaggtttttcttcaagccaagaaggacacggattggctgaaggagaaagtgcagagcttgcagacgctggctgccaacaactctgcgttggccaaagccaacaacgacaccctggaggatatgaacagccagctcaactcattcacaggtcagatggagaacatcaccactatctctcaagccaacgagcagaacctgaaagacctgcaggacttacacaaagatgcagagaatagaacagccatcaagttcaaccaactggaggaacgcttccagctctttgagacggatattgtgaacatcattagcaatatcagttacacagcccaccacctgcggacgctgaccagcaatctaaatgaagtcaggaccacttgcacagatacccttaccaaacacacagatgatctgacctccttgaataataccctggccaacatccgtttggattctgtttctctcaggatgcaacaagatttgatgaggtcgaggttagacactgaagtagccaacttatcagtgattatggaagaaatgaagctagtagactccaagcatggtcagctcatcaagaattttacaatactacaaggtccaccgggccccaggggtccaagaggtgacagaggatcccagggaccccctggcccaactggcaacaagggacagaaaggagagaagggggagcctggaccacctggccctgcgggtgagagaggcccaattggaccagctggtccccccggagagcgtggcggcaaaggatctaaaggctcccagggccccaaaggctcccgtggttcccctgggaagcccggccctcagggccccagtggggacccaggccccccgggcccaccaggcaaagagggactccccggccctcagggccctcctggcttccagggacttcagggcaccgttggggagcctggggtgcctggacctcggggactgccaggcttgcctggggtaccaggcatgccaggccccaagggcccccccggccctcctggcccatcaggagcggtggtgcccctggccctgcagaatgagccaaccccggcaccggaggacaatggctgcccgcctcactggaagaacttcacagacaaatgctactatttttcagttgagaaagaaatttttgaggatgcaaagcttttctgtgaagacaagtcttcacatcttgttttcataaacactagagaggaacagcaatggataaaaaaacagatggtagggagagagagccactggatcggcctcacagactcagagcgtgaaaatgaatggaagtggctggatgggacatctccagactacaaaaattggaaagctggacagccggataactggggtcatggccatgggccaggagaagactgtgctgggttgatttatgctgggcagtggaacgatttccaatgtgaagacgtcaataacttcatttgcgaaaaagacagggagacagtactgtcatctgcattataacggactgtgatgggatcacatgagcaaattttcagctctcaaaggcaaaggacactcctttctaattgcatcaccttctcatcagattgaaaaaaaaaaagcactgaaaaccaattactgaaaaaaaattgacagctagtgttttttaccatccgtcattacccaaagacttgggaactaaaatgttccccagggtgatatgctgattttcattgtgcacatggactgaatcacatagattctcctccgtcagtaaccgtgcgattatacaaattatgtcttccaaagtatggaacactccaatcagaaaaaggttatcattggtcgttgagttatgggaagaacttaagcatatactgtgtaaacagtgccatacatttctaaaatcccaagtgtaggaaaaatatgcagacatacagatatataggccaactattagtaataatatgaaatatacttaaagagcttttaaaactttgtatttttgtacaaaatatttgtcttttacaatttttttcctttttttttttttgtcattttaccgacataatacatggagccaaagaaaacaataatggtactaataaaaactcctagggtttcctgtcagatttaattctacccagtggcaaagaattttttcaattgtggctttaaaaaaataattaaatatacatgtgtatatatata

SEQ ID NO: 113 - DNA, 4024 bp, Homo sapiens
cttcttcagccactgcgaggtgaagctttaaacttcagacttggaggtgggctgtgtgcagtaaactggaatgctctccctcgctcactcctcagtgtaggagtgatctgaagcaggacaagctcagcctgcagctgccgtgggctttgtgtggactggacgcagagcttgggagacgggggagggctattactccaattcactgtcaatggaattacagctatagcggcagtgtatataggattgctttttctcgtcttcctggagatgctcagtcccagtatattttaaggaagagaaatataaaggaaatttagtatgcctccttttctttaaatgaagaatttagtttcctttacttcttaaaagagaatacctgttcttgtataacgtgactgcaccagacattctgaaaaatcagcaagaagcaaaagctggaaatagctatttcacagcagggttctgaagtaacggaagctaccttgtataaagacctcaacactgctgaccatgatcagcgcagcctggagcatcttcctcatcgggactaaaattgggctgttccttcaagtagcacctctatcagttatggctaaatcctgtccatctgtgtgtcgctgcgatgcgggtttcatttactgtaatgatcgctttctgacatccattccaacaggaataccagaggatgctacaactctctaccttcagaacaaccaaataaataatgctgggattccttcagatttgaaaaacttgctgaaagtagaaagaatatacctataccacaacagtttagatgaatttcctaccaacctcccaaagtatgtaaaagagttacatttgcaagaaaataacataaggactatcacttatgattcactttcaaaaattccctatctggaagaattacatttagatgacaactctgtctctgcagttagcatagaagagggagcattccgagacagcaactatctccgactgcttttcctgtcccgtaatcaccttagcacaattccctggggtttgcccaggactatagaagaactacgcttggatgataatcgcatatccactatttcatcaccatctcttcaaggtctcactagtctaaaacgcctggttctagatggaaacctgttgaacaatcatggtttaggtgacaaagttttcttcaacctagttaatttgacagagctgtccctggtgcggaattccctgactgctgcaccagtaaaccttccaggcacaaacctgaggaagctttatcttcaagataaccacatcaatcgggtgcccccaaatgctttttcttatctaaggcagctctatcgactggatatgtccaataataacctaagtaatttacctcagggtatctttgatgatttggacaatataacacaactgattcttcgcaacaatccctggtattgcgggtgcaagatgaaatgggtacgtgactggttacaatcactacctgtgaaggtcaacgtgcgtgggctcatgtgccaagccccagaaaaggttcgtgggatggctattaaggatctcaatgcagaactgtttgattgtaaggacagtgggattgtaagcaccattcagataaccactgcaatacccaacacagtgtatcctgcccaaggacagtggccagctccagtgaccaaacagccagatattaagaaccccaagctcactaaggatcaccaaaccacagggagtccctcaagaaaaacaattacaattactgtgaagtctgtcacctctgataccattcatatctcttggaaacttgctctacctatgactgctttgagactcagctggcttaaactgggccatagcccggcatttggatctataacagaaacaattgtaacaggggaacgcagtgagtacttggtcacagccctggagcctgattcaccctataaagtatgcatggttcccatggaaaccagcaacctctacctatttgatgaaactcctgtttgtattgagactgaaactgcaccccttcgaatgtacaaccctacaaccaccctcaatcgagagcaagagaaagaaccttacaaaaaccccaatttacctttggctgccatcattggtggggctgtggccctggttaccattgcccttcttgctttagtgtgttggtatgttcataggaatggatcgctcttctcaaggaactgtgcatatagcaaagggaggagaagaaaggatgactatgcagaagctggcactaagaaggacaactctatcctggaaatcagggaaacttcttttcagatgttaccaataagcaatgaacccatctcgaaggaggagtttgtaatacacaccatatttcctcctaatggaatgaatctgtacaaaaacaatcacagtgaaagcagtagtaaccgaagctacagagacagtggtattccagactcagatcactcacactcatgatgctgaaggactcacagcagacttgtgttttgggttttttaaacctaagggaggtgatggtaggaaccctgttctactgcaaaacactggaaaaagagactgaaaaaaagcaatgtactgtacatttgccatataatttatatttaagaactttttattaaaagtttcaaatttcaggttactgctgcgattgatgtagtggagatgcctgaacacaattctatattttagtattttttagtaatttgtactgtattttccttgcaaatattggagttataaaccatttactttgtgttctactgagtaagatgacttgttgactgtgaaagtgaattttcttgctgtgtcgaacaatcaggactgcattcatatgagatccttgtagtataagcacaggccatttttcactttggtattaataaaatgtaaaaaaaaaaaactggctgaatggctgaatgagataaaatttaattttaaaaaatggttatgaaataatgttccaattattaaatttgtattatcccagtggtattcaataaatcaaaatgtgtgaagtaatgggcaatatcaaacttcctgcatatctccatttttgctctaggcaaattaattatccttaaaaaagttaagcatatcttctgaactgaatacatcagctggcataaaaggagcatgaagtctgttaaagccattgtcagcaaagctttgaaaataaaggacttcacaaaaacggtaatgtaaatgtgcttccaagttggggggaaaatgtgtacttaggaaaacatggaaacttagacttgtatagtgtaatgaacacaaataccaaaactgcattttggttttgcctataccatcctgatttttgaaaagtgaattataaacacaaaattgttagtgtttatgatgtttttatcataaaggatgtcagagaaactttatgcatattaaaaatgtaatgtaattataagcgattcccctcaacaatccagagaaagtagttctttaaataagagataatttaaagaaaaataaatactagacatcaaatttagatctggtttatgtcaaaggttttaacactgtacataaatgttcaatttacttttacaaagatcaagaatactgcccattactgtcacaattttccagatattatataatgaactcgtaatgtaacatttccttctagcttcctactgaattgtgagctgttacttgttgaaaaaccatatcacttttctgttgccatgattttttttttttcaacaaaaaaccaaagtgcattgtacgccctttggccagtcttgtatgtgccttgatccaacgctacatgtattcagcttttaaaactccacaaatttttcatactccttaaatatgaaaaattatggtcttattgctgaataaaacttttaaaaagtacagaataattgtgcttgctttttcaggattgtgttactatcactaagtagcaaattgcccagcacattagtcctaaacgtcccatgtatttttctaggcataaaaataaaagttggctaaaaattttaaaaaatcaaca

SEQ ID NO: 114 - DNA, 2880 bp, Homo sapiens
tgctgctctccgcccgcgtccggctcgtggccccctacttcgggcaccatggacacctcccggctcggtgtgctcctgtccttgcctgtgctgctgcagctggcgaccgggggcagctctcccaggtctggtgtgttgctgaggggctgccccacacactgtcattgcgagcccgacggcaggatgttgctcagggtggactgctccgacctggggctctcggagctgccttccaacctcagcgtcttcacctcctacctagacctcagtatgaacaacatcagtcagctgctcccgaatcccctgcccagtctccgcttcctggaggagttacgtcttgcgggaaacgctctgacatacattcccaagggagcattcactggcctttacagtcttaaagttcttatgctgcagaataatcagctaagacacgtacccacagaagctctgcagaatttgcgaagccttcaatccctgcgtctggatgctaaccacatcagctatgtgcccccaagctgtttcagtggcctgcattccctgaggcacctgtggctggatgacaatgcgttaacagaaatccccgtccaggcttttagaagtttatcggcattgcaagccatgaccttggccctgaacaaaatacaccacataccagactatgcctttggaaacctctccagcttggtagttctacatctccataacaatagaatccactccctgggaaagaaatgctttgatgggctccacagcctagagactttagatttaaattacaataaccttgatgaattccccactgcaattaggacactctccaaccttaaagaactaggatttcatagcaacaatatcaggtcgatacctgagaaagcatttgtaggcaacccttctcttattacaatacatttctatgacaatcccatccaatttgttgggagatctgcttttcaacatttacctgaactaagaacactgactctgaatggtgcctcacaaataactgaatttcctgatttaactggaactgcaaacctggagagtctgactttaactggagcacagatctcatctcttcctcaaaccgtctgcaatcagttacctaatctccaagtgctagatctgtcttacaacctattagaagatttacccagtttttcagtctgccaaaagcttcagaaaattgacctaagacataatgaaatctacgaaattaaagttgacactttccagcagttgcttagcctccgatcgctgaatttggcttggaacaaaattgctattattcaccccaatgcattttccactttgccatccctaataaagctggacctatcgtccaacctcctgtcgtcttttcctataactgggttacatggtttaactcacttaaaattaacaggaaatcatgccttacagagcttgatatcatctgaaaactttccagaactcaaggttatagaaatgccttatgcttaccagtgctgtgcatttggagtgtgtgagaatgcctataagatttctaatcaatggaataaaggtgacaacagcagtatggacgaccttcataagaaagatgctggaatgtttcaggctcaagatgaacgtgaccttgaagatttcctgcttgactttgaggaagacctgaaagcccttcattcagtgcagtgttcaccttccccaggccccttcaaaccctgtgaacacctgcttgatggctggctgatcagaattggagtgtggaccatagcagttctggcacttacttgtaatgctttggtgacttcaacagttttcagatcccctctgtacatttcccccattaaactgttaattggggtcatcgcagcagtgaacatgctcacgggagtctccagtgccgtgctggctggtgtggatgcgttcacttttggcagctttgcacgacatggtgcctggtgggagaatggggttggttgccatgtcattggttttttgtccatttttgcttcagaatcatctgttttcctgcttactctggcagccctggagcgtgggttctctgtgaaatattctgcaaaatttgaaacgaaagctccattttctagcctgaaagtaatcattttgctctgtgccctgctggccttgaccatggccgcagttcccctgctgggtggcagcaagtatggcgcctcccctctctgcctgcctttgccttttggggagcccagcaccatgggctacatggtcgctctcatcttgctcaattccctttgcttcctcatgatgaccattgcctacaccaagctctactgcaatttggacaagggagacctggagaatatttgggactgctctatggtaaaacacattgccctgttgctcttcaccaactgcatcctaaactgccctgtggctttcttgtccttctcctctttaataaaccttacatttatcagtcctgaagtaattaagtttatccttctggtggtagtcccacttcctgcatgtctcaatccccttctctacatcttgttcaatcctcactttaaggaggatctggtgagcctgagaaagcaaacctacgtctggacaagatcaaaacacccaagcttgatgtcaattaactctgatgatgtcgaaaaacagtcctgtgactcaactcaagccttggtaacctttaccagctccagcatcacttatgacctgcctcccagttccgtgccatcaccagcttatccagtgactgagagctgccatctttcctctgtggcatttgtcccatgtctctaattaatatgtgaaggaaaatgttttcaaaggttgagaacctgaaaatgtgagattgagtatatcagagcagtaattaataagaagagctgaggtgaaactcggtttaaa

SEQ ID NO: 115 - DNA, 918 bp, Homo sapiens; identical to SEQ ID NO: 52

SEQ ID NO: 116 - DNA, 983 bp, Homo sapiens
gtggaattcatggcatctacttcgtatgactattgcagagtgcccatggaagacggggataagcgctgtaagcttctgctggggataggaattctggtgctcctgatcatcgtgattctgggggtgcccttgattatcttcaccatcaaggccaacagcgaggcctgccgggacggccttcgggcagtgatggagtgtcgcaatgtcacccatctcctgcaacaagagctgaccgaggcccagaagggctttcaggatgtggaggcccaggccgccacctgcaaccacactgtgatggccctaatggcttccctggatgcagagaaggcccaaggacaaaagaaagtggaggagcttgagggagagatcactacattaaaccataagcttcaggacgcgtctgcagaggtggagcgactgagaagagaaaaccaggtcttaagcgtgagaatcgcggacaagaagtactaccccagctcccaggactccagctccgctgcggcgccccagctgctgattgtgctgctgggcctcagcgctctgctgcagtgagatcccaggaagctggcacatcttggaaggtccgtcctgctcggcttttcgcttgaacattcccttgatctcatcagttctgagcgggtcatggggcaacacggttagcggggagagcacggggtagccggagaagggcctctggagcaggtctggaggggccatggggcagtcctgggtgtggggacacagtcgggttgacccagggctgtctccctccagagcctccctccggacaatgagtcccccctcttgtctcccaccctgagattgggcatggggtgcggtgtggggggcatgtgctgcctgttgttatgggttttttttgcggggggggttgcttttttctggggtctttgagctccaaaaaataaacacttcctttgagggagagcaaaaaaaaaaaaaaaaaaaaaaaaaaaaaaaaaaaa

SEQ ID NO: 117 - DNA, 3218 bp, Homo sapiens
atgaagccaggagcgcctcaaagtccagcctgctgttgaccaacactaacagatgagcaaggagctggcagcaatggggcctggagcttcaggggacggggtcaggactgagacagctccacacatagcactggactccagagttggtctgcacgcctacgacatcagcgtggtggtcatctactttgtcttcgtcattgctgtggggatctggtcgtccatccgtgcaagtcgagggaccattggcggctatttcctggccgggaggtccatgagctggtggccaattggagcatctctgatgtccagcaatgtgggcagtggcttgttcatcggcctggctgggacaggggctgccggaggccttgccgtaggtggcttcgagtggaacgcaacctggctgctcctggcccttggctgggtcttcgtccctgtgtacatcgcagcaggtgtggtcacaatgccgcagtatctgaagaagcgatttgggggccagaggatccaggtgtacatgtctgtcctgtctctcatcctctacatcttcaccaagatctcgactgacatcttctctggagccctcttcatccagatggcattgggctggaacctgtacctctccacagggatcctgctggtggtgactgccgtctacaccattgcaggtggcctcatggccgtgatctacacagatgctctgcagacggtgatcatggtagggggagccctggtcctcatgtttctgggctttcaggacgtgggctggtacccaggcctggagcagcggtacaggcaggccatccctaatgtcacagtccccaacaccacctgtcacctcccacggcccgatgctttccacattcttcgggaccctgtgagcggggacatcccttggccaggtctcattttcgggctcacagtgctggccacctggtgttggtgcacagaccaggtcattgtgcagcggtctctctcggccaagagtctgtctcatgccaagggaggctccgtgctggggggctacctgaagatcctccccatgttcttcatcgtcatgcctggcatgatcagccgggccctgttcccagacgaggtgggctgcgtggaccctgatgtctgccaaagaatctgtggggcccgagtgggatgttccaacattgcctaccctaagttggtcatggccctcatgcctgttggtctgcgggggctgatgattgccgtgatcatggccgctctcatgagctcactcacctccatcttcaacagcagcagcaccctgttcaccattgatgtgtggcagcgcttccgcaggaagtcaacagagcaggagctgatggtggtgggcagagtgtttgtggtgttcctggttgtcatcagcatcctctggatccccatcatccaaagctccaacagtgggcagctcttcgactacatccaggctgtcaccagttacctggccccacccatcaccgctctcttcctgctggccatcttctgcaagagggtcacagagcccggagctttctggggcctcgtgtttggcctgggagtggggcttctgcgtatgatcctggagttctcatacccagcgccagcctgtggggaggtggaccggaggccagcagtgctgaaggacttccactacctgtactttgcaatcctcctctgcgggctcactgccatcgtcattgtcattgtcagcctctgtacaactcccatccctgaggaacagctcacacgcctcacatggtggactcggaactgccccctctctgagctggagaaggaggcccacgagagcacaccggagatatccgagaggccagccggggagtgccctgcaggaggtggagcggcagagaactcgagcctgggccaggagcagcctgaagccccaagcaggtcctggggaaagttgctctggagctggttctgtgggctctctggaacaccggagcaggccctgagcccagcagagaaggctgcgctagaacagaagctgacaagcattgaggaggagccactctggagacatgtctgcaacatcaatgctgtccttttgctggccatcaacatcttcctctggggctattttgcgtgattccacagacctggcttcagtgtagacagattaaacaaagcccaagcctgtcagccacagaaacaggctctcctcttactttgctgtctaaactggagatcacagaagtcaagactgcaagctcccctgaagagaatccaactcaacctgcacacttgacaagtggagaaacagaagcccagagagagcactgggtttgttcaggaccacccagaaggtgtcacacggggtttccccactctttctgatatattgccttacagacctacctcaaacacactgtttccaccctcttcttgaatgtattcagtagcctttactgaatgtgtgtcttgagagtagaaaaatggaggatacaagaaaaggagcaggaagaaatttgcaaaaatccaagagcacctttgctcccccttatcctccttcctcttcccctttctagttcccctacctctctatctttctattctcaccaataatctctttgttgcatgaatttacccaggagagtcctatatttccattggtggctccacagtggtggctgtcagacccgaaggggtggggagccaagggtggactttaagcatggtgacagatggtattttgggcagaaagctcttagacaatggactatccaaagcactatttaaattctgcctcttcctactctctaacccaaatatgcacaaactctctatggccttgagaagcagttggagagacatgacttgttaaaacctcaaggaatcaagacatgttactctgtatttaagggtaagccccacagcgggcagcacaaacagcctgggagccactgtgcctgtgcttctctgtccttctccctttgcttgccatgaatccgcataccttggaatacactgtgaccccagttaagtgtcccttcgccaggaagctgccgcaacgtccagacctgggtcaagttcccactcctgctcccatagccttgacctgcttctgtcacagcactgatcacactgagatggaagactccagggggcaaggaccaagggccatatcccaagtgactttgtacccagaaaataacagctgttcaataaatgtgtattgagttaattagttaaaaaaaaaaaaaaaaaaa

SEQ ID NO: 118 - DNA, 3157 bp, Homo sapiens
ataactctaatcacttttttcatgttctccttgagtgaaggatgaggaaattgaaagcagagtatgcaccttttattaggagattcaaactgcatcctactggattagcctcaaaagtcctaaaatacaaagacatccatctgacagatcactgaggggaggacttgtttttctgttttagaatagtttccgattaaactttttagctcaagaagaaaagaagctagttatttctcacccaggagtggatttgtggtttggcttcaccatggcttcctgccgtgcctggaaccttagggtgctggtggctgtcgtgtgtggactactgactggcatcattttgggactgggcatctggaggattgtgatcaggatccaaagaggaaaatctacttcctcatcaagcacccctacagagttctgcaggaatggtggaacctgggaaaatggcagatgtatttgtacagaagagtggaaaggactgagatgtacaattgctaatttttgtgaaaatagtacctatatgggttttacttttgccagaatcccagtgggcagatatggaccatccttgcaaacatgtggcaaggatactccaaatgcgggcaatccaatggcagtccggttgtgcagtctctctctatatggagagatagaattacaaaaagtgacaataggaaattgcaatgaaaatctggaaaccctggaaaagcaggtaaaggatgtcacagcaccacttaataacatttcttctgaagtccagattttaacatctgatgccaataaattaactgctgagaacatcactagtgctacgcgagtggttggacagatattcaacacttccagaaatgcttcacctgaggcaaagaaagttgccatagtaacagtgagtcaactcctagatgccagtgaagatgcttttcaaagagttgctgctactgctaatgatgatgcccttacaacgcttattgagcaaatggagacttattccttgtctttgggtaatcaatcagtggtggaacctaacatagcaatacagtcagcaaatttctcttcagaaaatgcggtggggccttcaaatgttcgcttctctgtgcagaaaggagctagcagttctctagtttctagttcaacatttatacatacaaatgtggatggccttaacccagatgcacagactgagcttcaggtcttgcttaatatgacgaaaaattacaccaagacatgcggctttgtagtttatcaaaatgacaagcttttccaatcaaaaacttttacagctaaatcggattttagtcaaaaaattatctcaagcaaaactgatgaaaatgagcaagatcagagtgcttctgttgacatggtctttagtccaaagtacaaccaaaaagaatttcaactctattcctatgcctgtgtctattggaatttgtcagcgaaggactgggacacatatggctgtcaaaaagacaagggcactgatggattcctgcgctgccgctgcaaccatactactaattttgctgtattaatgactttcaaaaaggattatcaatatcccaaatcacttgacatattatccaacgttggatgtgcactgtctgttactggtctggctctcacagttatatttcagattgtcaccaggaaagtcagaaaaacctcagtaacctgggttttggtcaatctgtgcatatcaatgttgattttcaacctcctctttgtgtttggaattgaaaactccaataagaacttgcagacaagtgatggtgacatcaataatattgactttgacaataatgacatacccaggacagacaccattaacatcccgaatcccatgtgcactgcgattgccgccttactgcactattttctgttagtgacatttacctggaacgcactcagcgctgcacagctctattaccttctaataaggaccatgaagcctcttcctcggcatttcattcttttcatctcattaattggatggggagtcccagctatagtagtggctataacagtgggagttatttattctcagaatggaaataatccacagtgggaattagactaccggcaagagaaaatctgctggctggcaattccagaacccaatggtgttataaaaagtccgctgttgtggtcattcatcgtacctgtaaccattatcctcatcagcaatgttgttatgtttattacaatctcgatcaaagtgctgtggaagaataaccagaacctgacaagcacaaaaaaagtttcatccatgaagaagattgttagcacattatctgttgcagttgtttttggaattacctggattctagcatacctgatgctagttaatgatgatagcatcaggatcgtcttcagctacatattctgccttttcaacactacacagggattgcaaatttttatcctgtacactgttagaacaaaagtcttccagagtgaagcttccaaagtgttgatgttgctatcgtctattgggagaaggaagtcattgccttcagtgacgcggccgaggctgcgtgtaaagatgtataatttcctcaggtcattgccaaccttacatgaacgctttaggctactggaaacctctccgagtactgaggaaatcacactctctgaaagtgacaatgcaaaggaaagcatctagacagtaaaacttacctgttgtggtctttttaatcacctcgtttgagttttatctgtttctctcctttatttcccagtcctctcagaaagtcttcctcaatgtattttgctcaggattaagaattagataaaacctgttgtttattattattcggcataatggacttggtagtttttctatttttcaatagatttgtacttgaataaggtgaagaatttcacacaacatacaagagtaccattgttccttatatcgttaaatctttgtgacacactttgacaaaaatgtagaacctataacaaattcttttacaagttactataaaggacacaaagagaaaactttaccttccagaacaaaatgactcctgatgaacagtgtgtggggatttgcttgtatgtattaaacttttgacctctgaatattttacagtcgtatgtgcttgtacttttatttccaatgaagaatttggcaccaaaaaaaaaaaaaaaaaaa

SEQ ID NO: 119 - DNA, 2562 bp, Homo sapiens
gggaggagaagcctgggtgccccccactgataagcaggctccacccagaggccagtcctgtgtgtctggggacaaggcgaaagagcagcagaagtgccccttctccaggatcaaggaactggggcggggggtgtttcctggaccccagtcctccgaatcagctcctagagtggaaccaggaaggattctggagccacagaagatagacagatggaaggtggggaccaaagtgaggaagagccgagggaacgcagccaggcaggtggaatgggaactctctggagccaagagagcactccagaagagaggctgcccgtggaagggagcaggccatgggcagtggccaggcgggtgctgacagctatcctgattttgggcctgctcctttgtttttctgtgcttttgttctacaacttccagaactgtggccctcgcccctgtgagacatctgtgtgtttggatctccgggatcattacctggcctctgggaacacaagtgtggccccctgcaccgacttcttcagctttgcctgtggaagggccaaagagaccaataattcttttcaggagcttgccacaaagaacaaaaaccgacttcggagaatactggaggtccagaattcctggcacccaggctctggggaggagaaagccttccagttctacaactcctgcatggatacacttgccattgaagctgcagggactggtcccctcagacaagttattgaggagcttggaggctggcgcatctctggtaaatggacttccttaaactttaaccgaacgctgagacttctgatgagtcagtatggccatttccctttcttcagagcctacctaggacctcatcctgcctctccacacacaccagtcatccagatagaccagccagagtttgatgttcccctcaagcaagatcaagaacagaagatctatgcccagatctttcgggaatacctgacttacctgaatcagctgggaaccttgctgggaggagacccaagcaaggtgcaagaacactcttccttgtcaatctccatcacttcacggctgttccagtttctgaggcccctggagcagcggcgggcacagggcaagctcttccagatggtcactatcgaccagctcaaggaaatggcccccgccatcgactggttgtcctgcttgcaagcgacattcacaccgatgtccctgagcccttctcagtccctcgtggtccatgacgtggaatatttgaaaaacatgtcacaactggtggaggagatgctgctaaagcagagggactttctgcagagccacatgatcttagggctggtggtgaccctttctccagccctggacagtcaattccaggaggcacgcagaaagctcagccagaaactgcgggaactgacagagcaaccacccatgcctgcccgcccacgatggatgaagtgcgtggaggagacaggcacgttcttcgagcccacgctggcggctttgtttgttcgtgaggcctttggcccgagcacccgaagtgctgccatgaaattattcactgcgatccgggatgccctcatcactcgcctcagaaaccttccctggatgaatgaggagacccagaacatggcccaggacaaggttgctcaactgcaggtggagatgggggcttcagaatgggccctgaagccagagctggcccgacaagaatacaacgatatacagcttggatcgagcttcctgcagtctgtcctgagctgtgtccggtccctccgagctagaattgtccagagcttcttgcagcctcacccccaacacaggtggaaggtgtccccttgggacgtcaatgcttactattcggtatctgaccatgtggtagtctttccagctggactcctccaacccccattcttccaccctggctatcccagagccgtgaactttggcgctgctggcagcatcatggcccacgagctgttgcacatcttctaccagctcttactgcctgggggctgcctcgcctgtgacaaccatgccctccaggaagctcacctgtgcctgaagcgccattatgctgcctttccattacctagcagaacctccttcaatgactccctcacattcttagagaatgctgcagacgttggggggctagccatcgcgctgcaggcatacagcaagaggctgttacggcaccatggggagactgtcctgcccagcctggacctcagcccccagcagatcttctttcgaagctatgcccaggtgatgtgtaggaagcccagcccccaggactctcacgacactcacagccctccacacctccgagtccacgggcccctcagcagcaccccagcctttgccaggtatttccgctgtgcacgtggtgctctcttgaacccctccagccgctgccagctctggtaacttggttaccaaagatgccacagcacagaaatatcgaccaacacctccctggtcacatccatggaatcagagcaagatttcctttctgcttctgttccaaaaataaaagctggcacttggcttccgcttgtctcttaaaaaaaaaaaaaaaaa

SEQ ID NO: 120 - DNA, 4053 bp, Homo sapiens
agccgacgctgctcaagctgcaactctgttgcagttggcagttcttttcggtttccctcctgctgtttgggggcatgaaagggcttcgccgccgggagtaaaagaaggaattgaccgggcagcgcgagggaggagcgcgcacgcgaccgcgagggcgggcgtgcaccctcggctggaagtttgtgccgggccccgagcgcgcgccggctgggagcttcgggtagagacctaggccgctggaccgcgatgagcgcgccgagcctccgtgcgcgcgccgcggggttggggctgctgctgtgcgcggtgctggggcgcgctggccggtccgacagcggcggtcgcggggaactcgggcagccctctggggtagccgccgagcgcccatgccccactacctgccgctgcctcggggacctgctggactgcagtcgtaagcggctagcgcgtcttcccgagccactcccgtcctgggtcgctcggctggacttaagtcacaacagattatctttcatcaaggcaagttccatgagccaccttcaaagccttcgagaagtgaaactgaacaacaatgaattggagaccattccaaatctgggaccagtctcggcaaatattacacttctctccttggctggaaacaggattgttgaaatactccctgaacatctgaaagagtttcagtcccttgaaactttggaccttagcagcaacaatatttcagagctccaaactgcatttccagccctacagctcaaatatctgtatctcaacagcaaccgagtcacatcaatggaacctgggtattttgacaatttggccaacacactccttgtgttaaagctgaacaggaaccgaatctcagctatcccacccaagatgtttaaactgccccaactgcaacatctcgaattgaaccgaaacaagattaaaaatgtagatggactgacattccaaggccttggtgctctgaagtctctgaaaatgcaaagaaatggagtaacgaaacttatggatggagctttttgggggctgagcaacatggaaattttgcagctggaccataacaacctaacagagattaccaaaggctggctttacggcttgctgatgctgcaggaacttcatctcagccaaaatgccatcaacaggatcagccctgatgcctgggagttctgccagaagctcagtgagctggacctaactttcaatcacttatcaaggttagatgattcaagcttccttggcctaagcttactaaatacactgcacattgggaacaacagagtcagctacattgctgattgtgccttccgggggctttccagtttaaagactttggatctgaagaacaatgaaatttcctggactattgaagacatgaatggtgctttctctgggcttgacaaactgaggcgactgatactccaaggaaatcggatccgttctattactaaaaaagccttcactggtttggatgcattggagcatctagacctgagtgacaacgcaatcatgtctttacaaggcaatgcattttcacaaatgaagaaactgcaacaattgcatttaaatacatcaagccttttgtgcgattgccagctaaaatggctcccacagtgggtggcggaaaacaactttcagagctttgtaaatgccagttgtgcccatcctcagctgctaaaaggaagaagcatttttgctgttagcccagatggctttgtgtgtgatgattttcccaaaccccagatcacggttcagccagaaacacagtcggcaataaaaggttccaatttgagtttcatctgctcagctgccagcagcagtgattccccaatgacttttgcttggaaaaaagacaatgaactactgcatgatgctgaaatggaaaattatgcacacctccgggcccaaggtggcgaggtgatggagtataccaccatccttcggctgcgcgaggtggaatttgccagtgaggggaaatatcagtgtgtcatctccaatcactttggttcatcctactctgtcaaagccaagcttacagtaaatatgcttccctcattcaccaagacccccatggatctcaccatccgagctggggccatggcacgcttggagtgtgctgctgtggggcacccagccccccagatagcctggcagaaggatgggggcacagacttcccagctgcacgggagagacgcatgcatgtgatgcccgaggatgacgtgttctttatcgtggatgtgaagatagaggacattggggtatacagctgcacagctcagaacagtgcaggaagtatttcagcaaatgcaactctgactgtcctagaaacaccatcatttttgcggccactgttggaccgaactgtaaccaagggagaaacagccgtcctacagtgcattgctggaggaagccctccccctaaactgaactggaccaaagatgatagcccattggtggtaaccgagaggcacttttttgcagcaggcaatcagcttctgattattgtggactcagatgtcagtgatgctgggaaatacacatgtgagatgtctaacacccttggcactgagagaggaaacgtgcgcctcagtgtgatccccactccaacctgcgactcccctcagatgacagccccatcgttagacgatgacggatgggccactgtgggtgtcgtgatcatagccgtggtttgctgtgtggtgggcacgtcactcgtgtgggtggtcatcatataccacacaaggcggaggaatgaagattgcagcattaccaacacagatgagaccaacttgccagcagatattcctagttatttgtcatctcagggaacgttagctgacaggcaggatgggtacgtgtcttcagaaagtggaagccaccaccagtttgtcacatcttcaggtgctggatttttcttaccacaacatgacagtagtgggacctgccatattgacaatagcagtgaagctgatgtggaagctgccacagatctgttcctttgtccgtttttgggatccacaggccctatgtatttgaagggaaatgtgtatggctcagatccttttgaaacatatcatacaggttgcagtcctgacccaagaacagttttaatggaccactatgagcccagttacataaagaaaaaggagtgctacccatgttctcatccttcagaagaatcctgcgaacggagcttcagtaatatatcgtggccttcacatgtgaggaagctacttaacactagttactctcacaatgaaggacctggaatgaaaaatctgtgtctaaacaagtcctctttagattttagtgcaaatccagagccagcgtcggttgcctcgagtaattctttcatgggtacctttggaaaagctctcaggagacctcacctagatgcctattcaagctttggacagccatcagattgtcagccaagagccttttatttgaaagctcattcttccccagacttggactctgggtcagaggaagatgggaaagaaaggacagattttcaggaagaaaatcacatttgtacctttaaacagactttagaaaactacaggactccaaattttcagtcttatgacttggacacatagactgaatgagaccaaaggaaaagcttaacatactacctcaagtgaacttttatttaaaagagagagaatcttatgttttttaaatggagttatgaattttaaaaggataaaaatgctttatttatacagatgaaccaaaattacaaaaagttatgaaaatttttatactgggaatgatgctcatataagaatacctttttaaactattttttaactttgttttatgcaaaaaagtatcttacgtaaattaatgatataaatcatgattattttatgtatttttataatgccagatttctttttatggaaaatgagttactaaagcattttaaataatacctgccttgtaccattttttaaatagaagttacttcattatattttgcacattatatttaataaaatgtgtcaatttgaaaaaaaaaaaaaaaaaaaaaaaaaaaaaaa

SEQ ID NO: 121 - DNA, 1600 bp, Homo sapiens
acttcctgagccgggctggctgggtgggaacaggctccttgccgcctccccagcgctggccactaccacactgccgcccgcctgggcctcctttcaacctcgtggtggagccctgcggtttcccagcggagccgggcccggggctgctccctcgcgggcgaggctcacctgtcccggcccggccccctcccgcgccccaggtggttcagggcggggaggagccgcgccccgccccgcgcggtagcagccaacgccggccccaggcgggtgcgctgggagcctgggccgggagccgggtgagggcgccgagaggctcggtgggcgcgggcggcgagatatgccacacttctgcctgctgttggcaaccctcctggactaggctgctcttgttaatcacatggatgttgctgattactctgagtgcaaaccttttcactgttccagagaggagcctgacaaccacattctccttctcaagatataagagttcggaccgcccagcacacaaggtcagcatgctgctcctctgtcacgctctcgctatagctgttgtccagatcgttatcttctcagaaagctgggcatttgccaagaacatcaacttctataatgtgaggcctcctctcgaccctacaccatttccaaatagcttcaagtgctttacttgtgaaaacgcaggggataattataactgcaatcgatgggcagaagacaaatggtgtccacaaaatacacagtactgtttgacagttcatcacttcaccagccacggaagaagcacatccatcaccaaaaagtgtgcctccagaagtgaatgtcattttgtcggttgccaccacagccgagattctgaacatacggagtgtaggtcttgctgtgaaggaatgatctgcaatgtagaattacccaccaatcacactaatgcagtgtttgccgtaatgcacgctcagagaacatctggcagcagtgcccccacactctacctaccagtgcttgcctgggtctttgtgcttccattgctgtgatgccaccattcctaggagaggcagagaccagcctctaaagcacaagccaaaaactgtgtgaacggtgaactttggagtgaagatcaatcttgcacttggtgaagagtgcacattggacctcaaggcgaaagccagtggtttgcttggataaaatgttcccgcatgaggccacaggactgaggatgggaatttggcagggcctgagaagatggtctgacttccaggcttcctggtcaaagagagctacgtttgggcagttctgcagagaggatcctggcaactagtcccacctgactaggcctttagctgaaaggatttcttgacctccttgactgcctcagaggctgccaggtcaaaccctcttgtttatgtgattagctcagagcatctctatgaaatctaacccttcccctcatgagaaagcagttttccccaccaacagcatagtcaatgagaaaggcgactgtacgaagaaaacttccagtggaactaatatgaaatctatttgcaaattatggggggaaataaagcttttaaattatacaatgaaaaaaaaaaaaaaaaaaaaaaaaaaa

SEQ ID NO: 122 - DNA, 2774 bp, Homo sapiens
agttctcaagtcagatctcttctcataagggcactgtgtggagcttctgagatctgtggaggtttttctctgcaaatgcaggaagaaatcaggtggatggatgcataattatggccctgctcctggtctctttgctggcattcctgagcttgggctcaggatgtcatcatcggatctgtcactgctctaacagggtttttctctgccaagagagcaaggtgacagagattccttctgacctcccgaggaatgccattgaactgaggtttgtcctcaccaagcttcgagtcatccaaaaaggtgcattttcaggatttggggacctggagaaaatagagatctctcagaatgatgtcttggaggtgatagaggcagatgtgttctccaaccttcccaaattacatgaaattagaattgaaaaggccaacaacctgctctacatcaaccctgaggccttccagaaccttcccaaccttcaatatctgttaatatccaacacaggtattaagcaccttccagatgttcacaagattcattctctccaaaaagttttacttgacattcaagataacataaacatccacacaattgaaagaaattctttcgtggggctgagctttgaaagtgtgattctatggctgaataagaatgggattcaagaaatacacaactgtgcattcaatggaacccaactagatgagctgaatctaagcgataataataatttagaagaattgcctaatgatgttttccacggagcctctggaccagtcattctagatatttcaagaacaaggatccattccctgcctagctatggcttagaaaatcttaagaagctgagggccaggtcgacttacaacttaaaaaagctgcctactctggaaaagcttgtcgccctcatggaagccagcctcacctatcccagccattgctgtgcctttgcaaactggagacggcaaatctctgagcttcatccaatttgcaacaaatctattttaaggcaagaagttgattatatgactcaggctaggggtcagagatcctctctggcagaagacaatgagtccagctacagcagaggatttgacatgacgtacactgagtttgactatgacttatgcaatgaagtggttgacgtgacctgctcccctaagccagatgcattcaacccatgtgaagatatcatggggtacaacatcctcagagtcctgatatggtttatcagcatcctggccatcactgggaacatcatagtgctagtgatcctaactaccagccaatataaactcacagtccccaggttccttatgtgcaacctggcctttgctgatctctgcattggaatctacctgctgctcattgcatcagttgatatccataccaagagccaatatcacaactatgccattgactggcaaactggggcaggctgtgatgctgctggctttttcactgtctttgccagtgagctgtcagtctacactctgacagctatcaccttggaaagatggcataccatcacgcatgccatgcagctggactgcaaggtgcagctccgccatgctgccagtgtcatggtgatgggctggatttttgcttttgcagctgccctctttcccatctttggcatcagcagctacatgaaggtgagcatctgcctgcccatggatattgacagccctttgtcacagctgtatgtcatgtccctccttgtgctcaatgtcctggcctttgtggtcatctgtggctgctatatccacatctacctcacagtgcggaaccccaacatcgtgtcctcctctagtgacaccaggatcgccaagcgcatggccatgctcatcttcactgacttcctctgcatggcacccatttctttctttgccatttctgcctccctcaaggtgcccctcatcactgtgtccaaagcaaagattctgctggttctgtttcaccccatcaactcctgtgccaaccccttcctctatgccatctttaccaaaaactttcgcagagatttcttcattctgctgagcaagtgtggctgctatgaaatgcaagcccaaatttataggacagaaacttcatccactgtccacaacacccatccaaggaatggccactgctcttcagctcccagagtcaccagtggttccacttacatacttgtccctctaagtcatttagcccaaaactaaaacacaatgtgaaaatgtatctgagtattgaatgataattcagtcttgcctttgaagggtatgtcacaaagagctgacagtgcttctacacatttcatctaatttaatattcctggcatacctttaaggtaaattggtcaggaactattaattccatgtgatacattaggaagctgaattattagtaacaacaataataattaaagaatgcaatactgtattacatattttatccttatatatgttatttttgcacgttatgttcaaagtgcttttgttcagatatctcaagtgatccctgttaaataagcaggacagggattattcttggagttttacaaatgaggaaaccacgactcaaagagttaagtgacttgttcaaaattgtttagtttgtaagaggcagagccaggattaggtattccgactcccagagaatttcccagagaagcaccatggtattcattcattcattcattcaacaaatattaattgaacacccatctgaagcctttgtaatgcgtcagtgtggataggctgaaatacatttcccagatttcccttcctcatgtgttt

SEQ ID NO: 123 - DNA, 10258 bp, Homo sapiens
agtcccggctggagcgactcggccgtggcggtggccgttaccgttgcctctgggaggctctggcggcggcggcggcccgcggggttcgcggagcgcagcgggccgcccttcgcccgtggccgcctcaagcagcctcgcgccgacacaggggaggcgagacggcggctgcggaggcggcggcgcattgtgcccggccccctccttggcggctcctgcccccgggcggctgtgggatctgggcagccccggggcggcggccgaggctacagagccggcggcaggggatggcaagatagcggcgcgggagcgtaccgactgactgcattgcacagatgatggatatttacgtatgtttgaaacgaccatcctggatggtggacaataaaagaatgaggactgcttcaaatttccagtggctgttatcaacatttattcttctatatctaatgaatcaagtaaatagccagaaaaagggggctcctcatgatttgaagtgtgtaactaacaatttgcaagtgtggaactgttcttggaaagcaccctctggaacaggccgtggtactgattatgaagtttgcattgaaaacaggtcccgttcttgttatcagttggagaaaaccagtattaaaattccagctctttcacatggtgattatgaaataacaataaattctctacatgattttggaagttctacaagtaaattcacactaaatgaacaaaacgtttccttaattccagatactccagagatcttgaatttgtctgctgatttctcaacctctacattatacctaaagtggaacgacaggggttcagtttttccacaccgctcaaatgttatctgggaaattaaagttctacgtaaagagagtatggagctcgtaaaattagtgacccacaacacaactctgaatggcaaagatacacttcatcactggagttgggcctcagatatgcccttggaatgtgccattcattttgtggaaattagatgctacattgacaatcttcatttttctggtctcgaagagtggagtgactggagccctgtgaagaacatttcttggatacctgattctcagactaaggtttttcctcaagataaagtgatacttgtaggctcagacataacattttgttgtgtgagtcaagaaaaagtgttatcagcactgattggccatacaaactgccccttgatccatcttgatggggaaaatgttgcaatcaagattcgtaatatttctgtttctgcaagtagtggaacaaatgtagtttttacaaccgaagataacatatttggaaccgttatttttgctggatatccaccagatactcctcaacaactgaattgtgagacacatgatttaaaagaaattatatgtagttggaatccaggaagggtgacagcgttggtgggcccacgtgctacaagctacactttagttgaaagtttttcaggaaaatatgttagacttaaaagagctgaagcacctacaaacgaaagctatcaattattatttcaaatgcttccaaatcaagaaatatataattttactttgaatgctcacaatccgctgggtcgatcacaatcaacaattttagttaatataactgaaaaagtttatccccatactcctacttcattcaaagtgaaggatattaattcaacagctgttaaactttcttggcatttaccaggcaactttgcaaagattaattttttatgtgaaattgaaattaagaaatctaattcagtacaagagcagcggaatgtcacaatcaaaggagtagaaaattcaagttatcttgttgctctggacaagttaaatccatacactctatatacttttcggattcgttgttctactgaaactttctggaaatggagcaaatggagcaataaaaaacaacatttaacaacagaagccagtccttcaaaggggcctgatacttggagagagtggagttctgatggaaaaaatttaataatctattggaagcctttacccattaatgaagctaatggaaaaatactttcctacaatgtatcgtgttcatcagatgaggaaacacagtccctttctgaaatccctgatcctcagcacaaagcagagatacgacttgataagaatgactacatcatcagcgtagtggctaaaaattctgtgggctcatcaccaccttccaaaatagcgagtatggaaattccaaatgatgatctcaaaatagaacaagttgttgggatgggaaaggggattctcctcacctggcattacgaccccaacatgacttgcgactacgtcattaagtggtgtaactcgtctcggtcggaaccatgccttatggactggagaaaagttccctcaaacagcactgaaactgtaatagaatctgatgagtttcgaccaggtataagatataattttttcctgtatggatgcagaaatcaaggatatcaattattacgctccatgattggatatatagaagaattggctcccattgttgcaccaaattttactgttgaggatacttctgcagattcgatattagtaaaatgggaagacattcctgtggaagaacttagaggctttttaagaggatatttgttttactttggaaaaggagaaagagacacatctaagatgagggttttagaatcaggtcgttctgacataaaagttaagaatattactgacatatcccagaagacactgagaattgctgatcttcaaggtaaaacaagttaccacctggtcttgcgagcctatacagatggtggagtgggcccggagaagagtatgtatgtggtgacaaaggaaaattctgtgggattaattattgccattctcatcccagtggcagtggctgtcattgttggagtggtgacaagtatcctttgctatcggaaacgagaatggattaaagaaaccttctaccctgatattccaaatccagaaaactgtaaagcattacagtttcaaaagagtgtctgtgagggaagcagtgctcttaaaacattggaaatgaatccttgtaccccaaataatgttgaggttctggaaactcgatcagcatttcctaaaatagaagatacagaaataatttccccagtagctgagcgtcctgaagatcgctctgatgcagagcctgaaaaccatgtggttgtgtcctattgtccacccatcattgaggaagaaataccaaacccagccgcagatgaagctggagggactgcacaggttatttacattgatgttcagtcgatgtatcagcctcaagcaaaaccagaagaagaacaagaaaatgaccctgtaggaggggcaggctataagccacagatgcacctccccattaattctactgtggaagatatagctgcagaagaggacttagataaaactgcgggttacagacctcaggccaatgtaaatacatggaatttagtgtctccagactctcctagatccatagacagcaacagtgagattgtctcatttggaagtccatgctccattaattcccgacaatttttgattcctcctaaagatgaagactctcctaaatctaatggaggagggtggtcctttacaaacttttttcagaacaaaccaaacgattaacagtgtcaccgtgtcacttcagtcagccatctcaataagctcttactgctagtgttgctacatcagcactgggcattcttggagggatcctgtgaagtattgttaggaggtgaacttcactacatgttaagttacactgaaagtgttcatgtgcttttaatgtagtctaaaagccaaagtatagtgactcagaatcctcaatccacaaaactcaagattgggagctctttgtgatcaagccaaagaattctcatgtactctaccttcaagaagcatttcaaggctaatacctacttgtacgtacatgtaaaacaaatcccgccgcaactgttttctgttctgttgtttgtggttttctcatgtgtatacttggtggaattgtaagtggatttgcaggccagggagaaaatgtccaagtaacaggtgaagtttatttgcctgacgtttactcctttctagatgaaaaccaagcacagattttaaaacttctaagattattctcctctatccacagcattcacaaaaattaatataatttttaatgtagtgacagcgatttagtgttttgtttgataaagtatgcttatttctgtgcctactgtataatggttatcaaacagttgtctcaggggtacaaactttgaaaacaagtgtgacactgaccagcccaaatcataatcatgttttcttgctgtgataggttttgcaagccttttcattattttttagcttttatgcttgcttccattatttcagttggttgccctaatatttaaaatttacacttctaagactagagacccacattttttaaaaatcattttattttgtgatacagtgacagctttatatgagcaaattcaatattattcataagcatgtaattccagtgacttactatgtgagatgactactaagcaatatctagcagcgttagctgtccatatagttctgattggatttcgttcctcctgaggagaccatgccgttgagcttggctacccaggcagtggtgatctttgacaccttctggtggatgttcctcccactcatgagtcttttcatcatgccacattatctgatccagtcctcacatttttaaatataaaactaaagagagaatgcttcttacaggaacagttacccaagggctgtttcttagtaactgtcataaactgatctgaatccatgggcatacctgtgttgcaggtgcagcaattgcttggtgagctgtgcagaattgattgccttcagcacagcatcctctgcccacccttgtttctcataagcgatgtctggagtgattgtggttcttggaaaagcagaaggaaaaactaaaaagtgtatcttgtattttccctgccctcaggttgcctatgtattttaccttttcatatttaaggcaaaagtacttgaaaattttaagtgtccgaataagatatgtcttttttgtttgttttttttggttgtttgtttgttttttatcatctgagattctgtaatgtatttgcaaataatggatcaattaattttttttgaagctcatattgtatctttttaaaaaccatgttgtggaaaaaagccagagtgacaagtgacaaaatctatttaggttctctgtgtatgaatcctgattttaactgctaggattcagctaaatttctgagctttatgatctgtggaaatttggaatgaaatgcaattcattttgtacatacatagtatattaaaactatataatagttcatagaaatgttcagtaatgaaaaatatatccaatcagagccatccctaaagagtgttctcttgtcttcctttgtatcctctttggctccttcccttagcttccaccccagacatcagacctggggctgccttctctccctgccaaagcttgctgttagcattgtctgcttgccctcaactcctgccttgttccctgttgaaatgtatcaatcccgtactttatctctccaggacaaggataagtgtggctacagtaaaagtttattgctctaaacggcgctaacctgagataatgagaaaaggccagaagagattgtttgatctctgtctgtcaatatatatgcatttcaactgtgaccatctggatccagggccctttctaacctatataacgactcatttgtttggttaatgatgaatatcactggggctcttaagtcctttcgttctatccaagacttcattgtttttttctgtatgaaaaaagtgcagaatatcactcacctttcccctacttttggatcccctacacgaggatcactagcttaatgagaagcagagtaacgctattaagtctgggcaagctccttataagttgctgtgtgcttaaaagaatgtgatttatgtctggggccaaagcagttttccttcttttccctcattgaattcaagacagctagacccttgtgtagatcccaggatattacctctactccccccaacctgtgtgtgtagggagagtaacaacacgggaagaggggagggaagttggaaggagattggtcacatgttcagttgtctgagatactggtaaatgtgcgctgtttgtcaatgaaggttgcatgcctgcatttacaaggtggtctcatactgattgtgctctgtccagttagattcgtggcttctcccttggaagctacaattaaggactagttagaagcagaggctagatgtgttctctccagcccttactaactgggaaaataattgagaaatccctcttttcctcagtgaaagcccagtcattggttagaaaaatctaattgtcaaactagcattatgttccatcatatctgtgggatagtaattcatgtaagacacatttttacctctcttacaagtcaattcacttacaagccagtttcaaatcaagcttcccttgcgaggaatggagatcattatggggcttattatgactacatttcttttatgagtgaccattttaaataattaatattttatttaatattaaattattaaagacttagctagacttttaacattagatgaaccttgtgaatcatatattgcatagattagcacatgtatgcaatctaggtcatcaatttgttgaatttatacagccctagatttgagattgtggccctgagtatctggatagttgagttgtgtgtttatgtgcttatatgatagaggtgctttgttcctgcagcttagaaacagaagcagccattcactgagaagcttaagagaggaagtatcaacctcattttccaaaccagcattactttcaccgctcgtggatctgaaagattacatttagaacatttagtactattacactctcagaaactgtggtaaaaagtcacattttcaaaacttcatgcatattgtattcttgttggaaataagtcctatagtttcttaattgtcttcatgccgtccatatttaacaaacattgcaagtcctttttatatttgggtaattatttgtaatttagtgaaggagactaggggatgttttcttccaaagggaatttaaaatcaattttatggtattttgaaagtaaaatactccttaacgtgtcaatatttttaaaatgttatctcgaagttttctattgctcaggtatataatctaataaaattttttgtttgctctaaggttatttttgctattctctattttgaattatgttaaaatttgtgtgcattttatgaaatgccttttttcttattttgaaagtgtaaaattgggcatctcagagtaaaatgtgggattattagctacaaagactaggcacatcgtgaaagctcagtaactaattttcttgactgagtcctatcccagagtgtcacagattcaacagaattttcctgaagggtgatacacaccaaaatctagcttgtgtggatctgagactattgactcaaagattcaaatctacttcggaagtgactccacggtttgagtgaaaactgaggaaggactcatgcctgtatatcactagatatcttatttctccataattttaagtgttcataatttcttcttctttgatgggtgtgcaactggggcatgtttgtaccagccagcatgtgttctgcccaacagtgtgtccgtgtgtgaggttaactgattcagaactcattctcttgataaactatttcttgaaagcatttattttaagtctttatttcctgctgaaatgaagtttcatgctgtcatgcccatcttatttattctagaagaaaattttcatagaagaaaatgatttatggccaaagttacagaacattcatcttttagacttagccttagaatatcattggaaattacttggcttgaatttggttcgtttttatctttatggattatgtaccagggctattaataatacttaaaccccttattttgctatggtggttagatttttttattccttttcaattagtgctattaattattacatggtcgtattcatgcttattacagatgaactatttttagtgccagtgtaaaggattaagaataacattcaattagttggctatttcaggctttattgtacatggtaatgtttcagggagtgtgatttggtctagaatatatccagatccttgtaattatgatattgggttatgacaggattctattatttttagctatgaatggtgcttatttttccctatattaggaatgttaatatttggattatcagagtccatgttataaacagaatttacctatgcaagacaaattctaactgtgcaacattttcatgagaattaaaagttgtgtgttaaggggaaaaccctctgaatgtttttatgtgtaagtgcctaaagaaccgtagaaacagtacatcaaaagctcttataaaagaaaaactgattgaacattagccagaaacaaaatatgatttacatttttttttttggttgctgggactgaataccctaaaaactaagagatgtgagtggggaaaatgtctaattgataagaaagttgatttatattatatttacatgcatcttctaagattgcctttacagtagccaatcagaactttaaaaaaaaaaaagctaacaacatagatcctatgtgttgcccttaagactaaaatactttgcacacgtgattgaatggctcacttaagttgttgaatttccttatacatttaaagtgtacttccgttaagaattattccattttaaatgggtaactttcagcttccgaactattttcctaaacattccagttgtgtattataaaagatcaaaatatctctaggtggtagtacaattttcatttataacgtggaaaagttaactgttaggtttaacattagtattagtgtttttgcaattgctcatagaaaagaacactgaataatggttttcatacaatttttgtaaaacattcttctcccagtttgattccaaatgcttttccccaaattgtctaatatatcataagctagtgtttccttgtatttaatttttccttccaacacaatatttaggaaaaatatgaataacattgtgagtagcgggagacaacacgaaaaagaaacctttcattgttgtggaggggtaggtgttatgtgattgatgcccttcctggcgtttgttttatcctgttattttctcaaaaaagagcacggctttttcttaaatacatttaaattcagaattgcttgcaaaagattggcctggatagatagacatcctagatttaagatagtaccatcttaaaagtatgttgaaaggtaaaataaatcatttcaaaatacttaactttcctaataaggatgttaggttttcttctctttcattagctggccataagtcaaggtccttataacactaggaaattacctttttttactttcaaaattgcattatagtgaattactgtttacaaaatacacatactgtgaacagatataagtttctgtcttttataaggtttgtagaatgaatgtttttttaaagtgagtattatatgttaaatattttaagttttttataaatactagtaactgtttactaatttttgtttggtcaaatgcttgtaaatgtagctgaaagaagatagggagaaactgcggatcccaaactgttccctttttcatttcttgaaatgttaccactacagacatttttttaaggtgaataaacagttgtgatgtgctgtacctaaaatcatgtttaatcgtataaggaaacatttcaatacacttatacaggaagaaaactatagatgaagtacatgtgtgtgattcagtctgattcacagaattctgagagtaatatggaataaaacaactccacttagatgataactgaagcatttcctgccttgtgaaaatttggattttaaattgctgttagaatgggaaatttggacactttatatcattgtataatttcagaatttagtttctgtatcttttggaaaacatgattatagcaaaaacatagaaaataatctattactaaaacaccataaatgtaaaactagtatgcttggctgttaactctaaagatgttacttatgtctgtttttaaaacatgcatgtatttaacaattttatcatagtattgtcatggaaaaaataaatatattttcttacatctta

SEQ ID NO: 124 - DNA, 1992 bp, Homo sapiens
agcaaatactcactaccacaaataagaacatttccaaatctgatgttctgaggatttttagagcttatagtagcaaaaagaaaagggaaattctctctgagatgtccttttttgtaggcctaatgacaaaaggttgaagataaagttctagtactcatttaagtgtaatattgaaaattgatattaccaaatctggaacaaccaatttaaaataaggaaagaaagacactgtgttttctaggttaaaaatgcccagctggcaggggccaaaggagtcattctctactcagaccctgctgactactttgctcctggggtgaagtcctatccagacggttggaatcttcctggaggtggtgtccagcgtggaaatatcctaaatctgaatggtgcaggagaccctctcacaccaggttacccagcaaatgaatacgcttataggcatggaattgcagaggctgttggtcttccaagtattcctgttcatccagttggatactatgatgcacagaagctcctagaaaaaatgggtggctcagcaccaccagatagcagctggagaggaagtctcaaagtgtcctacaatgttggacctggctttactggaaacttttctacacaaaaagtcaagatgcacatccactctaccaatgaagtgacgagaatttacaatgtgataggtactctcagaggagcagtggaaccagacagatatgtcattctgggaggtcaccgggactcatgggtgtttggtggtattgaccctcagagtggagcagctgttgttcatgaaactgtgaggagctttggaacactgaaaaaggaagggtggagacctagaagaacaattttgtttgcaagctgggatgcagaagaatttggtcttcttggttctactgagtgggcagaggataattcaagactccttcaagagcgtggcgtggcttatattaatgctgactcatctatagaaggaaactacactctgagagttgattgtacaccactgatgtacagcttggtatacaacctaacaaaagagctgaaaagccctgatgaaggctttgaaggcaaatctctttatgaaagttggactaaaaaaagtccttccccagagttcagtggcatgcccaggataagcaaattgggatctggaaatgattttgaggtgttcttccaacgacttggaattgcttcaggcagagcacggtatactaaaaattgggaaacaaacaaattcagcggctatccactgtatcacagtgtctatgaaacatatgagttggtggaaaagttttatgatccaatgtttaaatatcacctcactgtggcccaggttcgaggagggatggtgtttgagctagccaattccatagtgctcccttttgattgtcgagattatgctgtagttttaagaaagtatgctgacaaaatctacaatatttctatgaaacatccacaggaaatgaagacatacagtttatcatttgattcacttttttctgcagtaaaaaattttacagaaattgcttccaagttcagcgagagactccaggactttgacaaaagcaacccaatattgttaagaatgatgaatgatcaactcatgtttctggaaagagcatttattgatccattagggttaccagacagacctttttataggcatgtcatctatgctccaagcagccacaacaagtatgcaggggagtcattcccaggaatttatgatgctctgtttgatattgaaagcaaagtggacccttccaaggcctggggagatgtgaagagacagatttctgttgcagccttcacagtgcaggcagctgcagagactttgagtgaagtagcctaagaggattctttagagactctgtattgaatttgtgtggtatgtcactcaaagaataataatgggtatattgataaattttaaaattggtatatttgaaataaagttgaatattatatataaaaaaaaaaaaaaaaaaa

SEQ ID NO: 125 - DNA, 1912 bp, Homo sapiens
ttttttttcttccctctagtgggcggggcagaggagttagccaagatgtgactttgaaaccctcagcgtctcagtgcccttttgttctaaacaaagaattttgtaattggttctaccaaagaaggatataatgaagtcactatgggaaaagatggggaggagagttgtaggattctacattaattctcttgtgcccttagcccactacttcagaatttcctgaagaaagcaagcctgaattggttttttaaattgctttaaaaattttttttaactgggttaatgcttgctgaattggaagtgaatgtccattcctttgcctcttttgcagatatacacttcagataactacaccgaggaaatgggctcaggggactatgactccatgaaggaaccctgtttccgtgaagaaaatgctaatttcaataaaatcttcctgcccaccatctactccatcatcttcttaactggcattgtgggcaatggattggtcatcctggtcatgggttaccagaagaaactgagaagcatgacggacaagtacaggctgcacctgtcagtggccgacctcctctttgtcatcacgcttcccttctgggcagttgatgccgtggcaaactggtactttgggaacttcctatgcaaggcagtccatgtcatctacacagtcaacctctacagcagtgtcctcatcctggccttcatcagtctggaccgctacctggccatcgtccacgccaccaacagtcagaggccaaggaagctgttggctgaaaaggtggtctatgttggcgtctggatccctgccctcctgctgactattcccgacttcatctttgccaacgtcagtgaggcagatgacagatatatctgtgaccgcttctaccccaatgacttgtgggtggttgtgttccagtttcagcacatcatggttggccttatcctgcctggtattgtcatcctgtcctgctattgcattatcatctccaagctgtcacactccaagggccaccagaagcgcaaggccctcaagaccacagtcatcctcatcctggctttcttcgcctgttggctgccttactacattgggatcagcatcgactccttcatcctcctggaaatcatcaagcaagggtgtgagtttgagaacactgtgcacaagtggatttccatcaccgaggccctagctttcttccactgttgtctgaaccccatcctctatgctttccttggagccaaatttaaaacctctgcccagcacgcactcacctctgtgagcagagggtccagcctcaagatcctctccaaaggaaagcgaggtggacattcatctgtttccactgagtctgagtcttcaagttttcactccagctaacacagatgtaaaagacttttttttatacgataaataacttttttttaagttacacatttttcagatataaaagactgaccaatattgtacagtttttattgcttgttggatttttgtcttgtgtttctttagtttttgtgaagtttaattgacttatttatataaattttttttgtttcatattgatgtgtgtctaggcaggacctgtggccaagttcttagttgctgtatgtctcgtggtaggactgtagaaaagggaactgaacattccagagcgtgtagtgaatcacgtaaagctagaaatgatccccagctgtttatgcatagataatctctccattcccgtggaacgtttttcctgttcttaagacgtgattttgctgtagaagatggcacttataaccaaagcccaaagtggtatagaaatgctggtttttcagttttcaggagtgggttgatttcagcacctacagtgtacagtcttgtattaagttgttaataaaagtacatgttaaacttaaaaaaaaaaaaaaaaaa

SEQ ID NO: 126 - DNA, 4267 bp, Homo sapiens
attcgcctctgggaggtttaggaagcggctccgggtcggtggccccaggacagggaagagcgggcgctatggggagccggacgccagagtcccctctccacgccgtgcagctgcgctggggcccccggcgccgacccccgctgctgccgctgctgttgctgctgctgccgccgccacccagggtcgggggcttcaacttagacgcggaggccccagcagtactctcggggcccccgggctccttcttcggattctcagtggagttttaccggccgggaacagacggggtcagtgtgctggtgggagcacccaaggctaataccagccagccaggagtgctgcagggtggtgctgtctacctctgtccttggggtgccagccccacacagtgcacccccattgaatttgacagcaaaggctctcggctcctggagtcctcactgtccagctcagagggagaggagcctgtggagtacaagtccttgcagtggttcggggcaacagttcgagcccatggctcctccatcttggcatgcgctccactgtacagctggcgcacagagaaggagccactgagcgaccccgtgggcacctgctacctctccacagataacttcacccgaattctggagtatgcaccctgccgctcagatttcagctgggcagcaggacagggttactgccaaggaggcttcagtgccgagttcaccaagactggccgtgtggttttaggtggaccaggaagctatttctggcaaggccagatcctgtctgccactcaggagcagattgcagaatcttattaccccgagtacctgatcaacctggttcaggggcagctgcagactcgccaggccagttccatctatgatgacagctacctaggatactctgtggctgttggtgaattcagtggtgatgacacagaagactttgttgctggtgtgcccaaagggaacctcacttacggctatgtcaccatccttaatggctcagacattcgatccctctacaacttctcaggggaacagatggcctcctactttggctatgcagtggccgccacagacgtcaatggggacgggctggatgacttgctggtgggggcacccctgctcatggatcggacccctgacgggcggcctcaggaggtgggcagggtctacgtctacctgcagcacccagccggcatagagcccacgcccacccttaccctcactggccatgatgagtttggccgatttggcagctccttgacccccctgggggacctggaccaggatggctacaatgatgtggccatcggggctccctttggtggggagacccagcagggagtagtgtttgtatttcctgggggcccaggagggctgggctctaagccttcccaggttctgcagcccctgtgggcagccagccacaccccagacttctttggctctgcccttcgaggaggccgagacctggatggcaatggatatcctgatctgattgtggggtcctttggtgtggacaaggctgtggtatacaggggccgccccatcgtgtccgctagtgcctccctcaccatcttccccgccatgttcaacccagaggagcggagctgcagcttagaggggaaccctgtggcctgcatcaaccttagcttctgcctcaatgcttctggaaaacacgttgctgactccattggtttcacagtggaacttcagctggactggcagaagcagaagggaggggtacggcgggcactgttcctggcctccaggcaggcaaccctgacccagaccctgctcatccagaatggggctcgagaggattgcagagagatgaagatctacctcaggaacgagtcagaatttcgagacaaactctcgccgattcacatcgctctcaacttctccttggacccccaagccccagtggacagccacggcctcaggccagccctacattatcagagcaagagccggatagaggacaaggctcagatcttgctggactgtggagaagacaacatctgtgtgcctgacctgcagctggaagtgtttggggagcagaaccatgtgtacctgggtgacaagaatgccctgaacctcactttccatgcccagaatgtgggtgagggtggcgcctatgaggctgagcttcgggtcaccgcccctccagaggctgagtactcaggactcgtcagacacccagggaacttctccagcctgagctgtgactactttgccgtgaaccagagccgcctgctggtgtgtgacctgggcaaccccatgaaggcaggagccagtctgtggggtggccttcggtttacagtccctcatctccgggacactaagaaaaccatccagtttgacttccagatcctcagcaagaatctcaacaactcgcaaagcgacgtggtttcctttcggctctccgtggaggctcaggcccaggtcaccctgaacggtgtctccaagcctgaggcagtgctattcccagtaagcgactggcatccccgagaccagcctcagaaggaggaggacctgggacctgctgtccaccatgtctatgagctcatcaaccaaggccccagctccattagccagggtgtgctggaactcagctgtccccaggctctggaaggtcagcagctcctatatgtgaccagagttacgggactcaactgcaccaccaatcaccccattaacccaaagggcctggagttggatcccgagggttccctgcaccaccagcaaaaacgggaagctccaagccgcagctctgcttcctcgggacctcagatcctgaaatgcccggaggctgagtgtttcaggctgcgctgtgagctcgggcccctgcaccaacaagagagccaaagtctgcagttgcatttccgagtctgggccaagactttcttgcagcgggagcaccagccatttagcctgcagtgtgaggctgtgtacaaagccctgaagatgccctaccgaatcctgcctcggcagctgccccaaaaagagcgtcaggtggccacagctgtgcaatggaccaaggcagaaggcagctatggcgtcccactgtggatcatcatcctagccatcctgtttggcctcctgctcctaggtctactcatctacatcctctacaagcttggattcttcaaacgctccctcccatatggcaccgccatggaaaaagctcagctcaagcctccagccacctctgatgcctgagtcctcccaatttcagactcccattcctgaagaaccagtccccccaccctcattctactgaaaaggaggggtctgggtacttcttgaaggtgctgacggccagggagaagctcctctccccagcccagagacatacttgaagggccagagccaggggggtgaggagctggggatccctcccccccatgcactgtgaaggacccttgtttacacataccctcttcatggatgggggaactcagatccagggacagaggccccagcctccctgaagcctttgcattttggagagtttcctgaaacaacttggaaagataactaggaaatccattcacagttctttgggccagacatgccacaaggacttcctgtccagctccaacctgcaaagatctgtcctcagccttgccagagatccaaaagaagcccccagctaagaacctggaacttggggagttaagacctggcagctctggacagccccaccctggtgggccaacaaagaacactaactatgcatggtgccccaggaccagctcaggacagatgccacacaaggatagatgctggcccagggcccagagcccagctccaaggggaatcagaactcaaatggggccagatccagcctggggtctggagttgatctggaacccagactcagacattggcacctaatccaggcagatccaggactatatttgggcctgctccagacctgatcctggaggcccagttcaccctgatttaggagaagccaggaatttcccaggaccctgaaggggccatgatggcaacagatctggaacctcagcctggccagacacaggccctccctgttccccagagaaaggggagcccactgtcctgggcctgcagaatttgggttctgcctgccagctgcactgatgctgcccctcatctctctgcccaacccttccctcaccttggcaccagacacccaggacttatttaaactctgttgcaagtgcaataaatctgacccagtgcccccactgaccagaactagaaaaaaaaaaaaaaaaaaa

SEQ ID NO: 127 - DNA, 6945 bp, Homo sapiens
atgagaaattctgaagaacagccaagtggagggaccacggtattgcagcgtttgctacaagagcagcttcgctatggcaatcctagtgagaatcgcagcctgcttgccatacaccagcaagccacagggaatggccctcctttccccagtggcagtgggaacccgggccctcagagtgatgtgttgagtccccaagaccaccaccaacagcttgtggctcatgctgctcgacaagaaccccaggggcaggaaatccagtcagaaaacctcatcatggagaagcagctgtctcctcgaatgcaaaataatgaagaactcccgacctatgaagaagccaaggtccagtcccagtactttcggggccaacagcatgccagtgttggagctgccttctatgtcactggagtcaccaaccagaagatgaggactgagggacgcccatcagttcagcggctcaatcctggaaagatgcaccaagatgagggactcagagaccttaagcaagggcatgtccgttccttgagtgaacgactaatgcagatgtcactggccaccagtggagttaaggcccatccacctgttaccagtgctcccctctccccaccacaacccaatgacctctacaagaatcccacaagttccagtgaattctacaaggcccaagggccacttcctaaccagcatagcctgaagggcatggaacaccgaggccccccaccagaatatcccttcaagggcatgccaccccaatctgtagtgtgcaagccccaagagccagggcacttctatagtgagcatcgcctgaaccagccagggagaacagaggggcaactgatgaggtatcagcatccccctgagtatggagcagccaggccagcgcaggacatctcattgccattgtcagccaggaactcgcagcctcacagccctacttcttctctgacctctggggggtccttgcccttgctacaatctccaccatccactagattgtctcctgcccgacaccccttggtcccaaaccagggagaccattcagctcacctgcctaggccgcagcagcatttccttcctaatcaggctcaccagggggatcattaccgtctctcccaacctggcctgagtcagcagcagcagcaacagcagcagcagcaccatcatcaccatcaccaccaacaacagcagcagcagcagccacagcagcagccaggagaagcctattcagctatgcctcgggctcagccatcctctgcttcttatcagccagtgccagcagacccttttgccattgtttccagagcccagcagatggttgagatcctctcagacgagaaccggaacttgaggcaagagttggaaggatgctatgagaaggtggcaagactgcagaaggtggagacagaaatccagcgcgtctcggaggcatatgagaacctcgtgaagtcatcctccaaaagagaggccctagagaaagccatgagaaacaagctagagggcgagattcggaggatgcatgatttcaacagggatctgagagagcgtctagagactgccaacaagcagcttgcagagaaggaatatgaggggtcagaggacaccagaaaaaccatctcgcagctctttgcaaaaaataaagaaagccagcgtgagaaggagaagctggaagcggagctggccactgcccgttctaccaatgaggaccaaagacgacacatcgaaatccgagatcaggccctgagtaatgcccaggccaaggtggtaaagctggaagaagagctgaaaaagaagcaagtgtacgttgacaaggtggagaagatgcagcaggcccttgtacagctccaggcagcatgtgaaaaacgtgagcagctagagcaccgtctccggacacgactggagagggaactggaatccctgagaatccagcagcgtcagggcaactgtcagcccaccaacgtttcagaatacaatgctgctgcactgatggagctccttcgggagaaagaggagaggattctggctctggaagctgatatgacaaagtgggagcagaaatatttggaggagaatgtgatgagacattttgctctggatgctgctgcaactgtggctgctcagagggacacaacagtcatcagtcactctcctaacaccagctatgacacagctctagaagctcgcatccagaaagaggaggaagaaatcttgatggccaataagcgttgccttgacatggagggcaggattaagaccctccatgcccagattattgagaaggatgccatgatcaaagtactccagcagcgttcccggaaggagccgagcaagacagagcagctgtcgtgcatgcggccagcgaagtctctgatgtccatttccaatgctggatcaggcttgctctcccactcatccaccctgactggctcccccatcatggaagaaaagcgagacgacaagagctggaaggggagcctaggcattctcctgggtggagactaccgtgctgaatatgtcccttccacaccctcgcctgtgccaccctcgactcccctgctctcggctcactccaagacaggcagccgagactgcagtacccaaactgaacgtgggacggaatcgaacaaaactgcagctgttgctcccatctctgttcctgctccagttgctgctgccgccactgctgccgccatcactgccactgctgccaccatcaccaccaccatggtagctgctgctccagttgctgttgctgctgctgctgctccagctgctgctgctgccccgtctccagccactgccgctgctactgctgctgctgtttctccagctgctgctggtcagattccagctgctgcctctgttgcctcagctgctgccgttgctccttctgctgctgctgctgctgctgttcaggttgctccagctgctccggctccagttccagctccggctctggttccggttccagctccagcagcggctcaggcttctgctcctgctcagactcaggcaccaacttcagctccggctgtggctccaactccagctccaactccaactccagctgtggctcaggctgaggttcctgcaagtccagctaccggtcctggaccacatcgtttgtctataccaagtttgacctgcaatccagacaaaacagatgggcctgtgttccactccaatactctggaaagaaaaactcccattcagatcctgggacaagagcctgatgcagagatggtggaatatctcatctaaacggccaaatcaagagctgcagattatcagcaaaaatgcttttaatcattttcccccttttattggttcttgttttgagggtgaggacaagggttgtggggaggggatgttttttaacaggactttttattggaacaatgtactacttgagtaataccatgtgaacaccagtctattttggtatgcttagggagtacctctaaagacagattaatcagaatgtgctctaaagcttattgtttgaatttatacgaatactgggactgttaacaggtggctatacatcgacgttttcaatgtgcttaaatttgtttaaattttccatattctagatcattttttattgaagagcacagtatgtgtggaagacagtgtataacacgtagtttggaagtgggaagctagagagaattgagtgtgtgctgttttgtatagttactatcctgtgcagcagctggagaaagcactcacctcaggcttacaaaagggaatagtttcaggagctatgtaagctggaaaaaaggtagggagttttggggtgcagaagggtactggagctaattttttcttccagtttcccagctaccctgccccagggaattgtgtttgtcttcatttcagtggtgctttggaaatggattcttttggttccctcctggaggttcatacattcatatatatgctctggagtaatttatgcatttggataattaatatattgctttcagatgctgggagagtacattaactgagtgatgcgcaacttcctctctcttagggaattagaccatcagaggccttgatggagagttgcatggggtgctatatgcagacttccatggtttgtgtgtagccatgaacacagcttgcttgcatttagtaagaccaatcagcttagtgtttatttcttctacagcacagattcactggctgggtctccagtctcaaattgccaatcatttgcaaagtgaggaaggatctttgttgacaggttgaatgctttgaatttctggtgactactttgaaataacttgttttgtttgtcaaattctaagcatatgtcttaaaaggcatttttgactatcacctccaagggaatagcttgagaaacccaaagtactatgctgcagtcgggggagaggtggattgcagcagtatcctcaactacctcttctcactgtcagtgacaccatcttggaatacctttgggaagcagcaggaaatgtgcatgtgggtagagatcaaaggaggcaatggctccaagccttgccatagggctgcctccaaggacacagaaggatgccagttgccacaggtccctgccctgtgtcacctgtctgcccttcattaaggtgagaaatctgcagatagcatcattaagatcagttttaaggggtatagggagggtgagggaagtggggggtgttaggtaagggttgggggtagaggttttgggatgtcttagttagaaaccagattaatagaagagtaggcctgatatattacatcatgagccatagtggtgggaaagaactttagcaatatagccctacctcctcattttagtgatgaggaatctgagaactggagaggttcagtgactttttgaaagtcatacaacacagctaaccattatgccaatcaccatgcttattttgggaaactctttatcttttttaaattccattttatgaaaaggcatcttcatggtccagggaatatgtatcttgtaaaatgtacctggttggagtagcttgtccagtcttgacaaactactgaatttctgtcttgcctctccttcagtgccttttaaaaggttttcccttttctgatctgcatttcaacatagagtcacataaatgtccccctgagaaaccaatcccacttctttctaggagattgggtatcttagataatcttttggggttcctctgtgagtataggaatggtatccttcctaattatcttccaaaggaattattttgtgtgtgtgcctgtgtgtgtgtagagacataaaggagggtgatgtgattttcagctagtcctttcacattttcaataatgaggtaatcatgttacatacacattagtcctcagttataaagtgaatctcagatagaaattaaaagtgcagttgtgttaagactctttcatactaccctttagtcataaggagaaaaaaacactcaaatagtagaagcagcaagtagcaaacttcaggagagctactttctatccaaataatttaaaaaacacttttcacctactcctttcatggttataacacattggcagactttttgctggctctgggagccatgattttaatcacattctgcaaggtgacaaatgtcatacattccacattgtgtggtagccatctctttagactcatgtgttttggggaaaggaagaagttcttggctgagtactattttgaactttccagaaccctctcacaccagagacagttcttctctgttcagtttccaatccccgataatttgctaaaataacattgtacatccaagagagggaagaagagtatgtcagtatattatgcagaagatagatacagccttttcagaagatctccactagtttttgttccaaaaattcaagtttatgggagaaatctcaattagccaccttttcacagttgtgtggatataacatttgggggatctttctggactcctacctatctgtgcattttaccggcacctcaggaaaggagggtgaccaggttgtcttagcttgtactgcttggtgatctctgaggaccttctaattcagttgtaccccagtgttccatgtatagaaaaacttcattagaacaaactttacttgatatgaaactcctattaacagtctttttttgaaataaaaagtagcttgagctttcttttaaaatcatgtatcttgattgttgatttaatgaaggatttccttttaatgctgcttttgagcttcaaggtaataggacagcaggaacctaaaatatctgccatcatctgccataggaaagatacccagagacccatcatgttctctttttgttgttacactgttgggtgggtataacaattggaaaatgaacaaactgattgattgtgcaaactactttttatgacaagcctaaaccctcataatgcggcagcttaaagtgtatacatatgcactaactttgatcaattatattctcatatctgttagctacacagtctcctattatctcaattgcttatgtgcatatggaatatgttacttaaaacgtgtgcattcttactgaaaatgttttcaaaggaaggtatcagctgtgggctaattgccaccaatttcagcctgccacgattcttggaaatatgtcttccaagtgccatccatcatcagtaggacaagtgtcgggagtttgtttatttttttccagtagcaacgatgggttacatggagccatgaaacctccttctggcctcccttgtgattaatggcatgtgtttgtaaaatggatagctggggttggcagatggctagagaagaatcgcctttggtttaaaatgtatgtggtcccctaatgattgtgaccccattctgtaatcaactgagctagttccaataaagttaagcaggtttaaatccactttgtgcctatcttttcactgacaataaagttagctattttaaaatgca

SEQ ID NO: 128 - DNA, 1189 bp, Homo sapiens
ggggccgcgcggctgcctgggaggctccgggccagccgcggtccagagcgcgcgaggttcggggagctcggccaggctgctggtacctgcgtccgcccggcggacaggctgctttggtttgtgacctccaggcaggacggccatcctctccagaatgaagatcttcttgccagtgctgctggctgcccttctgggtgtggagcgagccagctcgctgatgtgcttctcctgcttgaaccagaagagcaatctgtactgcctgaagccgaccatctgctccgaccaggacaactactgcgtgactgtgtctgctagtgccggcattgggaatctcgtgacatttggccacagcctgagcaagacctgttccccggcctgccccatcccagaaggcgtcaatgttggtgtggcttccatgggcatcagctgctgccagagctttctgtgcaatttcagtgcggccgatggcgggctgcgggcaagcgtcaccctgctgggtgccgggctgctgctgagcctgctgccggccctgctgcggtttggcccctgaccgcccagaccctgtcccccgatcccccagctcaggaaggaaagcccagccctttctggatcccacagtgtatgggagcccctgactcctcacgtgcctgatctgtgcccttggtcccaggtcaggcccaccccctgcacctccacctgccccagcccctgcctctgccccaagtggggccagctgccctcacttctggggtggatgatgtgaccttccttgggggactgcggaagggacgagggttccctggagtcttacggtccaacatcaggaccaagtcccatggacatgctgacagggtccccagggagaccgtgtcagtagggatgtgtgcctggctgtgtacgtgggtgtgcagtgcacgtgagagcacgtggcggcttctgggggccatgtttggggagggaggtgtgccagcagcctggagagcctcagtccctgtagccccctgccctggcacagctgcatgcacttcaagggcagcctttgggggttggggtttctgccacttccgggtctaggccctgccccaaatccagccagtcctgccccagcccacccccacattggagccctcctgctgctttggtgcctcaaataaatacagatgtcccccagaaaaaaaaaaaaaaaaaa

SEQ ID NO: 129 - DNA, 2290 bp, Homo sapiens
gcggccgcttcccaccgtccctctccccttactggcagagcgcgctgcgggcggactcccgggcccggagcagcccaccggccaccccaccgcccacccggctcccggtgtctcctcccggccgctctacccagcaactttccgtgctttgttccccgactggaaatgctttacggaagcgtcttggacagggtctccgccaggcgacaagagctcggtgctgagatgtgttacgttctcatctccccatcaattatggatggaaacaaataaggaagagtcaattttgctgagccccttctccggcaacgagaggcgttctgcagccgggagggagccgccgctcgcgccggcagccgctggcaggggcatggtgaggaggaaggtagctcagtggcatttctgagcaggggccaccctgacttcaccttggcccaccatgagggtcttcctgctttgtgcctacatactgctgctgatggtttcccagttgagggcagtcagctttcctgaagatgatgaaccccttaatactgtcgactatcactattcaaggcaatatccggtttttagaggacgcccttcaggcaatgaatcgcagcacaggctggactttcagctgatgttgaaaattcgagacacactttatattgctggcagggatcaagtttatacagtaaacttaaatgaaatgcccaaaacagaagtaatacccaacaagaaactgacatggcgatcaagacaacaggatcgagaaaactgtgctatgaaaggcaagcataaagatgaatgccacaactttatcaaagtatttgttccaagaaacgatgagatggtttttgtttgtggtaccaatgcattcaatcccatgtgtagatactacaggttgagtaccttagaatatgatggggaagaaattagtggcctggcaagatgcccatttgatgccagacaaaccaatgttgccctctttgctgatgggaagctgtattctgccacagtggctgacttcttggccagcgatgccgttatttatcgaagcatgggtgatggatctgcccttcgcacaataaaatatgattccaaatggataaaagagccacactttcttcatgccatagaatatggaaactatgtctatttcttctttcgagaaatcgctgtcgaacataataatttaggcaaggctgtgtattcccgcgtggcccgcatatgtaaaaacgacatgggtggttcccagcgggtcctggagaaacactggacttcatttctaaaggctcggctgaactgttctgtccctggagattcgtttttctactttgatgttctgcagtctattacagacataatacaaatcaatggcatccccactgtggtcggggtgtttaccacgcagctcaatagcatccctggttctgctgtctgtgcatttagcatggatgacattgaaaaagtattcaaaggacggtttaaggaacagaaaactccagattctgtttggacagcagttcccgaagacaaagtgccaaagccaaggcctggctgttgtgcaaaacacggccttgccgaagcttataaaacctccatcgatttcccggatgaaactctgtcattcatcaaatctcatcccctgatggactctgccgttccacccattgccgatgagccctggttcacaaagactcgggtcaggtacagactgacggccatctcagtggaccattcagccggaccctaccagaactacacagtcatctttgttggctctgaagctggcatggtacttaaagttctggcaaagaccagtcctttctctttgaacgacagcgtattactggaagagattgaagcctacaaccatgcaaagtaggtatatgttacgagaacgcccttcagcactgctcaaaaattttcggcatgtatttcatctagtcatgtccttttggtcctctaaattagcagtggtttggcataatagtgttttgtgttttttttctcattgaaataaatcttgggtttgtttttttcccgagcctgctagggcgaggggggtgaatggttgatgagtttaaaaataatgcagcccttgtttttcacctgtagaatatgagaacattttaacagcacctctcttatcttgcagatatattccaagatgctacatgcagcagacagctgtgagcttgcatacacacacacacaaatatacatgcacatacatacacagaatgcagtactagttaagtatttccttcctatctttaataagtaagagaatatttagaccatt

SEQ ID NO: 130 - DNA, 3177 bp, Homo sapiens
attaaaaagacggtggaagaggaacaactgacaggctcaagagcaaaaagcgtgggcagttggagaagaagcagccagagtgtgaagaagcccacggaaggaaagtccagggaggaggaaaagaagcagaagttttggcatctgttccctggctgtgccaagatgggcgattggagcttcctgggaaatttcctggaggaagtacacaagcactcgaccgtggtaggcaaggtctggctcactgtcctcttcatattccgtatgctcgtgctgggcacagctgctgagtcttcctggggggatgagcaggctgatttccggtgtgatacgattcagcctggctgccagaatgtctgctacgaccaggctttccccatctcccacattcgctactgggtgctgcagatcatcttcgtctccacgccctctctggtgtacatgggccacgccatgcacactgtgcgcatgcaggagaagcgcaagctacgggaggccgagagggccaaagaggtccggggctctggctcttacgagtacccggtggcagagaaggcagaactgtcctgctgggaggaagggaatggaaggattgccctccagggcactctgctcaacacctatgtgtgcagcatcctgatccgcaccaccatggaggtgggcttcattgtgggccagtacttcatctacggaatcttcctgaccaccctgcatgtctgccgcaggagtccctgtccccacccggtcaactgttacgtatcccggcccacagagaagaatgtcttcattgtctttatgctggctgtggctgcactgtccctcctccttagcctggctgaactctaccacctgggctggaagaagatcagacagcgatttgtcaaaccgcggcagcacatggctaagtgccagctttctggcccctctgtgggcatagtccagagctgcacaccaccccccgactttaatcagtgcctggagaatggccctgggggaaaattcttcaatcccttcagcaataatatggcctcccaacaaaacacagacaacctggtcaccgagcaagtacgaggtcaggagcagactcctggggaaggtttcatccaggttcgttatggccagaagcctgaggtgcccaatggagtctcaccaggtcaccgccttccccatggctatcatagtgacaagcgacgtcttagtaaggccagcagcaaggcaaggtcagatgacctatcagtgtgaccctcctttatgggaggatcaggaccaggtgggaacaaaggaggctcagagaagaaagacgtgtcccttctgaactgatgctttctcactgtcatcactgcttggctcctttgagccccgggtctcaatgacgttgctcattaattctagaaactataaccagggctctgggatagtaagagaggtgacaacccacccagactgcagttccctccccaccctctacccagtatacgaagcctttcagattactcatgaaacagggtagagggaaagaagggaagcatggcaaaagctggcctggaagggatagccagagggatagaatgactctctctctacataccagcagcataccaaatgcgttctctaagttcctacctccttgacctgatcaccctccctcctccaaggaagagctcaaagttcccagccaatagacagcatgaatcaaggaacttgcattatatgtgctcttgaatctgttgtctccatggaccattcctcggagtagtggtgagatggccttgggttgcccttggcttctcctccctctactcagccttaaaaagggcttcttggaactttaccagcagcctcagctttacaaatgccttggtatgtacctctggcaaatgccccaccttggtgatgttgcaacctttccttctgctagggtgtacacctagcctgtgcaggtgtcagccctgctagggagtcactgtacacacaaactctactggaattcctgccaacatctgtcaccctgcagctcctttacagttcaatccaatgatagaaaccatcccttccctttctcccttggctgttcacccagccattccctgaaggccttaccaacaggaatatccaagaagctgttgtcccctctcgaaccctgaccagatcatcagccactgaggccagtggaatttccccaggccttgttaaaacaaagaaagcattgtacctctcagattccccttgtggaaaaaaaaattctgctgtgaagatgaaaataaaaatggagagaaaacactggaaaactattttcccctcctatttacttcctttgctgactgccaacttagtgccaagaggaggtgtgatgacagctatggaggcccccagatctctctctcctggaggctttagcaggggcaaggaaatagtaggggaatctccagctctcttggcagggcctttatttaaagagcgcagagattcctatgtctccctagtgcccctaatgagactgccaagtgggggctgtagaaaagccttgccttccccagggattggcctggtctctgtattcactggatccataatgggttgctgttgttttggatgaaggtaaacgatgcttggaattggaaactgagacttatagagggattattacattattaaaatgcacgtgtgtgtgtgtgtgggtgctgatgggatgggtaaaggcttggggagtcctgaaataaggaaaggaaaccacagagaaacttgtgtcttcctgctctcctctccggctgcctggcagttattaacctaaacagatagccacaagaggttgggacagaggagggtaaaggctcagaaggaggttcaacctctgactcacctgcccatctctgggccctctgctgacacttggatgctattgttgggtggaaagataaatgagagtggagaggtggaggaaagtgactaggatgccatttaggaaggaatgtctgatcatcccgggtccctggaggggacaccttttaatctattgcctagcattaatattttctctccttctatctctgaaatgttttatgaaatgagtgttcttgaattagaaattctgtgggatcaatctttgatggtgagggttttagaaaggaaaaatatagtaaaatgtgtaatttgtcttaataaaatctatctctacatcta

SEQ ID NO: 131 - DNA, 11998 bp, Homo sapiens
gacaggggctctgggcggccggggagcatgcccgcgcggctacgctgaatggcgcctcctctgcgacccctcgcccggctgcgaccgccggggatgctgctccgcgcgctcctgctcctgctgctgctcagtcctttgccaggagtgtggtgctttagcgaactgtcttttgtaaaagaaccacaggatgtaactgtcacaagaaaggacccagtcgttttagattgccaggctcacggagaagttcctattaaggtcacatggttgaaaaatggagcaaaaatgtctgaaaataaacggatcgaggttctttctaacggctctttatacatcagtgaggtggaaggcaggcgaggagagcagtccgatgaaggattttatcagtgcttggcaatgaacaaatatggagccattcttagtcaaaaagctcatcttgccttatcaactatttctgcatttgaagtccagccaatttccactgaggtccacgaaggtggagttgctcgatttgcatgcaagatttcatcccaccctcctgcagtcataacatgggagttcaatcggacaactctacctatgactatggacaggataactgccctaccaacaggagtattgcagatctatgatgtcagccaaagggattctggaaattatcgttgtattgctgccactgtagcccaccgacgtaaaagtatggaggcctcgctaactgtgattccagctaaggagtcaaaatccttccacacaccaacaattatagcaggtccacagaacataacaacatctcttcatcagactgtagttttggaatgcatggccacaggaaatcccaaaccaatcatttcttggagccgccttgatcacaaatccattgatgtctttaatactcgggtacttggaaatggtaatctcatgatatctgatgtcaggctacaacatgctggagtatatgtttgtcgggccactacccctggcacacgcaactttacagttgctatggcaactttaactgtattagctcctccttcatttgttgaatggccagaaagtttaacaaggcctcgagctggcactgctcgatttgtgtgtcaggcagaaggaatcccctctcccaagatgtcatggttgaaaaatggaaggaagatacattcgaatggtagaattaaaatgtacaacagtaaattggtaattaaccagattattcctgaagatgatgctatttatcagtgcatggctgagaatagccaaggatctattttatctagagccagactgactgtagtgatgtcagaagacagacccagtgctccctataatgtacatgctgaaaccatgtcaagctcagccattcttttagcctgggagaggccactttataattcagacaaagtcattgcctattctgtacactacatgaaagcagaaggtttaaataatgaagagtatcaagtagtcatcggaaatgacacaactcattatattattgatgacttagagcctgccagcaattatactttctacattgtagcatatatgccaatgggagccagccagatgtctgaccatgtgacacagaatactctagaggatgttcccctgagacctcctgaaattagtttgacaagtcgaagtcccactgatattctcatctcctggctgccaatcccagccaaatatcggcggggccaagtggtgctgtatcgcttgtctttccgcctaagtactgagaattcaatccaagttctggagctcccggggaccacgcatgagtaccttttggaaggcctgaaacctgacagtgtctacctggttcggattactgctgccaccagagtggggctgggagagtcatcagtatggacttcacataggacgcccaaagctacaagcgtgaaagcccctaagtctccagagttgcatttggagcctctgaactgtaccaccatttctgtgaggtggcagcaagatgtagaggacacagctgctattcagggctacaagctgtactacaaggaagaagggcagcaggagaatgggcccattttcttggataccaaggacctactctatactctcagtggcttagaccccagaagaaaatatcatgtgagactcctggcttacaacaacatagacgatggctatcaggcagatcagactgtcagcactccaggatgcgtgtctgttcgtgatcgcatggtccctcctccaccaccaccccaccatctctatgcgaaggctaacacctcatcttccatcttcctgcactggaggaggcctgcattcaccgctgcacaaatcattaactacaccatccgctgtaatcctgttggcctgcagaatgcttctttggttctgtaccttcaaacatcagaaactcacatgttggttcaaggtctagaaccaaacaccaaatacgaatttgccgttcgattacatgtggatcagctttccagtccttggagccctgtagtctaccattctactcttccagaagcaccagcaggcccaccagttggagtaaaagtgacattaatagaggatgacactgccctggtttcttggaaaccccctgatggcccagaaacagttgtgacccgctatactatcttatatgcatctaggaaggcctggattgcaggagagtggcaggtcttacaccgtgaaggggcaataaccatggctttgctagaaaacttggtagcaggaaatgtgtacattgtcaagatatctgcatccaatgaggtgggagaaggacccttttcaaattctgtggagctggcagtacttccaaaggaaacctctgaatcaaatcagaggcccaagcgtttagattctgctgatgccaaagtttattcaggatattaccatctggaccaaaaatcaatgactggcattgctgtaggtgttggcatagccttgacctgcatcctcatctgtgttctcatcttgatataccgaagtaaagccaggaaatcatctgcttccaagacggcacagaatggaactcaacagttacctcgtaccagtgcctccttagctagtggaaatgaggtaggaaagaacctggaaggagctgtaggaaatgaagaatctttaatgccaatgatcatgccaaacagcttcattgatgcaaagggaggaactgacctgataattaatagctatggtcctataattaaaaacaactctaagaaaaagtggttttttttccaagactcaaagaagatacaagttgagcagcctcaaagaagatttactccagcggtctgcttttaccagccaggcaccactgtattaatcagtgatgaagactcccctagctccccaggtcagacaaccagcttctcaagaccctttggtgttgcagctgatacagaacattcagcaaatagtgaaggcagccatgagactggggattctgggcggttttctcatgagtccaacgatgagatacatctgtcctcagttataagtaccacaccccccaacctctgattctttcactggcagtgattcaggtggagattccgcattgaggaagtgtgaagaccctgctgtgtcatctgttagtgagcagacttcctccttagttctgcagccgccatctgccatgctatgctttgataaaaatgattttccaatctagacggccatgctcaggtattctcaccattaaatctgttcgaaggacaatgaacagggaaccaaagccttttgtgaaaatcttaatatctttatggggtattttagctttttttgaatgtgttttgttttttatttttaaacttgtgtaatttgaatgtttcattgtcagcaatgtgaaagaacggtcgagatgtttgactggattataaaatatatcactggagcaaagggaagacttttgaaagcccctttgctgactatctacctcagtttgcctcccggcaaactctgaagacaactttgttacctcatttgttgttatagtttatctcagctacataaccaatgatacttcctagtagtattgtgttttcattgctgtacgtgtaatgtgtgtgatcaaaggagtcatataggtagatgagtaagaatgtttatctgaagctctgatttttttaaaaaaagaaactatgacatctgcatggtttggataagttcatacctctggctgtgaggaccgttaaaccactgagaagaggaaaagtggggctatttcttctaacgatgaccaaaacaagaaagtatatttcttttgagaacagaactattcaataccaggtagggatcattttgcttaaaaggcctttatgttttgggcattagagtctgagtgctttatctcctatatcccaaacctcaagctgcccagaactgtgccttttctaccttcccctttgcctgacggttggccaaaggctgcactgtctagtttgcaaagcatcctcaactttgccagtattagttgcaaaaccccatgcagaatatggatttttaaagaaaatgggttaaggtggttttttttctttttttaaatcccagtttggcttaaaggagtgaagacatttcatgaactattaagaatgaaggtaaatgcaacagtagacagtaaaatgaactcgaagttattatggtaacagtgcctttcagtataatgaaattctttgccttatacctttttaatattcatgaaattgtttaggaacaggagtacaaaaagttgccttaagagtttcttggattttatcagtaactattttgatgtatagtatcttaccaaggcattttttttaagtgcaggttttgtttagggataaatattcagagttctaccaccctacttgtgttttcttgaattctttagagaatatggtatctacttaatcttccttcagtgtcagtgctgtgaatgaggaatgctaactccaggagtgagttaatcctcttgcaggtttgaaatcagcaaattgtttactcagctacataacataggccttttctccgtcatgagacagttacctaggtgccgagcagtgggagaggataaagaactaaacgcgtgtagagaaggggtcccatatccttttaaaagtattttttcaaattttctggaagtgacttttgattctcattttaaaaggaatcataatgggtttacacttgaaatgctttgttcctagaggaggcagggtcatgttcactgatgttctaaaatcaaaggaatattagcagataatagtcccagcatcatctgctagtctaatgactgtagatataacatttttaatttttttaaatctgtaattttgtgccaaactggatgtgattaagactaaagttcaatgccagcaaccacttctgaactaaactcagagtcccccagttagttatctaagtacggaattcatcgcaaaacaaacaaaaaagcagagctttaggtgaacagtctgcagcaaggaaaaatgctgctcctgcctttatagctcctgttttatactacctccttttaaagttattctagtgttattttttttcctgtactcagggaacgttttgttacttttgagctgcctcatggaagcataggcagattgacagggtatagcgctttgtggttggtaagtagaagtatatagggccaacttttatcagtatctaaaattaagtacagtgagatcattttatttttaagctttcattaaaaggcaaacaaaatctaaagctgaaacatcatccatcatggttatggaagatgtgtctaggactacatgaattcgagtggttttaaatggctaaaaagacgagctaaagtccttgaggaaagtattttgtttgtttggtttttgatgaataggcttatagttacaatagaactttaggctataactatttgataattatttaacagtacattttttaccttttcattttgttcttatacggactttttcataataattctgttaccaaagaattttcagtagaaaataaaattttgattataattccccccaaattgaattaactagaagcatttatagatatgaaacttacacaagtagttactaacccaaaacaatagggtttatattgattgttgtagttaaatagattagtaatgttaactaccttattgttaccagagcatttaaaataagttgtaatactttctttaccagcagatcgttccaaagaatttcaggtatagttttttcttcagcaagtaaatcttcaactatacagtattaaagtatttttatattgttgaaactacttgttggagagaaaattttttttttttaccaaaaataaatactttggtctcattgaataagatatttagtaatacagcaaagacttctttttacttgaccaaatcaagcttctttgaagtcttaagtatgaaattgtaattaaaatgtgaagattttcactcatttttcatagtggtattacttcatggtattgtacttcaaaggggctaatatgcaaatggtaactattttcttttccaaagatgtatttgctgtaagtactgatacctgcatgtcatttttatgccaaatattacaagatactgctcatcagtattttcataccaaagaccattaagatgtataggttagcctgtaagtaagtaaagatgagcagatttgaaataaatttatttagaggccgatagagaatctagctttagtagcaaaaaatatcaaagggctaagtttacataattaaaagcaatacaattatattggtatttatcagtgtttttattcaagtactttttatcagcaaattaaaaagaaaaaaaccaaagatatttaaggttacctccgcatataggcaaatatagttgtacattaaactgttgtttcttgtttttatgttaaaccaaacatgtctcttcggaacacagtctgtatacaaataacatgcatgaggactttccatttaatctgtgattcagccacatgatgtttttgccaaatgatgtgatactttccaaagcaccttgagtgtgaaatgtcaacagaaatatcagcaagcttttatgttgcagagtattatggtacctctgaattagcctgtatagttctcttcctgctttaagcattacctggttagctcagacggcttgaggcagtcccttaataatagggatgcttttcatctctaaggatgtaagaggcaaacaaatcatgtcattctttaagtgggctatgctttgatagatgtgctctttaaaggtgtgagattggaatttagagttgttaaattgaaatgtttgcattgcaccaaaggagctcagttttcaaactttaatggaaccttgggtaaagggaaaaaatttttaatgaaatctggggttttatattttgattagcctaaaagtaaaaatacagctttatccattaagtgacttttaaaaatcagttttgccataccaaagaaattagattcttagtgtcacatgctatacttttgtctgtgcttgaaacgagcaatgccaacattgggaacaatgacagaggtttgcatcagtttgtcttggctttgttaaggacttctgccagaaatgtgctcgtggttgacaacccaggatcattgttcaagttcttatgcagacacctttgaaaacaattcagatcgtgtcacaagaatttggaattgaaaatatcatttattttttaatgcaagaatacccagatgtggtttcacttcagcagtagctatagtggttcacttatatacatttctgtttcactgaatgtaaattttgaatactgaatgtaaaaaaaaaactccagttatattgaaacagtcactaagactgcacatgtgttttgcagactttcttcctgaccatttgccacatgggtctctgataagattctgttggtttaatagtcaaaataatctttgcagtttgtgagcactgagtagcaggttctggagactaccatatacaaccagttgtctaattgtgatttttttattgatgtttagaagaatgtaaccgtagagttctgtgttaagttgatttatgctcaggacataagatcacaggctaatgcaatgtgtatgtttcaggctttaatcttctcaatttccctttttaagccgttgatggtgtttaagattaacatgacagtcttgtatttttaccagatactgtattatttttcctattgctgctgtaacacattaccatgaaggtggtggcttaaaataacacaaatttttcttaagttctgcagatcagaagtctaacacaggtctccctgggacaaaatcaaggcgcttgcagggctgtttctttttgaggctttagggaaaaatctatttccttttctagttttttaaggctgggaacccctccttccatcttcaaagccagccatgtagcatctctctgaagctccttccgttatcatttctctttgtccaaccccagctgatacaggttatctaggtttaaggattccagtgatcacattgagcccacctaaataatccaggataatctccccaactgaagttcctcaacttaatcacatctacagagttccttttgctatgtttggtaacatattcactggttccagggatttgggcatggacttctgtaggtggccagtattttgcccacaacaggtacattctttctgtggaattctgatccctgtaaaatgtctgtagcattaaagagattggaaatctgaggtcatgtgccccttggggatctttaaagattaaaagcatgaaaactttgacttgtagcctaccaaaattatacactaaactttctctccaaaatacttgtgaaacaatttatctttaaagtttctgaatatgtgcttcataaaataacatctcatgtttatcagcaagtgtcctaaatatttgcgtctaactttatggaatttattcagaaaaagaattgaaaactcttcttatagttaccctttctccttttctcttcagtggttatgttgctggggaagagttgggggaagacctcaaaacacaggaactcagagtgatgaacaggaccatgctcaagtttattctttgttttcttttaatgacatattcacaacattcacaactttctgcctttaaatctggttcctctcttcagcttcaccaagccactgaatgcttttcagttttattaaccctcacattccccatccttctcagcaagagcctctccttatgccatcagcatgtatatacatttcctaggaaatttgatctttcttgtcattcttttttggttccaatcggccttttcctggttctcaaagctctagtttcttctaatttctggatcatcgcaagtctggccctctttgaactttaaaacataatgtctaattccaccccaattttcagcatttcttcaactaaatcgataaagctgtctccattatgagaaaggccagaataatactccgagtaagcataagaaagctggtcattttacaacttctcccgactctaggaagtaatatgatgccatttgttgagcatctacagtgtgccaagcacatggttcatctctgcaaactgctgctacattctgtaaagcaagtattatccgcattttagggattaggaacagcttcctgatctcttgccaaaagtcacagctagtgagtggtttaggcaagatacaaaccctagttagttaatccttactcagaagtgtataggactatgatacattgtctcagcttaaaaaaaaaaaaaaaaaaaaaaggtatttaatcacccagggtcatagtgccttccatagtgtgaccagatacaactgttttttccttgtatccacaaaagccaggttgtgtcagaacaacctttctacagagtaataaccaatcgaaaaagagaagactaccttatttaaatccacttattcacaggagggattaaggcggctgtaactcatcccttatcatctcctaatttctctcctccaaaaccttccatttatctcagctaaaattgtgtctgaaggctgtttgtacttagagttacattacaaataaggtaggcatggtttctagagtccttttctagtcaagcatttccttattcgacaatgtcttcagaattgcattttatcttttgtaattttctgtagctcccatattccaaacaggaattcattgacttgaaaaagtcaggtgtgtaaacagtaatcctttcttgttaggtctgaagagttcatgattttttatgaatataaactaatttattatttgcattaatgtaggagacagcaaagttaacggagagtcataaaacagaacaagtataagttaggctttggagcacctaagttctaatcttgacaattttgagaatcgtttggtacaaaaattcttaaactgtttctgtgccttctccatccatgaaatgaggataatttttttgtgcaaaatgaaacaatagtactttgaaaacttaagagaaaattcaagtgtaaataatcataatctgaaactcatttgtatgaggctgtgaaagattttacagactctttcttttcaagtcagcctttgcaattatattttgcctttgttgaaatgaaaaatgtttgcatctcccgtacgcatacacaaaaccaatagaagaaagtggttggtaaaagatatagctgaaatggaaacactcatatgttaggtggataaaatcataagagaaaatgggaattgactgtactttcaaagtactaaatttgaagtcatcttactccaatttaagtcatatatatatatatatatatatatatatatatatatatatatatatatatattggcttttaaagagttaaagagagaatcagatctgtccagcaggatagatgggtgaggagaaaagtacatatttaggatttttctctaaaagatctttttcaagattatggagtattttaatatttctgcaaactattccaaatgaatgcattttatatagggcaacacatactggcacctgattctggtttattcgagttcatatgtagggtttgttgggaagaattatatgattggcttctttttttagaggaaatattttcccttttttcttatccatatactattctgaacagctttgcagatttccttaagttcatagcttgtaagtagttcatggtatatagacatagtcttgacttacaactgaaaaaaaatttatgttacagaagtttattttttctatggaactgtctttaaaaacaaaaatattacaaatcttgaccttgaaatattctgtttcctgttatcacattctggatatctattttgtttgcaaatgaaaattattactgatgattagcaacttgagcctgttaataggaaattgcaaagcctgaatacacacacattgccttagcctatcagtagagtagaggacatatgttaagaaaatgtgtctgcttgttgctgttgttggacaaaattttatgtctgtgtgtatgatttttttttttctattttcttcaaagatgtgaattaaatgaaagtgtgggagccagttaaattattttgtattatgggtgttctggatcctttcactccgtataccattttcttgtaagggcagcatttgtagacttgctaatggactgtagagctgagctatattaattttatacttgactcaggggatcagttctgtgaatgccattgcacgaagaaagcaaatgtttgccttgattttgaatgtatctttttaatgtcttcttaaaacatatttgtttaataatgtagatttgtttttttttttctagtatcatagtaaatattgcttagtacttgcccccaccccactgggtagtttatatactaccctataggtcatgccaaaaatgaataaaagtttaaatgccaaaatgtttatgaaactgctgtctaaatactgattgattgcacaatttaaataaaagctttccttagttaaaaaagacaaaaaaaaaaaaaaaaaaaaaaaaaaaa

SEQ ID NO: 132 - DNA, 2816 bp, Homo sapiens
ccttttttggcctcgacggcggcaacccagcctccctcctaacgccctccgcctttgggaccaaccaggggagctcaagttagtagcagccaaggagaggcgctgccttgccaagactaaaaagggaggggagaagagaggaaaaaagcaagaatcccccacccctctcccgggcggagggggcgggaagagcgcgtcctggccaagccgagtagtgtcttccactcggtgcgtctctctaggagccgcgcgggaaggatgctggtccgcaggggcgcgcgcgcagggcccaggatgccgcggggctggaccgcgctttgcttgctgagtttgctgccttctgggttcatgagtcttgacaacaacggtactgctaccccagagttacctacccagggaacattttcaaatgtttctacaaatgtatcctaccaagaaactacaacacctagtacccttggaagtaccagcctgcaccctgtgtctcaacatggcaatgaggccacaacaaacatcacagaaacgacagtcaaattcacatctacctctgtgataacctcagtttatggaaacacaaactcttctgtccagtcacagacctctgtaatcagcacagtgttcaccaccccagccaacgtttcaactccagagacaaccttgaagcctagcctgtcacctggaaatgtttcagacctttcaaccactagcactagccttgcaacatctcccactaaaccctatacatcatcttctcctatcctaagtgacatcaaggcagaaatcaaatgttcaggcatcagagaagtgaaattgactcagggcatctgcctggagcaaaataagacctccagctgtgcggagtttaagaaggacaggggagagggcctggcccgagtgctgtgtggggaggagcaggctgatgctgatgctggggcccaggtatgctccctgctccttgcccagtctgaggtgaggcctcagtgtctactgctggtcttggccaacagaacagaaatttccagcaaactccaacttatgaaaaagcaccaatctgacctgaaaaagctggggatcctagatttcactgagcaagatgttgcaagccaccagagctattcccaaaagaccctgattgcactggtcacctcgggagccctgctggctgtcttgggcatcactggctatttcctgatgaatcgccgcagctggagccccacaggagaaaggctggagctggaaccctgaccactcttcaggaagaaaggagtctgcacatgcagctgcaccctccctccgatccttcctcccacctccccctcccccttctcccacccctgcccccacttcctgtttgggcccctctcccatccagtgtctcacagccctgcttaccagataatgctactttatttatacactgtctagggcgaagacccttattacacggaaaacggtggaggccagggctatagctcaggacctgggacctcccctgaggctcagggaaaggccagtgtgaaccgaggggctcaggaaaacgggaccggccaggccacctccagaaacggccattcagcaagacaacacgtggtggctgataccgaattgtgactcggctaggtggggcaaggctgggcagtgtccgagagagcacccctctctgcatctgaccacgtgctacccccatgctggaggtgacatctcttacgcccaacccttccccactgcacacacctcagaggctgttcttggggccctacaccttgaggaggggcaggtaaactcctgtcctttacacattcggctccctggagccagactctggtcttctttgggtaaacgtgtgacgggggaaagccaaggtctggagaagctcccaggaacaatcgatggccttgcagcactcacacaggacccccttcccctaccccctcctctctgccgcaatacaggaacccccaggggaaagatgagcttttctaggctacaattttctcccaggaagctttgatttttaccgtttcttccctgtattttctttctctactttgaggaaaccaaagtaaccttttgcacctgctctcttgtaatgatatagccagaaaaacgtgttgccttgaaccacttccctcatctctcctccaagacactgtggacttggtcaccagctcctcccttgttctctaagttccactgagctccatgtgccccctctaccatttgcagagtcctgcacagttttctggctggagcctagaacaggcctcccaagttttaggacaaacagctcagttctagtctctctggggccacacagaaactctttttgggctcctttttctccctctggatcaaagtaggcaggaccatgggaccaggtcttggagctgagcctctcacctgtactcttccgaaaaatcctcttcctctgaggctggatcctagccttatcctctgatctccatggcttcctcctccctcctgccgactcctgggttgagctgttgcctcagtcccccaacagatgcttttctgtctctgcctccctcaccctgagccccttccttgctctgcacccccatatggtcatagcccagatcagctcctaacccttatcaccagctgcctcttctgtgggtgacccaggtccttgtttgctgttgatttctttccagaggggttgagcagggatcctggtttcaatgacggttggaaatagaaatttccagagaagagagtattgggtagatattttttctgaatacaaagtgatgtgtttaaatactgcaattaaagtgatactgaaacacaaaaaa

SEQ ID NO: 133 - DNA, 3318 bp, Homo sapiens
aacctgctgtcctatgaaggcctctaggtcaccggtgctaaagccctcctttctccaccctccttaagtggaggtaaacgtcccagcaggaagtcaaggctggattggcgctcttcgcgagcaccctgggaacgggagtctgggtcacgggtgctagagccctcccctctcctcccggccggtgtatgggaaattgtccccgcagaaagtaaaggctggccaggccgcccccagcacgtagagggaatgagtcaggctccggctccacactggcacgtagtgggcggatcgcgccggcgctgagtaggaaggagcttcagccgccagcccggaacgcatcataggttagcttttcaagacacttcctgcatctctgacctgttgcacctctgttatcttggcacctctgttatcttagcagcaagcacctgcctcagctgacccttgagccataacccataagctcctgaaaagtacatcaagtctaaagtgaaccagctaactcattaagactggaatcatgagcaacaatggagcagacctaacctttggttacatctcctgttttgtagctatccttttgtttggctcaaattttgtgccacttaaaaaatttgatactggtgatggaatgtttctccagtgggttctttgtgctgccatatggttggttgccttggttgtcaatctgatattacattgtccaaagttttggccttttgcaatgcttgggggctgcatttgggcaacagggaacattgctgttgtcccaattatcaaaaccattggtttaggccttggaatcttaatctggggatcatttaatgccttaactggctgggcaagctcaaggtttggctggtttggattggatgcagaagaagtatcaaatccgctgctaaattacattggagctgggctatcagtagtaagtgctttcatatttttgttcatcaaaagtgaaataccaaataacacgtgttccatggataccactccattaataacagagcatgtgatcaacacaacccaagacccctgttcctgggtggataaactttctacagtacaccaccgcatagtgggctgcagtcttgcagtgatatctggagtactctatggatctacatttgtgccaatcatctacatcaaggaccacagcaaaagaaatgatagtatatatgcaggggcaagccaatatgatttagactatgtgtttgcgcacttcagtggcatctttcttacaagtactgtctactttctggcctactgcatagccatgaaaaatagtcctaaactatatcctgaagcagtcctaccaggattcctgtcaggagtactttgggctatagctacctgctgttggttcatagcaaatcactctctgagtgctgtggtcagttttccaataatcactgctggtccaggatttatagctgcaatgtggggtatcttcatgtttaaggaaataaagggtctacaaaactacctattaatgatacttgcattttgcatcatcttgactggagccttatgcactgctttttctaaaatctaacaatgacaaaaccagcaggtggcagcagtagttaagagaacgcgtctatcggacagcggagagatcatgctgagaaaagagtgcattttcatatagcaaatggatctcagccactgttggagtgggtaaatgatttttttccccaaaaatgtgagaatgaaggaagattgagtttcattcaagtataaaaatgaaaatttcttctgatgaactgtttatgaaggtagtactttactgggtgactaaaatgtctacattattatagcattacatacgaggatgctctttttaccacagtatgtacctagtgttgcataatctagaacacagtatagagtccatatacaaagaagttacagtccatatttctcacctattaccccagtgaagtgaggcagaaataccttgggcgaggagggagagccttaccttctaatggaattagattccaaagatatttggatcctttgtttcataaagtaaatgcatagttggtaactaaatgttaaaaaggccattttattattgttagccaaaacttctgtttatttcaagttaatatcgcccaactctacatcatctacccattttagctcataatgcttttgattatcgccagataaagtccattctcagagaacaaaaatttttcatcattgagaaaatgtgcataacataatacatacatacacaagtatattcacgtacataaatacacacagatatgttgctaaagtgagattgtaggttatcagtaacaatttaaaggaaacaaccactcttttgaatgtacaacttttttttctgaaatacacttttctaaaaccctcttaactggaggtttcctgttttcttcttgttttaactggtggtttccagtaggcaaaataaaatgacaggcatgctagttttttttttttttttttttttttaagaaaactgaaattaagccaggcagggtggcgcactactataatcccagctgctggggcggctgaagtaggagggtcacttagcccaagagtgcaaatctgccagcctaggcaacatagcaaggtcccatctctaaaaaagaaatttaatttaaatttgtaagaaaaaagaaaactgaaacagaactgccagtacaatgtttgttgcaattgtttccaaaactttgagataacgaaacccctattcaaatgtaaattttacccattcccacctgatagtactgtttattactttgctatgcaggagaaacaaaacagctttttatttgtgtgtatactctgaagtcaatgtgcatgggttaaatcccacctctgcttcattttatttgtgtggctttggacaagttcctaagccctctgtgtcaggcccctcattaacaaaatggagtttatgatggcatctacctcacatggttattgtgtggttgaaattagttcaaatctgtaaagtatgttgatgagtatctggtacttggcaaacactatataattgttagctttattattatgtgttgtttgaaggggaaaaaagtttttgtagattggagaacaccatgtaagagctactaagctcaccaccttcccatccaaacaattattactcctctaaatgaatactacttaaaagtgatggagcttctgtttgtttattgaattgctaatacaaataaatatttgactataacttcttatactcattttaattttaacctgaaatgtcattaaattatgctgataaactttgaataaattgtgatacaaaagcta

SEQ ID NO: 134 - DNA, 4099 bp, Homo sapiens
agccagcccttgccgtggccggagccgagcggcgcatccgggccggagaagaggacgacgacgaggtcctcgaagtggacccgtttgcgaagcgccagggagaaggaggagcggacgcatcgtagaaaggggtggtggcgcccgaccccgcgccccggcccgaagctctgagggcttcccggcccccactgcctgcggcatggcccggggctcggcgctcccgcggcggccgctgctgtgcatcccggccgtctgggcggccgccgcgcttctgctctcagtgtcccggacttcaggtgaagtggaggttctggatccgaacgaccctttaggaccccttgatgggcaggacggcccgattccaactctgaaaggttactttctgaattttctggagccagtaaacaatatcaccattgtccaaggccagacggcaattctgcactgcaaggtggcaggaaacccaccccctaacgtgcggtggctaaagaatgatgccccggtggtgcaggagccgcggcggatcatcatccggaagacagaatatggttcacgactgcgaatccaggacctggacacgacagacactggctactaccagtgcgtggccaccaacgggatgaagaccattaccgccactggcgtcctgtttgtgcggctgggtccaacgcacagcccaaatcataactttcaggatgattaccacgaggatgggttctgccagccttaccggggaattgcctgtgcacgcttcattggcaaccggaccatttatgtggactcgcttcagatgcagggggagattgaaaaccgaatcacagcggccttcaccatgatcggcacgtctacgcacctgtcggaccagtgctcacagttcgccatcccatccttctgccacttcgtgtttcctctgtgcgacgcgcgctcccggacacccaagccgcgtgagctgtgccgcgacgagtgcgaggtgctggagagcgacctgtgccgccaggagtacaccatcgcccgctccaacccgctcatcctcatgcggcttcagctgcccaagtgtgaggcgctgcccatgcctgagagccccgacgctgccaactgcatgcgcattggcatcccagccgagaggctgggccgctaccatcagtgctataacggctcaggcatggattacagaggaacggcaagcaccaccaagtcaggccaccagtgccagccgtgggccctgcagcacccccacagccaccacctgtccagcacagacttccctgagcttggaggggggcacgcctactgccggaaccccggaggccagatggagggcccctggtgctttacgcagaataaaaacgtacgcatggaactgtgtgacgtaccctcgtgtagtccccgagacagcagcaagatggggattctgtacatcttggtccccagcatcgcaattccactggtcatcgcttgccttttcttcttggtttgcatgtgccggaataagcagaaggcatctgcgtccacaccgcagcggcgacagctgatggcctcgcccagccaagacatggaaatgcccctcattaaccagcacaaacaggccaaactcaaagagatcagcctgtctgcggtgaggttcatggaggagctgggagaggaccggtttgggaaagtctacaaaggtcacctgttcggccctgccccgggggagcagacccaggctgtggccatcaaaacgctgaaggacaaagcggaggggcccctgcgggaggagttccggcatgaggctatgctgcgagcacggctgcaacaccccaacgtcgtctgcctgctgggcgtggtgaccaaggaccagcccctgagcatgatcttcagctactgttcgcacggcgacctccacgaattcctggtcatgcgctcgccgcactcggacgtgggcagcaccgatgatgaccgcacggtgaagtccgccctggagccccccgacttcgtgcaccttgtggcacagatcgcggcggggatggagtacctatccagccaccacgtggttcacaaggacctggccacccgcaatgtgctagtgtacgacaagctgaacgtgaagatctcagacttgggcctcttccgagaggtgtatgccgccgattactacaagctgctggggaactcgctgctgcctatccgctggatggccccagaggccatcatgtacggcaagttctccatcgactcagacatctggtcctacggtgtggtcctgtgggaggtcttcagctacggcctgcagccctactgcgggtactccaaccaggatgtggtggagatgatccggaaccggcaggtgctgccttgccccgatgactgtcccgcctgggtgtatgccctcatgatcgagtgctggaacgagttccccagccggcggccccgcttcaaggacatccacagccggctccgagcctggggcaacctttccaactacaacagctcggcgcagacctcgggggccagcaacaccacgcagaccagctccctgagcaccagcccagtgagcaatgtgagcaacgcccgctacgtggggcccaagcagaaggccccgcccttcccacagccccagttcatccccatgaagggccagatcagacccatggtgcccccgccgcagctctacgtccccgtcaacggctaccagccggtgccggcctatggggcctacctgcccaacttctacccggtgcagatcccaatgcagatggccccgcagcaggtgcctcctcagatggtccccaagcccagctcacaccacagtggcagtggctccaccagcacaggctacgtcaccacggccccctccaacacatccatggcagacagggcagccctgctctcagagggcgctgatgacacacagaacgccccagaagatggggcccagagcaccgtgcaggaagcagaggaggaggaggaaggctctgtcccagagactgagctgctgggggactgtgacactctgcaggtggacgaggcccaagtccagctggaagcttgagtggcaccagggcccggggttcggggatagaagccccgccgagaccccacagggacctcagtcacctttgagaagacaccatactcagcaatcacaagagcccgccggccagtgggcttgtttgcagactgggtgaggtggagccctgctcctctctgtcctctgacacagagagctgccctgcctaggagcacccaagccaggcagggggtctggcagcacggcgtcctggggagcaggacacatggtcatccccagggctgtatacattgattctggtggtagactggtagtgagcagcaaatgcctttcaagaaaataggtggcagcttcactccatgtcatatatggagtgaatatttcaaaacgttgggaataagggcctgcaaaaggcagcgaggaggcacctcgggtcttgaggttcctgacaaccgatctggtctgttggtttgaggatgaaggggctccatttctgctgcctccctgctgagaatattctccctttagcagccaaagattcgctggaacggaggctgccctctgctgcctgttggggtcggaagacaaggggcttctgaaatgggagttcctgagatacaacaaaatgtgtgccttcaaagaaactgacagctttgtatttggtgaaatggttttaattatactccatgtgtattttgcccactttttttgggaattcaagggaaagtgtttcttgggtttggaatgttcagaggaagcagtattgtacagaacacggtattgttatttttgttaagaatcatgtacagagcttaaatgtaatttatatgtttttaatatgccattttcattgaagtattttggtcttaagatgactttagtaatttaactgtttatgttacccacgttgggatccagttggtcttggtttgcttctctctgtaccacgtgcacatgaggtccattcattttacagcccctgttacacacagacccacaggcagccgtctgtgccccgcacacattgttggtcctatttgtaaatcccacacccggtgtatccaataaagtgaaacaaagcatgtgaaa

SEQ ID NO: 135 - DNA, 2810 bp, Homo sapiens
gaggaagaaagggagggaggcggcgtcatgtgatccgcttccctgctcctttaagcgtccacaggcggcggagcggccacaatcacagctccgggcattgggggaacccgagccggctgcgccgggggaatccgtgcgggcgccttccgtcccggtcccatcctcgccgcgctccagcacctctgaagttttgcagcgcccagaaaggaggcgaggaaggagggagtgtgtgagaggagggagcaaaaagctcaccctaaaacatttatttcaaggagaaaagaaaaagggggggcgcaaaaatggctggggcaattatagaaaacatgagcaccaagaagctgtgcattgttggtgggattctgctcgtgttccaaatcatcgcctttctggtgggaggcttgattgctccagggcccacaacggcagtgtcctacatgtcggtgaaatgtgtggatgcccgtaagaaccatcacaagacaaaatggttcgtgccttggggacccaatcattgtgacaagatccgagacattgaagaggcaattccaagggaaattgaagccaatgacatcgtgttttctgttcacattcccctcccccacatggagatgagtccttggttccaattcatgctgtttatcctgcagctggacattgccttcaagctaaacaaccaaatcagagaaaatgcagaagtctccatggacgtttccctggcttaccgtgatgacgcgtttgctgagtggactgaaatggcccatgaaagagtaccacggaaactcaaatgcaccttcacatctcccaagactccagagcatgagggccgttactatgaatgtgatgtccttcctttcatggaaattgggtctgtggcccataagttttaccttttaaacatccggctgcctgtgaatgagaagaagaaaatcaatgtgggaattggggagataaaggatatccggttggtggggatccaccaaaatggaggcttcaccaaggtgtggtttgccatgaagaccttccttacgcccagcatcttcatcattatggtgtggtattggaggaggatcaccatgatgtcccgacccccagtgcttctggaaaaagtcatctttgcccttgggatttccatgacctttatcaatatcccagtggaatggttttccatcgggtttgactggacctggatgctgctgtttggtgacatccgacagggcatcttctatgcgatgcttctgtccttctggatcatcttctgtggcgagcacatgatggatcagcacgagcggaaccacatcgcagggtattggaagcaagtcggacccattgccgttggctccttctgcctcttcatatttgacatgtgtgagagaggggtacaactcacgaatcccttctacagtatctggactacagacattggaacagagctggccatggccttcatcatcgtggctggaatctgcctctgcctctacttcctgtttctatgcttcatggtatttcaggtgtttcggaacatcagtgggaagcagtccagcctgccagctatgagcaaagtccggcggctacactatgaggggctaatttttaggttcaagttcctcatgcttatcaccttggcctgcgctgccatgactgtcatcttcttcatcgttagtcaggtaacggaaggccattggaaatggggcggcgtcacagtccaagtgaacagtgcctttttcacaggcatctatgggatgtggaatctgtatgtctttgctctgatgttcttgtatgcaccatcccataaaaactatggagaagaccagtccaatggcgatctgggtgtccatagtggggaagaactccagctcaccaccactatcacccatgtggacggacccactgagatctacaagttgacccgcaaggaggcccaggagtaggaggctgcagcgcccggctgggacggtctctccataccccagcccctctaactagagtggggagcatgccagagagagctcaatgtacaaatgaatgcctcatggctcttagctgtggtttcttggaccagcggcatggacatttgtcagtttgccttctgacggtagcttttggaggaagattcctgcagccactaatgcattgtgtatgataacaaaaactctggtatgacacattttctgtgatcattgttaattagtgacatagtaacatctgtagcagctggttagtaaacctcatgtgggggtggggtgggggtgtattccttgggggatggtttgggccgaatggggagtggaatatttgacatttttcctgttttaaattctaggatagattttaacatcctttgcggtcccagtccaaggtaggctggtgtcatagtcttctcactcctaatccatgaccactgtttttttcctatttatatcaccaggtagcccactgagttaatatttaagttgtcaatagataagtgtccctgttttgtggcataatataactgaatttcatgagaagatttattccaccaggggtatttcagctttgaaaccaaatctgtgtatctaatactaaccaatctgttggatgtgggttttaaaaaatgtttgctaaactacccaagtaagatttactgtattaaatggccttcgggtctgaaaagcttttttaacttcttgcttaaaatgcgttttattttgataagatacttcaaatagcctccaaaagtgtagatccaatcatttaaataaacctgtatgtatatgcatatgtgtacatgcatatcccctcctgctaaaactcataaaaaaaaaaaaaaa

SEQ ID NO: 136 - DNA, 1047 bp, Homo sapiens; identical to SEQ ID NO: 73

SEQ ID NO: 137 - DNA, 2193 bp, Homo sapiens
aatctcagcatgggaacaagcctttgtgtcacactgtgcaaccttcctccctttcttaaatgcttggggcatttgtctggccttcccttttactgctggctgggaaggaggagcatcagaccacagatcctggaaggcacttctctccctgactgctgctcacactgccgtgagaacctgcttatatccaggaccaaggaggcaatgccaggaagctggtgaagggtttcctctcctccaccatggttgacagcactgagtatgaagtggcctcccagcctgaggtggaaacctcccctttgggtgatggggccagcccagggccggagcaggtgaagctgaagaaggagatctcactgcttaacggcgtgtgcctgattgtggggaacatgatcggctcgggcatctttgtttcccccaagggtgtgctcatatacagtgcctcctttggtctctctctggtcatctgggctgtcgggggcctcttctccgtctttggggccctttgttatgcggaactgggcaccaccattaagaaatctggggccagctatgcctatatcctggaggcctttggaggattccttgctttcatcagactctggacctccctgctcatcattgagcccaccagccaggccatcattgccatcacctttgccaactacatggtacagcctctcttcccgagctgcttcgccccttatgctgccagccgcctgctggctgctgcctgcatttgtctcttaaccttcattaactgtgcctatgtcaaatggggaaccctggtacaagatattttcacctatgctaaagtattggcactgatcgcggtcatcgttgcaggcattgttagacttggccagggagcctctactcattttgagaattcctttgagggttcatcatttgcagtgggtgacattgccctggcactgtactcagctctgttctcctactcaggctgggacaccctcaactatgtcactgaagagatcaagaatcctgagaggaacctgcccctctccattggcatctccatgcccattgtcaccatcatctatatcttgaccaatgtggcctattatactgtgctagacatgagagacatcttggccagtgatgctgttgctgtgacttttgcagatcagatatttggaatatttaactggataattccactgtcagttgcattatcctgttttggtggcctcaatgcctccattgtggctgcttctaggcttttctttgtgggctcaagagaaggccatctccctgatgccatctgcatgatccatgttgagcggttcacaccagtgccttctctgctcttcaatggtatcatggcattgatctacttgtgcgtggaagacatcttccagctcattaactactacagcttcagctactggttctttgtggggctttctattgtgggtcagctttatctgcgctggaaggagcctgatcgacctcgtcccctcaagctcagcgttttcttcccgattgtcttctgcctctgcaccatcttcctggtggctgttccactttacagtgatactatcaactccctcatcggcattgccattgccctctcaggcctgcccttttacttcctcatcatcagagtgccagaacataagcgaccgctttacctccgaaggatcgtggggtctgccacaaggtacctccaggtcctgtgtatgtcagttgctgcagaaatggatttggaagatggaggagagatgcccaagcaacgggatcccaaatctaactaaacaccatctggaatcctgatgtggaaagcaggggtttctggtctactggctagagctaaggaagttgaaaaggaaagctcacttctttggaggcacctgtccagaagcctggcctaggcagcttcaacctttgaacttactttttgaaatgaaaagtaatttatttgttttgctacatactgttccagacttttaaaggggacaatgaaggtgactgtggggaggagcatgtcaggtttgggcttggttgttttagaagcacctgggtgtgcctacctactcctcttttcttttaaaagggcccacaatgctccaatttcctgtctcctttagagagacatgaaactatcacaggtgctggatgacaataaaagtttatgttcctaaaaaaaaaaaaaaaaaaaaaaaaaaaaaa

SEQ ID NO: 138 - DNA, 2890 bp, Homo sapiens; identical to SEQ ID NO: 75

SEQ ID NO: 139 - DNA, 3359 bp, Homo sapiens
cacaccttcggcagcaggagggcggcagcttctcgcaggcggcagggcgggcggccaggatcatgtccaccaccacatgccaagtggtggcgttcctcctgtccatcctggggctggccggctgcatcgcggccaccgggatggacatgtggagcacccaggacctgtacgacaaccccgtcacctccgtgttccagtacgaagggctctggaggagctgcgtgaggcagagttcaggcttcaccgaatgcaggccctatttcaccatcctgggacttccagccatgctgcaggcagtgcgagccctgatgatcgtaggcatcgtcctgggtgccattggcctcctggtatccatctttgccctgaaatgcatccgcattggcagcatggaggactctgccaaagccaacatgacactgacctccgggatcatgttcattgtctcaggtctttgtgcaattgctggagtgtctgtgtttgccaacatgctggtgactaacttctggatgtccacagctaacatgtacaccggcatgggtgggatggtgcagactgttcagaccaggtacacatttggtgcggctctgttcgtgggctgggtcgctggaggcctcacactaattgggggtgtgatgatgtgcatcgcctgccggggcctggcaccagaagaaaccaactacaaagccgtttcttatcatgcctcaggccacagtgttgcctacaagcctggaggcttcaaggccagcactggctttgggtccaacaccaaaaacaagaagatatacgatggaggtgcccgcacagaggacgaggtacaatcttatccttccaagcacgactatgtgtaatgctctaagacctctcagcacgggcggaagaaactcccggagagctcacccaaaaaacaaggagatcccatctagatttcttcttgcttttgactcacagctggaagttagaaaagcctcgatttcatctttggagaggccaaatggtcttagcctcagtctctgtctctaaatattccaccataaaacagctgagttatttatgaattagaggctatagctcacattttcaatcctctatttctttttttaaatataactttctactctgatgagagaatgtggttttaatctctctctcacattttgatgatttagacagactccccctcttcctcctagtcaataaacccattgatgatctatttcccagcttatccccaagaaaacttttgaaaggaaagagtagacccaaagatgttattttctgctgtttgaattttgtctccccacccccaacttggctagtaataaacacttactgaagaagaagcaataagagaaagatatttgtaatctctccagcccatgatctcggttttcttacactgtgatcttaaaagttaccaaaccaaagtcattttcagtttgaggcaaccaaacctttctactgctgttgacatcttcttattacagcaacaccattctaggagtttcctgagctctccactggagtcctctttctgtcgcgggtcagaaattgtccctagatgaatgagaaaattattttttttaatttaagtcctaaatatagttaaaataaataatgttttagtaaaatgatacactatctctgtgaaatagcctcacccctacatgtggatagaaggaaatgaaaaaataattgctttgacattgtctatatggtactttgtaaagtcatgcttaagtacaaattccatgaaaagctcactgatcctaattctttccctttgaggtctctatggctctgattgtacatgatagtaagtgtaagccatgtaaaaagtaaataatgtctgggcacagtggctcacgcctgtaatcctagcactttgggaggctgaggaggaaggatcacttgagcccagaagttcgagactagcctgggcaacatggagaagccctgtctctacaaaatacagagagaaaaaatcagccagtcatggtggcctacacctgtagtcccagcattccgggaggctgaggtgggaggatcacttgagcccagggaggttggggctgcagtgagccatgatcacaccactgcactccagccaggtgacatagcgagatcctgtctaaaaaaataaaaaataaataatggaacacagcaagtcctaggaagtaggttaaaactaattctttaaaaaaaaaaaaaagttgagcctgaattaaatgtaatgtttccaagtgacaggtatccacatttgcatggttacaagccactgccagttagcagtagcactttcctggcactgtggtcggttttgttttgttttgctttgtttagagacggggtctcactttccaggctggcctcaaactcctgcactcaagcaattcttctaccctggcctcccaagtagctggaattacaggtgtgcgccatcacaactagctggtggtcagttttgttactctgagagctgttcacttctctgaattcacctagagtggttggaccatcagatgtttgggcaaaactgaaagctctttgcaaccacacaccttccctgagcttacatcactgcccttttgagcagaaagtctaaattccttccaagacagtagaattccatcccagtaccaaagccagataggccccctaggaaactgaggtaagagcagtctctaaaaactacccacagcagcattggtgcaggggaacttggccattaggttattatttgagaggaaagtcctcacatcaatagtacatatgaaagtgacctccaaggggattggtgaatactcataaggatcttcaggctgaacagactatgtctggggaaagaacggattatgccccattaaataacaagttgtgttcaagagtcagagcagtgagctcagaggcccttctcactgagacagcaacatttaaaccaaaccagaggaagtatttgtggaactcactgcctcagtttgggtaaaggatgagcagacaagtcaactaaagaaaaaagaaaagcaaggaggagggttgagcaatctagagcatggagtttgttaagtgctctctggatttgagttgaagagcatccatttgagttgaaggccacagggcacaatgagctctcccttctaccaccagaaagtccctggtcaggtctcaggtagtgcggtgtggctcagctgggtttttaattagcgcattctctatccaacatttaattgtttgaaagcctccatatagttagattgtgctttgtaattttgttgttgttgctctatcttattgtatatgcattgagtattaacctgaatgttttgttacttaaatattaaaaacactgttatcctacagtt

SEQ ID NO: 140 - DNA, 1535 bp, Homo sapiens
gcgagcgcgcgcccgcgttctcctggcgggcttggtatttggcgcctgcgcgctgagtgcgtgccgctccgccgaccgaagaggctggacatgacaccagtggcatatcacggccatggggtctcagcattccgctgctgctcgcccctcctcctgcaggcgaaagcaagaagatgacagggacggtttgctggctgaacgagagcaggaagaagccattgctcagttcccatatgtggaattcaccgggagagatagcatcacctgtctcacgtgccaggggacaggctacattccaacagagcaagtaaatgagttggtggctttgatcccacacagtgatcagagattgcgccctcagcgaactaagcaatatgtcctcctgtccatcctgctttgtctcctggcatctggtttggtggttttcttcctgtttccgcattcagtccttgtggatgatgacggcatcaaagtggtgaaagtcacatttaataagcaagactcccttgtaattctcaccatcatggccaccctgaaaatcaggaactccaacttctacacggtggcagtgaccagcctgtccagccagattcagtacatgaacacagtggtcagtacatatgtgactactaacgtctcccttattccacctcggagtgagcaactggtgaattttaccgggaaggccgagatgggaggaccgttttcctatgtgtacttcttctgcacggtacctgagatcctggtgcacaacatagtgatcttcatgcgaacttcagtgaagatttcatacattggcctcatgacccagagctccttggagacacatcactatgtggattgtggaggaaattccacagctatttaacaactgctattggttcttccacacagcgcctgtagaagagagcacagcatatgttcccaaggcctgagttctggacctacccccacgtggtgtaagcagaggaggaattggttcacttaactcccagcaaacatcctcctgccacttaggaggaaacacctccctatggtaccatttatgtttctcagaaccagcagaatcagtgcctagcctgtgcccagcaaatagttggcactcaataaagatttgcagaatttaatacagatcttttcagctgttcttagggcattataaatggaaatcataacgtggttctaggttatcaaaccatggagtgatgtggagctaggattgtgagtgacctgcaggccattatcagtgcctcatctgtgcagaagtggcagcagagagggaccatccaaatacctaagagaaaacagacctagtcaggatatgaatttgtttcagctgttcccaaaggcctgggagctttttgaaaagaaagaaaaaagtgtgttggctttttttttttttagaaagttagaattgtttttaccaagagtctatgtggggcttgattcacccttcatccattggctggaacatggattggggatttgatagaaaaataaaccctgcttttgattcaaaaaaaaaaaaaaaaaaa

SEQ ID NO: 141 - DNA, 1260 bp, Homo sapiens; identical to SEQ ID NO: 78

SEQ ID NO: 142 - DNA, 2521 bp, Homo sapiens
agtagtgaatcgtagcatgttagagttagaaggttcagtgttgatggagttattgaagaaatgatggagtaagagactcttttctaagcaactcaagtttgcagtgattcaggcctacttctgaagagacagccttttatctcaatgaatgacacagaaaaaccagcagatactccctctgaggaagaggactttggtgatccaaggacatatgacccagatttcaaggggcctgttgccaacaggagttgtacagatgttctgtgctgtatgatcttcctactgtgtattattggctacattgttttaggacttgtggcctgggtacatggggaccccagaagagcagcctatcctacagacagccagggccacttttgtggccagaagggcactcccaatgagaacaagaccattttgttttactttaacctgttacgctgtaccagtccctccgtgttgctaaacctacagtgccctaccacacagatctgtgtctccaagtgcccagaaaaatttttaacctatgtggaaatgcaacttttgtacacaaaagacaaaagctactgggaagactaccgtcagttctgtaagaccactgctaagcctgtgaagtctctcacacagcttttactggatgatgattgtccaacagcgatttttcccagcaaaccttttctccagagatgtttccctgacttctctaccaaaaatggcactttaacaataggaagtaagatgatgtttcaagatggaaatggagggacaagaagtgttgtagaactcgggattgctgcaaatggtatcaataaacttcttgatgcaaagtcacttggattgaaagtgtttgaagactatgcaagaacttggtattggattctcattggcctgacgattgccatggtccttagttggatatttttgatacttctgaggttcatagctggatgcctcttctgggtcttcatgattggtgtgattggaattataggttatggaatatggcactgttaccagcagtacaccaatcttcaggaacgcccaagttctgtattaactatctatgacatcgggattcagactaacataagcatgtactttgaactgcaacaaacatggttcacatttatgataatactctgcatcattgaagtgattgtcatcctcatgctgatcttcctcaggaatcgaatccgagtcgccattatcctgctgaaggaaggaagcaaagccattggatatgttcctagtacattagtctatccagctttaactttcattttgctctcaatctgcatttgctactgggtcgtgacagcagttttcttggcgacatcgggggtacctgtatacaaagtcatagctccaggggggcattgtatacatgaaaatcaaacctgtgacccagagatttttaatacaactgaaattgccaaagcttgccctggggctctgtgtaactttgctttctatggtggaaagagcttgtaccatcagtacatccctaccttccatgtatacaacttatttgtctttctctggcttataaacttcgtcattgcattaggtcagtgcgcccttgctggtgcattcgctacttattactgggccatgaaaaaacctgatgacatcccacgatatccactttttactgcatttggacgagccatacgatatcacacaggatccctagcatttggatctttaattattgcattaattcaaatgtttaaaattgtactagaatacttggaccaccgtcttaaacgtacccagaacacattgtctaaattcctacaatgctgcctgagatgctgcttctggtgtttggaaaatgcaataaagtttttaaacagaaatgcctatattatgattgcaatatatggcagaaacttctgcaggtcagcaaaagatgctttcaatctgctgatgagaaatgttttgaaagttgcagttacagatgaagttacatactttgtattattcctggggaaacttctagttgctggaagtataggtgttctggccttcctattcttcacacaaagactgccagtgattgcacaaggaccagcatctttaaattactactgggtacctttgctgacagtcatttttgggtcttacctgattgcacatgggttcttcagcgtctatgcaatgtgtgttgaaacaattttcatctgcttctgtgaagatctggaaagaaatgatggatctacagaaaaaccctacttcgtaacccctaacctgcatggaattctgatcaagaagcaactagttccccagaagcagaaagagtagaaaagctccaaacagtgtcactcatttttaagtagaagttgtgtaaattaggttgattgtaatttggaaatgttgcttttgagtaatgtgaaatttctgtgcttaattctaagaagtcagcacctggtactacctgaggtgtcaggtatttgatgacattagctgctgtctactttatagacagtggtcccagctaaagatcaaaatgttaatgtca

SEQ ID NO: 143 - DNA, 3440 bp, Homo sapiens
ttgcaaatcgctgtgtgctcgcagaagccagcacttccacagtctctaaccttcccatggcgagtgctgcagctctatcagcagaacctttctctccgtgtgaggaagagcttttttcccccctttccttttttttttttttcctttccccttaatcagaagcactgaatgaaagccaatcagagagagctcgcccccgttttcttcggttccctgctgtccagagttaaaagtgatgctgagaaagagcttgagttagattgaagtagaatcagtgatagaaaataacagccgaaaacaaacaaaaaggggacatagtgacaatttctcctgggttattttggctggaaccaacttccattatccagaagctgataaaaaagctttgggaaacatgaacaaaacattgatgaaatgttggaaaccagttgaaacacagtaaaaccaactgggtaaaataggaccacttctcttcatctacactgggatttgtcaagaagtgaactatgacaatacatcaatttttgctactgtttctattctgggtatgcctgccacatttctgctctccagaaataatgttcagaaggacgcctgtgccacagcaaagaattttaagttcacgtgtaccaaggagtgatggcaaaattctccatcgtcaaaaacgtggttggatgtggaatcaatttttcttacttgaagaatatacaggatctgattatcagtacgtaggcaagctacattcagaccaagataaaggagatggatcactcaaatatatcttatctggagatggagctggtactctttttattattgatgaaaaaacaggtgatattcatgccacaaggcgaattgatagggaggaaaaggccttttatactctacgcgcacaagctattaacagaagaactctgaggccagtagagccagagtcagagtttgtgatcaaaattcatgatatcaatgacaatgagccaacgttcccagaagaaatctatacagctagtgttcccgaaatgtctgttgtaggtacttctgtggtgcaagtcacagctacagatgccgatgacccttcatatgggaacagcgccagagtcatttacagcatacttcaagggcagccctatttctctgtggagcctgaaacaggtatcatcaggactgctttaccgaacatgaacagagaaaacagagagcaataccaagtggtcatccaggccaaagacatgggcggccagatgggaggcttatcggggacaaccactgtgaacatcacgctgacagatgtcaatgacaacccaccacgtttcccccagaacactattcatcttcgagttcttgaatcctccccagttggcacagccattggaagtgtcaaagcaactgatgctgacactgggaaaaatgctgaagtagaataccgaattattgatggtgacggtactgatatgtttgacatcgtgactgagaaggacacacaggaaggcatcatcactgtgaaaaagccactcgactatgagagccgaagactttatactctgaaagtcgaagcagaaaacacccatgtagatccccgtttttattacctaggaccatttaaagatactaccatagtgaaaatctctatagaagatgtggatgaacctcctgtttttagtaggtcctcctatctgtttgaagttcatgaagatattgaagtgggcacaatcattggtactgtaatggcaagggacccagattctatttccagccccattagattttccttggatcgccatactgaccttgacagaatctttaacattcattcaggaaatggatctctttatacatcaaaacctcttgaccgtgaactatctcagtggcataatcttactgttattgctgctgaaatcaacaatcccaaagagacaacacgcgtggctgtttttgtgagaattttggatgttaatgacaatgccccacagtttgctgtgttctatgacacttttgtatgtgaaaatgccagaccagggcagctaatacagactataagtgcagtagacaaagatgaccctttaggtggacagaaattttttttcagtttagctgctgtcaatccaaacttcacagtacaggataatgaagataatactgccagaatcttaaccagaaaaaatggattcaatagacatgaaatcagtacctatctcttgcctgtggtgatatcagacaatgattacccaattcagagcagcacaggcacactgaccattcgagtgtgtgcttgtgacagccaaggcaacatgcaatcctgcagtgctgaagccctgctcctccctgccggcctcagcactggggccttgatcgccatcctcctctgcatcatcattctactggttatagtagtactgtttgcagctctgaaaagacagcgaaaaaaagagcctctgatcttgtcaaaagaagatatcagagacaacattgtgagctataacgatgagggtggtggagaggaggacacccaggcctttgatatcggcaccctgaggaatcctgcagccattgaggaaaaaaagctccggcgagatattattccagaaacgttatttattcctcggaggactcctacagctccagataacacggacgtccgggatttcattaatgaaaggctaaaagagcatgatcttgaccccaccgcacccccctacgactcacttgcaacctatgcctatgaaggaaatgattccattgctgaatctctgagttcattagaatcaggtactactgaaggagaccaaaactacgattacctccgagaatggggccctcggtttaataagctagcagaaatgtatggtggtggggaaagtgacaaagactcttaacgtaggatatatgttctgttcaaacaagagaaagtaactctacccatgctgtctccacttcacaatatttgatattcaggagcattttcctgccagtcagcacaattttttttctcatttacttcttaatttgttcattaattacattaattctttcctgtaggatgtctcatggaatatatatgacattttatttaatcacttccaagagccaaagctatggaaatacagtgttgtccatcttagtaaataaaagataatttcagaaacatgaacaggatagttctcccttaagcaacctcacaaacaagccgcttctgttaggtacatgtcctgcccttgcaaatgaagcttttaaaaaggtgaagaaaaattttacagtatatcctgttctgtacattaaattaaaaaaacaaaaatgtacatgtgatgttagtaggtgtgatatgcaacctggtatacagacatttgtgcaatttcatttcatcaaattctatctgctaatgttttatatttatatttttgtatttatttttaaaaaaataaaccagtttttacaactaaaaa

SEQ ID NO: 144 - DNA, 1588 bp, Homo sapiens
cttttgaggtagagtcagagtagggaaaacaactaatctgttttccaaacaggttttcataaataactgacaggagatgggctgtttttatggaagtattaacccaaatgatgggtgttaatcattaaacctttttggtggtggctcgcttgtttctctgatattctaatccgggtcacagaatggctaaggcagatttaagtgcagcgtggattttttttttctcactttgccttgtgttttccaccctgaaagaatgttgtggctgctcttttttctggtgactgccattcatgctgaactctgtcaaccaggtgcagaaaatgcttttaaagtgagacttagtatcagaacagctctgggagataaagcatatgcctgggataccaatgaagaatacctcttcaaagcgatggtagctttctccatgagaaaagttcccaacagagaagcaacagaaatttcccatgtcctactttgcaatgtaacccagagggtatcattctggtttgtggttacagacccttcaaaaaatcacacccttcctgctgttgaggtgcaatcagccataagaatgaacaagaaccggatcaacaatgccttctttctaaatgaccaaactctggaatttttaaaaatcccttccacacttgcaccacccatggacccatctgtgcccatctggattattatatttggtgtgatattttgcatcatcatagttgcaattgcactactgattttatcagggatctggcaacgtagaagaaagaacaaagaaccatctgaagtggatgacgctgaagataagtgtgaaaacatgatcacaattgaaaatggcatcccctctgatcccctggacatgaagggagggcatattaatgatgccttcatgacagaggatgagaggctcacccctctctgaagggctgttgttctgcttcctcaagaaattaaacatttgtttctgtgtgactgctgagcatcctgaaataccaagagcagatcatatattttgtttcaccattcttcttttgtaataaattttgaatgtgcttgaaagtgaaaagcaatcaattatacccaccaacaccactgaaatcataagctattcacgactcaaaatattctaaaatatttttctgacagtatagtgtataaatgtggtcatgtggtatttgtagttattgatttaagcatttttagaaataagatcaggcatatgtatatattttcacacttcaaagacctaaggaaaaataaattttccagtggagaatacatataatatggtgtagaaatcattgaaaatggatcctttttgacgatcacttatatcactctgtatatgactaagtaaacaaaagtgagaagtaattattgtaaatggatggataaaaatggaattactcatatacagggtggaattttatcctgttatcacaccaacagttgattatatattttctgaatatcagcccctaataggacaattctatttgttgaccatttctacaatttgtaaaagtccaatctgtgctaacttaataaagtaataatcatctctttttgattgtgaaaaaaaaaa

SEQ ID NO: 145 - DNA, 3757 bp, Homo sapiens
agagcgcggcggcagcaggaggagccgggcgcgcctgccacgcaaaactaccgggctggcagggcggcgggcgcggtgcgcgatcccgggtggcggcggcaacggcggtggtgacggcggcgactgcagcggccggctctcacctctcccctgtgcacccgcatctcgccgcgccgccgagcagccagcagtccccgggtcgcccagcccacgcgcgcacggccgagcccagcgcacaatagcggcgacagccatggggaaaccggcgaggaaaggatgcgagtggaagcgcttcctgaagaataactgggtgttgctgtccaccgtggccgcggtggtgctaggcattaccacaggagtcttggttcgagaacacagcaacctctcaactctagagaaattctactttgcttttcctggagaaattctaatgcggatgctgaaactcatcattttgccattaattatatccagcatgattacaggtgttgctgcactggattccaacgtatccggaaaaattggtctgcgcgctgtcgtgtattatttctgtaccactctcattgctgttattctaggtattgtgctggtggtgagcatcaagcctggtgtcacccagaaagtgggtgaaattgcgaggacaggcagcacccctgaagtcagtacggtggatgccatgttagatctcatcaggaatatgttccctgagaatcttgtccaggcctgttttcagcagtacaaaactaagcgtgaagaagtgaagcctcccagcgatccagagatgaacatgacagaagagtccttcacagctgtcatgacaactgcaatttccaagaacaaaacaaaggaatacaaaattgttggcatgtattcagatggcataaacgtcctgggcttgattgtcttttgccttgtctttggacttgtcattggaaaaatgggagaaaagggacaaattctggtggatttcttcaatgctttgagtgatgcaaccatgaaaatcgttcagatcatcatgtgttatatgccactaggtattttgttcctgattgctgggaagatcatagaagttgaagactgggaaatattccgcaagctgggcctttacatggccacagtcctgactgggcttgcaatccactccattgtaattctcccgctgatatatttcatagtcgtacgaaagaaccctttccgatttgccatgggaatggcccaggctctcctgacagctctcatgatctcttccagttcagcaacactgcctgtcaccttccgctgtgctgaagaaaataaccaggtggacaagaggatcactcgattcgtgttacccgttggtgcaacaatcaacatggatgggactgcgctctatgaagcagtggcagcggtgtttattgcacagttgaatgacctggacttgggcattgggcagatcatcaccatcagtatcacggccacatctgccagcatcggagctgctggcgtgccccaggctggcctggtgaccatggtgattgtgctgagtgccgtgggcctgcccgccgaggatgtcaccctgatcattgctgtcgactggctcctggaccggttcaggaccatggtcaacgtccttggtgatgcttttgggacgggcattgtggaaaagctctccaagaaggagctggagcagatggatgtttcatctgaagtcaacattgtgaatccctttgccttggaatccacaatccttgacaacgaagactcagacaccaagaagtcttatgtcaatggaggctttgcagtagacaagtctgacaccatctcattcacccagacctcacagttctagggcccctggctgcagatgactggaaacaaggaaggacatttccgtgagagtcatctcaaacactgcttaaggaaaagagaaacactaatggccaagtgtacatttgatttgatatacagacctccagattattttctatatttggattcacagcctttgcgctctgggttttgggatttgggtgtggggtaagttgaagggaaatcaatttaaaggaaagttctattatctgggttttagaaattctataagagacaaagtttggaagtacataaagtaataactgttagaattaggtaatggatatgaaagagaaaatgctttctcatgcatagacaagtgttttgggtttttaaaaaaaatattctgtcattggttacaaatttttactcaggctttctattggcatggatttcctttgacctctcacttttttataaattataatgcatctaaaccacctgtccccagttaatgtgccaaaatgtcaatttttaacttatctccagccaatttcaaagaaaacagaccagcatagttctgcaataacagttttaagatgggcatagggtttggaagaaagggagaaggattcttttttcaatgtactgtattgggacgctggtaactgttaacccagtgttcagcatagagctatatatatatatatatgtatatatttattattttcatataatttgccagacagagatcagaattgaaccgtcaatgtgaaataaagagttctccttgtacttgaataataaccacgattccaacccaggtctgctttggggcttatcagaactcctttctaaggagcactagaatgagaaatcatgttgttcgatcgtttcacatctgtatatcagctctaaagcagagatgtattatggtgatactccaaggtggcatagccattcatttacaacttccagatttgagctgcctggagggaatccatatcagctctgcataagattatatacaaagctgtcactcacaaaaggctggatgtgctttcatccaactggaaggctttattcttccaagttcattcatactcaaagaggccagtactttgccatccttgcacttctgttatcagggcccaaataacagtggcaagctaccaactaagttgtattttaataaagattccatgggttgaacaagccacgttgcagaaaaagagcttcccctaacctgggttgttgcagagtaaatcccacgacataagctggtatcagtggttcgggggaaatagttccattctatgactcttgtctcctcctccaggaggactgttctaactagtaatcttggccctattcattacatcctctgcttgtcattctgctaatttatgaagatagtttattatagtctgtacttcagttctcatcttgtaaataatgcttaacataaacttgtacttacactgaaatccaaaatagtcatgtttctgcagtattctgtagccaacttaaacctgtgctttcatgtttaagaaatgagaaattgtgccaaagatagcagaagagtagataagtgctcagtattgacgacctacatctgaaatctacaacataatgatactgaattgttatgtaaacatcataaatagtaaataatgattcaatgtgaattttaaaatgcaaatattgctattgtttataggaaataaatctaaatataaatgaaattgaatcagtaatttatcttgggctaaatggttctaccccttactaggttgccccaattagtggcactagttggcagagctgttcatgagctgccagttatcattttggagtcagtttgaaaccagcctcttaacacactgctgttaactcataaaagagaagagtgttccatttcagtctcaataaacacttccctcattctttcaaaaaaaaaaaaaaaaaa

SEQ ID NO: 146 - DNA, 6836 bp, Homo sapiens
gcggccgcggcccctttaaggagcagctctgcggtaacccgagcccgcagtccgggcgggcgcgacggccgccgcggtagctggagcctccgcgactgcacctccaagcggcccggaacccgcggcttccctggctcccgtgagcatctcaccgggcggcactggccagcgccagccctcgggccggcccggatgaccagactcctgtagacacccgccgccctctcccggctcggcgcagccgccgcccgcgcgcgactcgccccgggacccggcacaggttgaagaaatatggagatcaacacaaaactgctcatcagtgttacctgtatcagctttttcacctttcagcttcttttctactttgtaagttactggttttcagcaaaagtttctccaggtttcaatagtctcagcttcaaaaagaagattgaatggaactcaagggtagtatccacatgccattctttggtggttggtatttttggcctgtacattttcttattcgatgaggctactaaagctgatccactttggggtggtccatcacttgcaaacgtgaatattgctattgcctcaggctacctcatttctgatttgtccattataattttgtattggaaagtgattggtgacaaattttttataatgcatcattgtgcgtccctgtatgcatactaccttgtactgaaaaatggagtgctggcatacattgggaattttcgcctgcttgcagagctttccagcccgtttgtgaatcagcggtggttctttgaagctctgaagtatcccaagttttctaaagctatcgttatcaatggaatactcatgacagtagtattcttcatcgtgcggattgcctcaatgcttcctcattatggcttcatgtattccgtgtatggaacagaaccctacataaggcttggagttttaatccagttatcctgggtcattagttgtgttgttttggatgtgatgaatgtcatgtggatgatcaaaatttcaaaaggttgcatcaaagtcatctctcacatcagacaagagaaagccaaaaatagtcttcagaatggaaaacttgattaaaagagtgctaccgataagcaaacttcattactacccagcatatctgctgataggatgaattcttggcatgttcttgtgtacctttcttaattataattgttattcaggatttcagtgtcattttttttaaaccttagaaaagagaaggccgggcacggtggctcatgcctgtaatcccagcactttgggaggccaaggtgggtcgatcactgaggtcaggagttcgagactagcttggccaacatggtgaaacctcatctctactaaaaatacaaaaaaaagtagctgggcgtggtggttggcgcctgtaatcccagctactcgggaggctgaggcaggagaatcgcttgaacccgagagacggaggttgcagtgagctgatattgtgccactgcactccagcctgggcgacagagcaagactctgtctcaaaaaaaaaaaaaagagagaaactaaaattaaaatttagttttcatcccaagatgtcttttctgcctttcttttgccttatttacaagcatggataaaaatcttaaaggtttaaataaaaatgatcaatataatggtgaatcttttgagaaatctcttaactgcattggtattttttctctgtgaaagatgactatgataatctggtacaaatggttttatgtcaccaattttgctgcaagaatgggaactgcttttaaatctgtaaatagctcttaacatttgttgtatgcactcttttcttactatggctgtcaacacttgtgtagggtttaatttctaaattgttggcatgttctttttctcaggctattcagaagtaacaacatttttcatttcagacatgcaatcacctattaatgatgaaatattttaccactttgggaatatttaattagtttagtcatggagaatacttcccacattttaagattttttcaaatatcactgtcatttctattttagcattttatcaaattattgcttttttattttataataaggcttaagacagattatagacctccttaagagatgagtttcttcttctaaaaatgcatgttgatagaggactatttaggctaatcggaggaatcattaagaaagaaagttttaacactgtttatccctatctgctttccttgcactttttctgtgaaaaatattttctgtttgcaaaatcttccctgagttctgaacccagcaccatcagtaccaaagtcttatgcaatatgtatttattatgctcctgaaataggcctcttcttgatgagacccaaactattacaaaaatatcagtattcatattttactcacaattcatacccgtgcttacttagttggcattttagtgctttgaatttctatcttaaagcacagaaaaaaaaaggtaatttaatccaagtattctatcatcaaaattattgtctgattatatgaagataaatgactggcgactctggttgtgtgtgtatgtgttttgcttttactttaattcttgcaatccaaatatagaattatatatttatctattattgcctttattctttaagcacttgagtttaatgattattcttacctgagaaaggaagaaatttaattctaccagtgatgaatacttgaaattaattgaactcataccaaaagatgtaatccagtttctcagtttgaaggagaacgtttgactcactttcattgttcatgctagctgaatataatcaagacttttgatttgatttgcttttattattcaatgcagatagagcctgataagttttagaacatttaaagaagattgaaatctcagtcagtaactaaatgataaaatgagattgattggcttatactaggtacatttatttttgaaagaattaatgtaaaataatagttatttttaaagcagctaatattacactgataatttgttgctaaatttagtgctgtccacatcataggtgcttaaatatgtactggttaactagaggggggtaggaaagcaagcggttttatcttgttcttacctttttgcaggaaaagtggctttaaaaaaatttatataataaaactattttggaaattcattcttttagaaagagaccttgagataaatattttttgactctggatatttctatagttctgaacacagattttaaacccactatcaaaatgaaaacaatataaagctatattagtgagtctccatgtagcagtttgtttttatagttactgtttcatgcttaaaacttcattcttactttcattaatgttacccttcactggtatagccactcactaaataagtatatttaaaacatcaaaattttgaactaaagtttgtgattctcttattcagcaatccttatcttatgctggctgcatgagttaattcaacatccagattaaatatcctgaagtaggttctatatatttcctcatacaacagacatggaatggaaatgccactagaaactgccctgctacttttaagtctgacctttgcaggaggtacactttgctgttctatgattgtattcacctacctaaaatacaaatgaagacagaacatatcatttactgcacgatgaatttttcatttattaaatgaaaaacgtttgctagacattttaaatattaagtattttgactacacggattaatttaaatgattctatcaggcattctgatatttaacaactctattaaaatatttatagaaaaataaaagcaaattgatataaatttttgagcaattctatttttgtagaaaaaagataacctgtaattataaagatgttttttgaatgtgtagtatcctagaaaataaaagttcttgtgaaacttaaaaaatgaatgaaaaccaactaatagcatgcaagatcatagatcctgcattaaatttttatttgtgaaaatttgaaaattatgagctataacttataaagtttgccttcttatgtctaaaatcttttaaaggattatttgcatttatgtaaaactggaaatgaagttatatatgagtgcaaagaaattgacttctgctcaaatatgtgttgataccctacagtaaattgaattaaatttttatcccaactgtttgattttattatttcatggactagccttacgttaagtgaaatactatttatgttgttaccacccctaagagtgactctgatatattatggatgacccaggacggtcttaaaggtctagttttaaaaactgcctagtttgtaagtatttgaatccagttcttttctaaattttaataatttgactcaaaatttttgctacagggtcaacttttaaattgtatatttcctctgaggcacactgggcatttggagaatggttcttcactggtgtagagagccaggtttactgttggttgcaccatctgttatcaggcatgcagaaacatttttcttctggagaaacagaggggaaggtgttgttacagtgtacatgtttcctctgtgtcgtttttaagggaaataaacatgttccaaaagatgctgttaaaataaatatttgaacacgttttctgtttctaggttgctcttaattccaaacatttaaataaatgtgcatttgaatagctttaggtggtttagtctattagctgaaatggaaaagttcatgtattgacatcatcaataatacttcataaaggtttatgtatttttatgtgtttggattccataagaagttgaacttagataattttatcaagagtagcacagtgtttctcaggtgcgagccagcatacagcgagacccttcatgtgtctctggatgcacatatatcttcccaaccttaaacacagctcattgaaatacattaaagctactgaaagtgagttctgatgcaaaacacatgtgaggtgtgtaggaacaatgaaaagctagaggatctggagttagaggaggcattgagagtgcttttcccttaaacgccgtgatagtcctcccttgatctagaagtattctctttgaatccttccatctcttcctcctggtacaccagatgacttcatcagcatctccctcttttatgctaacacctttcgctgtcaacttttgagacctccccatgtatctataagcttcccagtctcttatggcaaatttaaaagtttacaaataggttctctcattgaaaaaaagcattgtagtaaagtttaaagtggagctcagacaaatcatgacttattaagagactacaggaagccattcagcatttaataataactgtttacaacatgaggcaaagctaataatgttatggttttattaagagatctgtcatctctgtttttcttaaactggtttaacagtcagagctttgtaatgtgtttcagctgaagatttattataggcttgtaaattatctaaatgttctttttagaccccatgacaggagcacagaggaactgagataactctgtgttatgagagggtggatgctggcttgtgccaaaattattttagagtcctgctctttagggaaaactttgctatggtaatgtttctttgaaaacaaatttaccagcaactgcgttacttggtgttttccaaagtacaacatccaaggcttgaaccttacccgtttctaggccagactaggccagcctctagttttgataataattcatacctttattggaatatattttggatagcagtgaagaattgaaagcagctcctaaagattggtttgtttgctttgaaaatgtttacacttattcactctaagcagtggaccattttgatatcaggccctatacataagaccaaaaccagaaatatttctaaatctcaaagatttataagtacagtacctctggctgaaaactcgttaaacatctttggatattttttctttatatctttatgtaattatttctgtaattaagtgtacattagggttatttgctacttaacaagcctaaaggtatagctgtatatagaatgtgctctgtgtttttctgtttcctgcttggtttgtttctggtatgactatgtctactttttatttaaggaattttgtgtagataatactctcactaacttgtaaataggataagttatgagattttttggtattagaatttgtaataataatgacttttagattttatttgaaaaagctacttggaaagcagtaaatagaactatagtgatatatatagatacatagatatatacttttttctgagaatgtataatatataattgtcaaagatttttggaagtctttcaaaatatacttaataccattttgagaacataccttctaatttatttccataaggctgaagaacttttatttacaaaatgtaagactagataatgtatgaatcagtgttactaggacttatcagtacttaaaatagcaacttggcattctttattttgtttcctggttgttttatttggagggataataaatgtctaagttatttccattaaaattttgaaatgtttgtatactttatgtgtgccattttaaagtatatgcaagttctaagcaataatctgcatgttatacaaggttgacatattttgtcctgaaatttttagttaacatttcaagaatgataaaatgaacaccctgtaaattacccttctccccctcccctccatgaaaaccttgggattttcttgtgctagaacactaccacaatgtggtgcaaagctttgtattttgtggaaaaaaacaataaaatcacaattatttagtgcaaaaaaaaaaaaaaaaaa

SEQ ID NO: 147 - DNA, 2364 bp, Homo sapiens
ctgctgaaaaagcagaaagagattaccagccacagacgggtcatgagcgcggtattactgctggccctcctggggttcatcctcccactgccaggagtgcaggcgctgctctgccagtttgggacagttcagcatgtgtggaaggtgtccgacctgccccggcaatggacccctaagaacaccagctgcgacagcggcttggggtgccaggacacgttgatgctcattgagagcggaccccaagtgagcctggtgctctccaagggctgcacggaggccaaggaccaggagccccgcgtcactgagcaccggatgggccccggcctctccctgatctcctacaccttcgtgtgccgccaggaggacttctgcaacaacctcgttaactccctcccgctttgggccccacagcccccagcagacccaggatccttgaggtgcccagtctgcttgtctatggaaggctgtctggaggggacaacagaagagatctgccccaaggggaccacacactgttatgatggcctcctcaggctcaggggaggaggcatcttctccaatctgagagtccagggatgcatgccccagccagtttgcaacctgctcaatgggacacaggaaattgggcccgtgggtatgactgagaactgcgatatgaaagattttctgacctgtcatcgggggaccaccattatgacacacggaaacttggctcaagaacccactgattggaccacatcgaataccgagatgtgcgaggtggggcaggtgtgtcaggagacgctgctgctcctagatgtaggactcacatcaaccctggtggggacaaaaggctgcagcactgttggggctcaaaattcccagaagaccaccatccactcagcccctcctggggtgcttgtggcctcctatacccacttctgctcctcggacctgtgcaatagtgccagcagcagcagcgttctgctgaactccctccctcctcaagctgcccctgtcccaggagaccggcagtgtcctacctgtgtgcagccccttggaacctgttcaagtggctccccccgaatgacctgccccaggggcgccactcattgttatgatgggtacattcatctctcaggaggtgggctgtccaccaaaatgagcattcagggctgcgtggcccaaccttccagcttcttgttgaaccacaccagacaaatcgggatcttctctgcgcgtgagaagcgtgatgtgcagcctcctgcctctcagcatgagggaggtggggctgagggcctggagtctctcacttggggggtggggctggcactggccccagcgctgtggtggggagtggtttgcccttcctgctaactctattacccccacgattcttcaccgctgctgaccacccacactcaacctccctctgacctcataacctaatggccttggacaccagattctttcccattctgtccatgaatcatcttccccacacacaatcattcatatctactcacctaacagcaacactggggagagcctggagcatccggacttgccctatgggagaggggacgctggaggagtggctgcatgtatctgataatacagaccctgtcctttctcccagtgctgggatttctccatgtgagggggcagcaggacacccagggatctagcgtgggggaggagaggagcctaatgagaaaatgaccatctaaagcctgcccttcattggtctggttcacgtctccaaaccagcttggatggtagcagagacttcagggtgctccagccaaacgtatttgggcatcaccatgacctgggaggggaagatgcactgagacgtatgaggcttccagcctagcagccagggccctagcacaaacaggaggctcgccccatctgagcaactgcaggagaggttagtacagtcatgcattgcttaacgacagggacgtgtcgttagaaatgtgtcgttaggtgattttatgaccataggaacattgtagcgtgcacttacaccaacccagatggtacagcccaatacacacccaggatggacgctagagtcgactgctcctaggctacaagcctgcagtgcatgttatggtgtgaatactgcaggcaatcttaacaccacggcaagtatttgtgcatctacacacatctaaacatagaaaaggtacagcataaatacactattgtcatctcagcagaccaccgttctatacgcaattcgtcgctgacccaaacgttgctatgtagcatctgcgtatcgtgggataattgacatgagggcttgagagaactccagaaaaaaatgggttagcattttcccagagctgttatcattgggtctctcttaccaccata

SEQ ID NO: 148 - DNA, 11457 bp, Homo sapiens
cgccgccgccgccgccaccgcgggagccagagctgccgggaggagcggcatccgcgccagactggagcgggagggcggcggagggcagttgctgggaatttttcagccgagagggcgagcgatccggagagagaccccgagagcttgggagcggtagggcgtgcgagcgccgcagccagcggagcaaacctcgaaatagatctggaaagccaggctcccggaggaaatgggactgtgaacgaaccggagagcaagaagggaaggaagcgccgggattgctgatgtcagaggagcccggaaagtcgcgctggaaaaatctgaagacagccggggctctgcttcttcctcaggagagacaccgccggccgcccccacacgccccctcggcgcctccgggtgccccctgagagccggcgacagcgcccagccgggctgctgcggggcgacggaggactgaggggcgcgcggagcggagaccgaggagcgacttcaggaatacagataagtgtctggtggcttgacgtggattttaatgaatttggactccatgtggatttggtcgtctccctgattccgagctgcgggcagggagaggggcctcgcgccgccctcagcagccggcggcggccgaggtagaccgagcggggacggaaggacagaccgacgtcgccgagctggaatcatgtgagggccaaccggggaaggtggagcagatgagcacacacaggagccgtctcctcaccgccgcccctctcagcatggaacagaggcggccctggccccgggccctggaggtggacagccgctctgtggtcctgctctcagtggtctgggtgctgctggcccccccagcagccggcatgcctcagttcagcaccttccactctgagaatcgtgactggaccttcaaccacttgaccgtccaccaagggacgggggccgtctatgtgggggccatcaaccgggtctataagctgacaggcaacctgaccatccaggtggctcataagacagggccagaagaggacaacaagtcttgttacccgcccctcatcgtgcagccctgcagcgaagtgctcaccctcaccaacaatgtcaacaagctgctcatcattgactactctgagaaccgcctgctggcctgtgggagcctctaccagggggtctgcaagctgctgcggctggatgacctcttcatcctggtggagccatcccacaagaaggagcactacctgtccagtgtcaacaagacgggcaccatgtacggggtgattgtgcgctctgagggtgaggatggcaagctcttcatcggcacggctgtggatgggaagcaggattacttcccgaccctgtccagccggaagctgccccgagaccctgagtcctcagccatgctcgactatgagctacacagcgattttgtctcctctctcatcaagatcccttcagacaccctggccctggtctcccactttgacatcttctacatctacggctttgctagtgggggctttgtctactttctcactgtccagcccgagacccctgagggtgtggccatcaactccgctggagacctcttctacacctcacgcatcgtgcggctctgcaaggatgaccccaagttccactcatacgtgtccctgcccttcggctgcacccgggccggggtggaataccgcctcctgcaggctgcttacctggccaagcctggggactcactggcccaggccttcaatatcaccagccaggacgatgtactctttgccatcttctccaaagggcagaagcagtatcaccacccgcccgatgactctgccctgtgtgccttccctatccgggccatcaacttgcagatcaaggagcgcctgcagtcctgctaccagggcgagggcaacctggagctcaactggctgctggggaaggacgtccagtgcaccaaggcgcctgtccccatcgatgataacttctgtggactggacatcaaccagcccctgggaggctcaactccagtggagggcctgaccctgtacaccaccagcagggaccgcatgacctctgtggcctcctacgtttacaacggctacagcgtggtttttgtggggactaagagtggcaagctgaaaaagattcgggccgacggtcccccccatggtggggtccagtacgagatggtctctgtgctcaaggacggaagccccatcctccgggacatggccttctccattgatcagcgctacctgtacgtcatgtctgagagacaggtcaccagggtccccgtggagtcatgtgagcagtatacgacttgtggggagtgcctgagctctggggaccctcactgtggctggtgtgccctgcacaacatgtgctcccgcagggacaaatgccaacaggcctgggaacctaatcgatttgctgccagcatcagccagtgtgtgagccttgcagtgcatcccagcagcatctcagtatctgagcacagccggttgcttagcctggtagtgagtgatgctcctgatctatctgcgggtatcgcctgtgcctttgggaacctgacagaggtggaggggcaggtgtccgggagccaggtcatctgcatctcacctgggcccaaggatgtccctgtcatcccgctggatcaagactggtttgggctggagctacagctgaggtccaaggagacagggaagatatttgtcagcaccgagttcaagttttacaactgcagtgcccaccaactgtgcctgtcctgtgtcaacagcgccttccgctgccattggtgcaagtaccgcaacctctgcactcatgaccccaccacctgctccttccaggagggccggatcaatatttcagaggactgtccccagctggtgcccacagaggagatcttgattccagtcggggaggtaaagccaatcacccttaaggcgcgaaatctgccccagccgcagtccggccagcgaggctatgagtgtgtcctcaacatacaaggagccatccaccgggtccccgctctgcgcttcaacagctccagcgttcagtgtcagaacagctcgtaccagtatgatggcatggacatcagcaatctggccgtggatttcgctgtggtgtggaacggcaatttcatcattgacaaccctcaggacctgaaagtccatctctacaagtgtgcagcccagcgggagagctgcggcctctgcctcaaggccgaccggaagtttgagtgtggctggtgcagcggcgagcgcaggtgcaccctccaccagcactgtaccagcccttccagcccctggctcgactggtccagccacaatgtcaagtgctccaaccctcaaatcaccgagattttgacggtgtctggaccgccggaaggagggacgcgagtgaccatccatggcgtgaacctgggtctggacttctccgagatcgcccaccatgtgcaggtggctggggtgccctgcacgcccctcccaggggaatacatcatcgctgagcagattgtctgtgagatgggccatgccctcgtgggaaccacctccgggccagtacgcctgtgtattggcgagtgtaagccagagttcatgacgaagtcccatcagcagtacaccttcgtgaacccttctgtgctgtcactcaacccaatccgaggtcccgagtcaggaggcactatggtgaccattaccggccattaccttggggctgggagcagcgtggcagtctacctgggcaaccagacctgcgagttctacgggaggtcaatgagtgagatcgtgtgtgtctcacccccatcatccaatggccttggcccggtccctgtttctgtgagtgtcgaccgagcccatgtggatagcaacctgcagtttgagtacatagatgaccctcgggtccagcgcatcgagccagagtggagcattgccagtggccacacacccctgaccatcacaggcttcaacctggatgtcattcaggagccaaggatccgagtcaaattcaatggcaaagaatctgtcaatgtgtgtaaagttgtgaacacaaccaccctcacctgcctggcaccctctctgaccacggactaccgccctggcctggacactgtggaacgcccagatgagtttggatttgtctttaacaatgtccaatccttgctaatttacaacgacaccaagtttatctactaccccaacccgacctttgaactgcttagccctactggagtcttggatcaaaagccaggatcgcccatcattctgaagggcaaaaacctctgccctcctgcctctggaggggccaaactcaactacactgtgctcatcggagagaccccttgtgctgtcaccgtatctgagacccagcttctctgcgagcctcccaacctcaccgggcagcacaaggtcatggttcacgtgggcgggatggtgttctcgcctggctcggtgagtgtcatctcagacagcttgctgaccctgccagccatcgtcagcatcgcggccggcggcagcctcctcctcatcatcgtcatcatcgtcctcattgcctacaagcgcaagtctcgagaaaatgacctcactctcaagcggctgcaaatgcagatggacaatctggagtcccgtgtggccttggagtgcaaggaagcttttgctgagctccagacggatatcaatgagttgaccagtgacctggaccgctcaggaatcccttacctggactatcgtacctacgctatgcgagtcctgttcccgggcatcgaggaccaccccgtcctgcgggagctggaggtacaaggaaacgggcagcagcacgtggagaaggccctgaagctctttgcccagctcatcaacaacaaggtgttcctgctgaccttcatccgcaccctggagctgcagcgcagtttctccatgcgcgaccggggcaacgtggcttcgctcatcatgaccggcctgcagggccgcctggaatatgccactgatgtcctcaagcagctgctctctgacctcatcgataagaacctggagaacaagaaccaccccaagctgctactccggaggacagagtctgtggctgaaaagatgctgaccaattggttcgccttcctcctgcacaagttcctaaaggagtgcgcaggggagccactcttcatgctatactgtgccatcaagcagcagatggagaagggccccattgatgccatcacgggcgaggcccgctactccctgagcgaggacaagctcatccggcagcagatcgagtacaagaccctgatcctgaactgcgtcaaccctgacaacgagaacagtccagagatcccagtgaaggtgttaaactgtgacaccatcacacaggtcaaggagaagattcttgatgccgtgtataagaatgtgccctattcccagcggccgagggcagtggacatggacttggagtggcgccaaggccggatcgcccgggtcgtgctgcaagatgaggacatcaccaccaagattgagggtgactggaagcggctcaacacactgatgcattatcaggtgtcagacaggtcggtggtggctctggtccccaaacagacctcctcctacaacatccctgcctctgccagcatctcccggacgtccatcagcagatacgactcctccttcaggtatacgggcagccccgacagcctgcggtcccgggccccgatgatcaccccagacctggaaagtggggtcaaggtgtggcatctggtgaagaaccatgaccacggtgaccagaaggagggtgaccggggcagcaagatggtgtccgagatctacctgacccggctactggccaccaagggcaccctgcagaagtttgtggacgacttgtttgagaccttgttcagcactgtgcaccggggcagcgctctccccctggccatcaagtacatgtttgatttcctagatgagcaggcagacaggcacagcatccatgacacagatgtgcggcacacctggaaaagcaactgcctccctctgcgcttctgggtgaacgtgattaagaacccccagttcgtgtttgacatccacaagggcagcatcacggacgcctgcctctctgtggtggcccagaccttcatggactcttgttcaacgtcagagcaccggctgggcaaggactccccctccaacaagctgctctatgccaaggacatccccagctacaagagctgggtggagagatactacgcagacatcgccaagctcccagccatcagtgaccaggacatgaatgcctacctcgccgagcagtcccgcctgcacgccgtggagttcaacatgctgagtgccctcaatgagatctactcctatgtcagcaagtatagtgaggagctcatcggggccctagagcaggatgagcaggcacggcggcagcggctggcttataaggtggagcagctcattaatgccatgtccattgagagctgagaggaggagcctcgcattcctgggaagagggacctgtccaagctgtcacactgggagtctcagatggaaggacaagtgatggggatcaggccccagagcttgctgtcccctgagaccccatcctggggagaggggaggactcctctccctacgccagccaagtttcgtcatagccagttccagctgggagagacagtgggcgtcgtccatcctcagtgagaacaccagagaacccggggccgggagaaggtggttcttcaagccgagaggcacgagctggggacagttctgcctctgtgactgctgctttgcatgaaaactcatttgatgtatattggggaaataatgagaactttatttaatttttttaagaaaaagggaaaaaaacagaaataaaacaaaaagccgccctgttaatcccgtccaacttttgtttaattctgatttctgtctcccttccatcttttctcccattcctccttctttatataatgcctatttccaaatgccagagaaagcagagatgctgagagacattggagagaaaatgactgtctccttttccttgaaattaaaaaaaaaaaaaaaaagagaaagaggagaagaagaatgatgagcacaagtatgcaccaaacacttcgcaaaaacagaggccagtaaaacctggaattatcccggcagccagaggagtatggaacttccagaactttgcacaaattgcaaagccatcaagagctcaccctggctgactggaaactgagctttatctaccacacacctgtatattctcatcttttgagaggagatgtgtacctagatagtaccaatgctttttgctactgttttttgttttgttttatttaatcctaaacctcaacaaatgaggagctggtctttgatatgtttcctttcaatttccctaaagttactatgagaagtggggtgaggtgggcctctcccagaccagacacctggcagccctgcctcatatcaatccctgtcataaaccaggcaccctggggaaacggcctggaggtgtgtgggccaggcctccacgaggttccatttgaaagttgatttggagacataggtgtttgactttggagttcactccaatcatccagtggtccctggcaattaaaaagaaaacaaaaatcaaacactgtttacagcaagcaatacttgaagagcataggttacagaagctgcagtatttattattatgctttctttctttcattctctcgtgcctggagaggggagaccacccttcgctcatatacggaagctcctgaccatctgggcctacagcacttcctcagtagaaatgactgtggcatgcccacgttactaccttctgcctctctttctgcctctcacggacttgtgagtgtgaaggacaagtggatgacttctcactggactttccttctctgtctcttctgatgatgcctaaaactatggataaccaattctcctgagtgtagattccaaacaaagagaccaaagctccatgcccaggtccaaaggccccatagaagccagtgggagtcatcgagaggaaaggcgctctgtgagtgtcaggaccttggtggccaggatagccatcagagtgtccaggcctcccacattaccttggatccgagcagccagctccaactgttctgcaagcagcactggagtcagggggtaggaggacaagtggaagcaaaggtgtgggactggggaagacaaagaggaacaagctgcccttcctcacttttcaaagggtcaggaatcctaggctatgatgctgggaagctagaccagctcctccaagagagactagaccagggtcattttctctgttattaactctgggctccagcttctccgtgccctgctttacctccaagtggttccaatttccaaaggccctgctgaccacatgtgattcccaggagagggctgggggaggggagcgcagaggtctggcttccatccttggcgtgtagctttggatcgctgtctaaccacacagcagacgttgcccggtctccccagctctagtttcttgcctgaatgcggctgacaaatgggaagagaaaagcattcagcaaaatactcaggaaacttgctgttttcattataattcacaaccagccatgccaaggccactttcttttgaaaatccacttctttaaagtttctcaggccctattagtagcctgaaggaaatactaatgactggccttccgcactaagccaaagtgtttgctcttcatagcactcaaagcttatcagcgcagagcccataatttatggagataaaaggaaaggagatataggtaagaagagtgtgaccaggagaccttatgctacctgtaaaaaagttcagcccaccccatctaacttctgagctctgtttgggtgaagattttctggccgcatggctgctcagactggcatccaggctttgctccaccaagaagttaaaggcagtcggacatctcagtagcatctctaccagcccttaactcaatgcatctacctggcatctcccagcagttacttttggagacgattcactgcccctggggcgtttccttgaaggtttgtggagagcgtggagaatgatggggcaatggccaattggagggtggagagtgaagagccggagctggctgtgagtggtttggccacatttctcaggattccatgagagacttggggaacttgggctgacaaaggaagtagcctggggcatccttaaggaaggaattaagaaaagggaaaaagctggactcaagccacgccatgagggtgaaaggttataaggccctgccccctttccagctgcccacctgttcctcctccacacctcttcgctttgggccaccaagaaccaatgaagtccacaccctttggatgagaaaaagagggagttggttggcctctcttctccctgttatccaatttgaggatattttgaccttgggtaaggatgaagtgttaaagccacagctcctctccacaagaagccattcatcttgggggaggcagagagggaagtctctctccaaagtctatccagcttcgcttcgtttcattgatctgcacaagagacaatgctctggaaaaggaagaggaccccagaagggtgcttggcaagacagaggatgctaatgggcaatggagagcactccctccagctggcccctgctgctgcctcccgtcctctgcatggggtcaggtgcttctgtgcttgctgtcctacctctctccacagcagggctctcaaaaccattttgatcccccattggcagagggttcccctctttacagagttcagtcattaaaagcatggatcagctgttaatctcattggaggagggaactgtttcctgcattcattcatctgggaaccttcttgagtagccactgtctgccagccactgctctagagatgggaaaacagcacggaacaaaaccaaggtctttcttccagcgaatttatatccttcaggaagctggttcctgccaccaacttagcaggcaacagttctcctcccctagtggcacagggtaccagttttgtaggaaaagtggtccagcaaaggaagaaagcagaccaacccagctgccttaccttattctggggccattcccccagcgatgagagctgctcttgtttctactgccaccatctcttctggctgcacttcacctgctgcttgagcttctgaccttccttcagttccaccaaatgaggacaggaaatagcagtcaagacccctggccctgctgagcgtgaaacagaagcaatggatgagtgctggacgaagaatggcctgggcagaacaaatagggagcatttgaaagcttctggctgataaatctccaggtgcatcccggttgccacgcctgcccccattaacctgctcctggtaaatactgatccagcagctgctccaggagaggccgtctttttttcccagccacgctgtgtcttgcatgagactcctggggcctgggcacagagagaaaagaattgagactcaggaggctcagtgggtgagaaaatgcaaagtggcttcacagacacagggctgtgggagcagatcgacggggaacttgggagatgaacttcagggccttccgacgccttgtctcaggaacatgctttgagaaaaatggtagcatcctttccataactcagtctctcttccctagtttccctgaagtgtgacgttttagtatctggagctcagtgatccccatgaatgagggataaagtttcactcttggtattttctaactagtgctagggaaagtcctgagacacgatcacagccactgcttggcatacagggcctccacccaataagcaaactggagattcctcagcctctcgtggacacccacatctcattcttctcacagcagagaagctctcccttcagcctgagctgtcttctttctgctgcagtgcagcctgctccctcctaccctggcctcaaggaaggtaggaaacatcttctgcatttcaaagtcctcactttgacttatttggccttcatcttggcatggaaggtggcaggcagaatggaaatactccccccaaacagaacagatattcttgcgtgtgtaagggcagaagggacaagctctctatcccatgagactaggggccggagcccacctgcctttccccacaacttttcctgctcaaacccactcctcttgacacactggaatctgtattatatatatttttaagaaaatacaatgatggttgtctggttttgttgtttttacaggtgttgtggaataaaaactgtaagaaaattaagtatttaaaatgttccaataaagtggggttttttgttattctaatatattattgtgtacctattgtaaatatgaaacactcctattttgcaagctgaggacacaatttgtactgttgttatatataaataaagtttactgaattaaaaaaaccttaaatctttaaataaaaaaaaaaaaaaaa

SEQ ID NO: 149 - DNA, 8082 bp, Homo sapiens
gtgacggcctcggccgcgggcgtttacactggctctgcctccggcatctcttcgccggtgcgtcctcgccgcgcccgtaggtcccggcagccgggccccgcctccttcggagtccgagcgatgggcggggaaagggacaggcaggtatagctctgtcggcgccgcggtgtccacctcagtcaggccacggtggaagacgcgtgccgcggcgcctggttgcctgcagcggcccggacccgagaggaagctgaaccatctatctccagaaatgtcttcagaaagtaaagagcaacataacgtttcacccagagactcagctgaaggaaatgacagttatccatctgggatccatctggaacttcaaagggaatcaagtactgacttcaagcaatttgagaccaatgatcaatgcagaccttatcataggatccttattgagcgtcaagagaaatcagatacaaacttcaaggagtttgttattaaaaagctgcagaagaattgccagtgcagtccagccaaagccaaaaatatgattttaggtttccttcctgttttgcagtggctcccaaaatacgacctaaagaaaaacattttaggggatgtgatgtcaggcttgattgtgggcatattattggtgccccagtccattgcttattccctgctggctggccaagaacctgtctatggtctgtacacatctttttttgccagcatcatttattttctcttgggtacctcccgtcacatctctgtgggcatttttggagtactgtgccttatgattggtgagacagttgaccgagaactacagaaagctggctatgacaatgcccatagtgctccttccttaggaatggtttcaaatgggagcacattattaaatcatacatcagacaggatatgtgacaaaagttgctatgcaattatggttggcagcactgtaacctttatagctggagtttatcaggtagcgatgggcttctttcaagtgggttttgtttctgtctacctctcagatgccttgctgagtggatttgtcactggtgcctccttcactattcttacatctcaggccaagtatcttcttgggctcaaccttcctcggactaatggtgtgggctcactcatcactacctggatacatgtcttcagaaacatccataagaccaatctctgtgatcttatcaccagccttttgtgccttttggttcttttgccaaccaaagaactcaatgaacacttcaaatccaagcttaaggcaccgattcctattgaacttgttgttgttgtagcagccacattagcctctcattttggaaaactacatgaaaattataattctagtattgctggacatattcccactgggtttatgccacccaaagtaccagaatggaacctaattcctagtgtggctgtagatgcaatagctatttccatcattggttttgctatcactgtatcactttctgagatgtttgccaagaaacatggttacacagtcaaagcaaaccaggaaatgtatgccattggcttttgtaatatcatcccttccttcttccactgttttactactagtgcagctcttgcaaagacattggttaaagaatcaacaggctgccatactcagctttctggtgtggtaacagccctggttcttttgttggtcctcctagtaatagctcctttgttctattcccttcaaaaaagtgtccttggtgtgatcacaattgtaaatctacggggagcccttcgtaaatttagggatcttcccaaaatgtggagtattagtagaatggatacagttatctggtttgttactatgctgtcctctgcactgctaagtactgaaataggcctacttgttggggtttgtttttctatattttgtgtcatcctccgcactcagaagccaaagagttcactgcttggcttggtggaagagtctgaggtctttgaatctgtgtctgcttacaagaaccttcagattaagccaggcatcaagattttccgctttgtagcccctctctactacataaacaaagaatgctttaaatctgctttatacaaacaaactgtcaacccaatcttaataaaggtggcttggaagaaggcagcaaagagaaagatcaaagaaaaagtagtgactcttggtggaatccaggatgaaatgtcagtgcaactttcccatgatcccttggagctgcatactatagtgattgactgcagtgcaattcaatttttagatacagcagggatccacacactgaaagaagttcgcagagattatgaagccattggaatccaggttctgctggctcagtgcaatcccactgtgagggattccctaaccaacggagaatattgcaaaaaggaagaagaaaaccttctcttctatagtgtgtatgaagcgatggcttttgcagaagtatctaaaaatcagaaaggagtatgtgttcccaatggtctgagtcttagtagtgattaattgagaaggtagatagaagaatgtctagccaataggttaaaatttcaagtgtccaacatttcccagttccacagtgggaaattttgcacacttgaaattttaaccaagtggctagatattattcctcctttgaagctaatggcatttgtatatacacactgcagcagagcttgtagctggacagagtcaaaaagaagaaaatacggtttcaggctttcttgcagatatgaagtattcttggaatgcaataagtatgtattgaactgtactgtaaagtagctccaaaacttaattactctcctgttttaggggttatacatttggactgtgcattctccaagagatgaagcggtgaagttgggatttacattggaagtgctgtagacttctttatgtggctcagtggagagagggaaagaatgttgcacctgctctagtaccataggtcaagaggcttctggatcacaaagtcataactagacaggtttgttcttgtagttttctatccccagtctttgctccccagatggcagtagtttttagtaggaaagtgccattcctgtccttaaggcacagtctcatcagaagtctaatacctgggcaggtttataacatcctgagagccagcctgacattagacagaataccctttgtaatacattggaaatttttactcatgcctttttgtttaggataaataggtaagcacaaagagctcttcaaaatcagaaaaaacaataggagtccttccttgtcttttctgtgatctctgtccttgtttctgagactttctctaccattaagctctattttagctttcagttattctagtttgtttcccatggaatctgtcctaaactggtgtttttgtcagtgacagtcttgccagtcagcaatttctaacagcattttaaatgagtttgatgtacagtaaatattgatgacaatgacagcttttaactcttcaagtcacctaaagctattatgcaggaggatttagaagtcacattcataaaacccaagtgctatgggtgtattattcatgatagctggcccacaggtcatgaattgaggaggaatttgctttcaaaaagcaagaatgtccaacactgaaagtttatagttttatatttggaccttgaaaggtaagaaaaaaccaggttctccaaagttaggaatagggaactaatttatgaaacagccatcttaaaaaaaaaaaaagtaaactgcaaaagtacaaaatcatttttcaatctgttcccagtttctaaacaattttaaatatttatgagaagcaaaccctatgtgtagggcatctgttggagtgggatgcttttagacatatattaagtatgtacatgtttaatatgtatatttaaaatgcatatatattttattatatctatattatcctatatagatatatgtaacttagctttattgttagctccataagctgccagtgttgcttttctgttggtagagctctcccatttggtgacatggaaaatacctttccattatcacaacaaagcagttgctcagtagaaagtctagatttctgtcttataggtgatttctgtcttataggtgattataatcaagtgtaggcttcctgaattttgacatccttttagaacttgggtctggaattccagaaatgttaattgctgcttgtatttgttcttgtttgttttttagccagtatttgccctttctatccagccttatgaataatagcagtaaaatcacagtatcttggtcagtctttatttttttccttttttcttttttaagagacagtcatccaggccagagtgcagtttgatgatagcttactgaagcttcccactcctgggctcaagttatccttccattttggcctcctgagtagctagaccataggtatgcatcaccacaccctgctaattttttaaatttttttctagagagagggtctcactgtgttgcccaggctggtctcaaactccaggctcaagcaatccttcagcctcagcctcccagagtgttgggattacaggcgtgagccactgcacttggccaagttatttatttttaatctctcttgcccttctcccaaggcaggcttaagttgagactattataggtgtctaataacctgtgacagagtaatgagtacatgcttaagatgttataattagccaacaccaacacagcaaaaaatataattccagccaaagattctggaaaatccctcagaaggagggataacaggatttgacctttaccagcgatttctgtccatatgtggatgtaaacagttctggaacgttatgcatgcagttagcgaatccttgaattatgttctggtttgtacttgtcccatccatccaaacaagagattctgcttttggtagccatctgtagaaacatttaagatgtcactagaatttacatttcatcctctctacttgggttgaggttgcctatacttgcatattgttaaaatgttttggttgctgatattcagaggaatgaaacctggaaccaaagcctaatttgccgataaaaaaactgttttcggccaggtgcagtggctcatgcctgtaatcccagcacgttgggaggccgaggcgggtggatcacctgaagtcaggagttcgagaccatcctggctaacactgtgaaaccccgtctctactaaaaatacaaaaaattagcggggcatggtggcacgcgcctgtagtcccagctactcaggaggctgaggcaggagaattacttgaacccgggaggcggaggttgcagtaagcagagattgtgccactggactccagcctgggtgacagagcgagactccgtctcaaacaaacaaacaaaaaactgttttcatttgctctcttgaccaaaggataggactttagttctttaagcattattttaaacactatattgatacaaaaatatcttgcttactctaaactttagagtctaaatgaagctttttctcagtacaagattctgagtatcataaaatggttatttaattgaaacgtagtgtggtatactcttgatggttagaactcttacagccttatttatttttaagtttgttacagccaaagggttggagtgtgccagtgcacaggtagactaaggaaaacattatagaggagtgaagagaacagaccattgaaaagactattatctgaccagcggaggcagaaaagagaggaacccagttgaataggatccaatccctggttagcctctacacaataatagggagacaaggattaggagccatacctcccagagcaaggtatctttctagagcaaatttctctttctagaaggggagggtcacagggtcacagattcaccaaagctgaaagggctgaggagctcatggtagcctgggctgacctactctggagcacggtgtcttccttctaaactgagtgactgtagtactatctgtgcctctgatggtaataaaactgacaagatgtctaatttttttttaagtaggaccaaaggaaaacaagatttagatagtctgactttgcttttgaacaacagacattgcaagtcaaaattgttgtcaaatttacatatggtaaatgatgaactttaaaaatgtgtccaggtgttagatgagttcattagactcttttaatgctaatggctagtacgtttaaacaaaacagcagttctctgctgcaatattcccattgaccacttaaatgaccataagtggtcatttaagaacatgttagggttagccctgatctgaatataaaagtgagaaaagggctacagtgcatttcttggtaacttaaactgagtcttgaagttataatgatccattcgagttctgtgatccttattgttcttaattgtgtttctctacgtattgttacagatgagccatacgtttctttgtatcaatgtagacatgacttcagatacctctgaggacctacccagcagtctaggaccctgggccaagtgctgggactatggtactaaatccagtagatgggctgtgtagcaactctcccagggaacacactagggtacttagggaggtgctttgtggagcatgttgaagctttgagatctgagcaggaggcagtgatgtccctggtctattcagggaaagatttcagtgtgaaatggtaaacatccaattgacaggatttagattttgcttagtttttctgctttttaatgtttctatcccccatctcagtgttttctttatccatcccagtgatgccttatttgaaactgggcttaaactgcaaaaagaatgaagttggatttaggaagctgttagatcattgagtggtgttgagagtgaagtttcactagcagggaagtttccttgagcctaaaataaaaagaaaaaattaaaaagaatcagtttttttaattaaaaaaatagaaagctgttaggctcctaattcgtggggtttttttttgtaaaaacagtttagataatcctgaatgcaatcattaacttggttgctaattacaagaatgaaaattataatggaaaaggacaaaataatataccagctggtttgttattatagtccgtgtattaaaatactattgaaatacgttaaaggtaaatttttaaggtttaaaaaaaatttagtaacttacagggatggagaatttagatgtcagaggtggggagatttatttttataaggtaatttttatcctgataaggacttaaaaaaaagttttgcaactgaaattttaaagtaaacatgttaagtacagttaaaaagtaagcattgtagtaaatagtggattctctggtgtgtattttttatctcagtgttgaaaattggaaaagaatggactgaagtctaaaaactggaataatgaaggacactaaatgcctttattgtagatactatgtttgtaagtctatagctaagcaacttaagccaaaaaggtctttcaactgaagctttaatcaacttattttggagatgttctcttcccttatctcatgcgtcatccctaaaataataagatacatgggatcaaatagcccttgccttttcaacacaaatcagttggaaaattatggtttgagtcctgttgctgccatggcttctgtttctcagaaatgagtgtgtatgaacataccaatctatgtaataggctacctttttttgtcttctttggaactttgtacacaaaccaagacaatatcagggtgacaggtgaatgaacttaaattctcagtcttgtctattcaccaaaaaagtatactgcctgttttttctttaattattcaaggttgatgacttttaggaacatgttttatactgtattttttaattaaagcaagtgccttgatgtaattccatgtaaatcattgcttaaccctcttatgggatgaggatgagttattaatgtattgcagcctactggaaaggagggggagttggttaatagcagatacttttcttctagaagcttatgttttatgctgtttattatgtaagatcctgtatgtgtgttgagatttagaggtttcatttgttttgtctgctaataaattgttactctaataataaaaaaaa

SEQ ID NO: 150 - DNA, 7110 bp, Homo sapiens
tgactgaggccggagcacggcaaagatgagcctgcccgcccgcctgctgcctggatgcggagggtgagggctggcgcacgggaggccgctggctgcgcattctgggcgccgagtgcccgggatgagctcacgcccgcgtctgcggctctctccacctgccgacctgccgggggcccactgagctgacggcgcacctgggctccggccgcagcgtggggcgcggcgcccgggagcaggtgtgcaggagcgcagcgcgcggcgagcgcagccctcgctccggagcccggccgcgccgcgtgcccgggcggctaggcagcggcggcggcggcggcgggcggcgggcgggcggcggcccccgggcaggtgccgagcggcgagcggagccgggccgggcggagcgcggggggcgaggccggcgcgtcgctcgcgggaggccggggagcggcaggggcatgtggatactggctctctccttgttccagagcttcgcgaatgttttcagtgaagacctacactccagcctctactttgtcaatgcatctctgcaagaggtagtgtttgccagcaccacggggactctggtgccctgccccgcagcaggcatccctcctgtgactctcagatggtacctagccacgggcgaggagatctacgatgtccccgggatccgccacgtccaccccaacggcactctccaaattttccccttccctccttcaagcttcagtaccttaatccatgataatacttattattgcacagctgaaaatccttcagggaaaattagaagtcaggatgtccacatcaaggctgttttacgggagccctatacagtccgtgtggaggaccagaaaaccatgagaggcaatgttgcggtcttcaagtgcattatcccctcctcggtggaggcgtacatcactgtcgtctcatgggagaaagacactgtttcacttgtctcaggatctagatttctcatcacatccacgggagccttgtatattaaagatgtacagaatgaagatggattgtataactaccgctgcatcacgcggcatcgatacaccggagagacgaggcagagcaacagcgccagactttttgtatcagacccagcgaactcagccccatccatactggatgggtttgaccatcgcaaagccatggctgggcagcgtgtggagctgccttgcaaagcgctcgggcaccctgagccagattaccgctggctgaaggacaacatgcccctggaactttcagggaggttccagaagaccgtgacggggctgctcattgagaacattcgcccctcggactcaggcagctatgtttgtgaagtgtccaacagatacggaactgctaaggtgataggccgcctgtacgtgaaacagccactgaaagccaccatcagtcccaggaaggttaaaagcagcgtgggtagccaagtttccttgtcctgcagcgtgacaggaactgaggaccaggaactctcctggtaccgcaatggtgaaatcctcaaccctggaaaaaatgtgaggatcacagggatcaaccacgaaaaccttataatggatcacatggtcaaaagtgacgggggcgcataccagtgctttgtgcgcaaggacaagctgtccgctcaagactatgtgcaggtggtccttgaagatggaactcccaaaattatttctgcctttagtgaaaaggtggtgagtccagcagagccggtttcccttatgtgcaacgtgaagggaacacctttgcccacgatcacgtggaccctggacgatgacccgattctcaagggtggcagtcaccgcatcagccagatgatcacgtcggaggggaacgtggtcagctacctgaacatctccagctcccaggtccgggacgggggagtctaccgctgcactgccaacaactcggcgggagtcgtcctgtaccaggctcgaataaacgtaagagggcctgcaagcattcgaccaatgaaaaacatcacagcaatagcaggacgggacacatacattcactgtcgtgtgattggctatccgtattactccattaaatggtacaagaactctaacctgcttcctttcaaccaccgccaagtggcatttgagaacaatggaactcttaaactttcagatgtgcaaaaggaagtggacgagggggagtacacgtgcaacgtgttggttcaaccacaactctccaccagccagagcgtccacgtgaccgtgaaagttccgcctttcatacaaccctttgagtttccaagattctccattgggcagcgggtcttcatcccctgtgttgtggtctcaggggacttacccatcacgatcacctggcagaaggatggccggccaatccctgggagccttggggtgaccattgacaatattgacttcacgagctccttgaggatttccaatctctcgctcatgcacaatgggaattacacctgcatagcccggaatgaggccgccgctgtggagcaccaaagccagttgattgtcagagttcctcccaagtttgtggttcagccacgggaccaggacgggatttatggcaaagcagtcatcctcaattgttctgctgagggttaccctgtacctaccatcgtgtggaaattctctaaaggtgctggggttccccagttccagccaattgccctaaatggccgaatccaagttctcagcaatgggtcgttgctgatcaagcatgtcgtggaggaagacagtggctactacctctgcaaggtcagcaacgatgtgggcgcagacgtcagcaagtccatgtacctcacggttaaaattcctgcgatgataacatcctatccaaatactaccctggccacgcaggggcagaaaaaggagatgagctgcacggcgcatggtgagaagcccattatagtccgctgggagaaggaggaccgaatcattaaccctgagatggcccgttatcttgtgtccaccaaggaggtgggagaagaggtgatttctactctgcagattttgccaactgtgagagaagattctggtttcttttcctgccatgctattaattcttatggggaggaccgtggaataattcagctcacagtgcaagagcccccagaccctcccgaaattgagatcaaagatgtcaaagcacgcacaattacgctcaggtggaccatggggtttgatggaaacagtcccatcacaggctacgatattgaatgcaaaaataaatcagactcctgggattctgctcagagaaccaaagatgtttcccctcagctgaactcggccaccatcattgatatccacccttcctccacctacagcatccgcatgtacgccaagaaccggattggcaagagcgagcccagcaacgagctcaccatcacggcggacgaggcagctcctgatggtccacctcaggaagttcacctggagcctatatcatctcagagcatcagggtcacatggaaggctcccaagaaacatttgcaaaatgggattatccgtggctaccaaataggttaccgagagtacagcactgggggtaacttccaattcaacattatcagtgtcgacaccagcggggacagtgaggtttacaccctggacaacctgaataagttcactcagtacggcctggtggtgcaggcctgtaaccgggccggcacggggccttcttctcaggaaatcatcaccaccactctcgaggatgtgcccagttacccccccgaaaatgtccaagccatagcaacatcaccagaaagcatatcaatatcctggtccacactttccaaggaagccttgaatggaattctccaggggttcagagtcatttactgggccaacctcatggacggagagctgggtgagattaaaaacatcaccaccacacagccttcactggagctggacgggctggaaaagtacaccaactacagcatccaggtgctggccttcacccgcgcaggagacggggtcaggagtgagcagatcttcacccggaccaaagaggatgttccaggtcctcccgcgggtgtgaaggcagcggcggcctcagcctccatggtctttgtgtcctggcttccccctctcaagctgaacggcatcatccgaaagtacactgtattctgctcccacccctatcccacagtgatcagcgagtttgaggcctctcccgactcgttttcctacagaattcccaacctgagtaggaatcgtcagtacagcgtctgggtggtggctgttacttcagccggaagaggcaacagcagtgaaatcatcacagtcgagccactagcaaaagctcctgcacgaatcctgaccttcagtgggacagtgactactccatggatgaaagacattgtcttgccttgtaaggctgttggggacccttctcctgcagtcaaatggatgaaagacagtaacgggacacccagtctagtaacgattgatgggcggaggagcatctttagcaacggaagcttcattattcgcacggtgaaagcagaagactccggctattacagctgcattgccaataacaactggggatctgatgaaattattttaaacttacaagtacaagttccaccagatcagcctcggcttacagtctccaagaccacgtcttcctccatcaccctttcttggctccctggagacaacgggggcagctctatcagaggatacatactgcagtactccgaggacaatagtgagcagtgggggagttttccaatcagccccagcgaacgttcctatcgcttggaaaatctcaaatgtgggacttggtataagttcacactgacagcccaaaatggagtgggcccagggcgcataagtgaaatcatagaagcaaagaccttaggaaaagagccccagttctcaaaggagcaggagctgtttgccagcatcaacaccacacgcgtgaggctgaacctcattggctggaatgatggcggctgccccatcacctccttcacactagagtacaggccctttgggaccacagtttggaccacagctcagaggacctctctctccaagtcctacatcctgtatgacctgcaggaagccacctggtatgagctgcagatgcgggtgtgcaacagtgcgggctgcgcggagaagcaggccaacttcgctacgctgaactacgatggcagtacaattcctccactcattaagtcagttgtccaaaacgaagaagggctgacgaccaacgaggggctcaagatgctggtgaccatctcctgtatcctggtgggggtcttgctgctgtttgtgctcctgctggttgtgcggaggaggcggcgggagcagaggctaaagaggctgcgagatgcaaagagtttagctgaaatgctcatgagtaagaatacccggacttcagatacgttaagcaagcaacagcagaccctgcgaatgcacatcgacatacccagggctcagcttttgattgaagagagagacacgatggagaccattgatgatcgctccacggttctgttgacggatgctgactttggagaggcagctaagcagaagtccctgacggtcactcacacggtccattaccaatcggtgtctcaggccactgggcccttagtggatgtttcagacgctcggccgggaacgaatcccaccaccaggaggaatgccaaggctgggcccacagcgagaaaccgctatgccagccagtggaccctcaaccgaccccaccccaccatctcagcacacaccctcaccacagactggaggctgccaacacccagggctgcaggatcagtagacaaagagagcgacagttacagcgtcagcccctcgcaagacacagatcgagcaagaagcagcatggtctccacagaaagtgcctcctccacttacgaagaactggccagggcctacgaacacgccaagatggaagagcaactgaggcacgccaagttcaccatcacggagtgcttcatatcagacacgtcatcggagcagttgacggcagggacaaatgagtacacggacagtctgacctccagcaccccttccgaatcgggaatctgcaggttcactgcatctccccccaaacctcaggatggaggaagagtaatgaatatggcagttccaaaggcacatcggccaggtgacctcatacatttgcctccataccttagaatggactttttgttaaaccgaggtggtccaggcaccagcagggacctgagcttaggacaagcatgcttggaacctcagaaaagccggaccctgaagcgccccacggtcctggagcccatcccgatggaagccgcctcctccgcctcctccacgagagaaggacagtcgtggcagccgggggccgtggccacattacctcagcgggagggagcagagctgggacaggcagctaaaatgagcagctcccaagaatcactgctcgactcccggggccatttgaaaggaaacaatccttacgcaaaatcttacaccctggtataacagacagcatgactggacagcggttgtaaatacaattcaaacaattcaatcaaagctaccttttttttacggaattccaatatttataattaaagaaaattgccaaaatatattaaaaaaaaaaaagagaaaatactgaaaccacagacagtgcaaagactctcctgctttttttctgtctgagtgtgagctccatccgcctgggcatctgattttttgggaaagaagtccagttttatgatcttcacaggctattgcatttttactgattttctacaaaagtgcatgggggggattaattaaaccttctgactggaagttctatcacacaagaggcaagaaagaaaacagggtgggtgggaaatcagcctatttgtgaatttaaaaggaacaccgatttgcgggcaggggaaaacttcagtcacgtttgcacacctttctttcccattagaaaccgggttctcaatttggtcttcttttgttgttaattaggatgagtgccgtcagtgaaggggtggggggaatcaatttggttttctctcttgtttcttttttaatttaatgagacactctttgcattttgtctaagcgaaataaaaaagaaaaggttgtctgccta

SEQ ID NO: 151 - DNA, 1866 bp, Homo sapiens
ttgaaaagggtatcattcatgtggtttcagtttagaagagtccctcagagctttgcctcaagcaatttcaaattgtagtgataccttaaatcatgtattcaggatgccttctttagcatttagaaccccaactagacttatactttgactaaagtcagaggcagaccaatttagggaacagattttgttctttgcttttatgatacatttgtaactcacagctgttagcatgacctcacatcactgcgtaggacccggaaatcacatctcctggtcaggtcacgaaaaagaacacaggcttgactattgtccagaagttactttccccttgactaaaggtttccccttagggtacacattgctatttaactttgcctcctacccttttttgttaccttccaaaatcaagacacttttaagaaacaaagatagttttctgaacattctgtgtcctgcctgtctcctgttgattcgcagatgtaatatcgagtattcatcaactggtctcaatttcctgaacacattcactgtatccctcattgtcaccgttatccccctgcttcaaaatgtgccagttccacttggtaataacgttgggaaaatgcaggtttatgaatgatgtggacttttagaggatcaaatcaataaattggattttttattttttgagggcagctgccctcactgttttaaataaagaatcttacataagaatgttgacaacattcacagtaagccattggcagaaaattgatctgcatgtcctagaccaatgattacaaggtgtctgtggtttagggggcccagcccatcattccttttccccttggcactcatgagagagatgccaagttcagtgtggatttttcttggtgctctatggagaaatggagtctgtgtgcttactgaagagtcccaaaaaccagagaccattttcatttactgccatcataaatattctccaccattcaagatgcctgtgtacacggctatttgggaaacttaagtgttggaggaggcaggggctgaaggtgtcaaaacctcctcagtaggataacccctttctcccctttggaccatctgccatctttcatgagtgtttcccatggtgtttttgcatccagagttgacaacaactcaattttgccttgaatttactcagtcttataaattaaaaatgtgcattttatataaagatgcattttatataaaaatgcacacctttaatctctatatggcagcatatacatatatatatataaaatgcacacttttaatctctatatggcagcatttttgaggctttatatctgcccgtgtaccctcaactgcctcctttttgcagagaacgatccccacaggaactggtctaagaacactgtctgcacatgattgatgcttaaaatccaatataccaccacatatcaaaggttgggattttcagagtccttcttgatttctgagctgaaaccttaacaaatagggaatttggcagggaagacacctgggtttttaattcagaaccctatttatatactgttaaaatttgaggtactgtagtttatataaaagtcggatgttaagatattatatttcagtactaggagcttctttgcagtcattaacatgacaaattaagtaataaatataaaagtgattgtccataaattatcattgaattttttgtttattttgtagtgttctgtatttatctgcactttgtgtatatatacacacatacatatgccaacatgtaaataacctcatgtttattcctaatctaaattgccacaatatttttaatgtatggttacactgtgttttaaattactttaaaaataaactttgtaagcagaaaaaaaaaaa

SEQ ID NO: 152 - DNA, 4006 bp, Homo sapiens
tgccaaggctccagcccggccgggctccgaggcgagaggctgcatggagtggccggcgcggctctgcgggctgtgggcgctgctgctctgcgccggcggcgggggcgggggcgggggcgccgcgcctacggaaactcagccacctgtgacaaatttgagtgtctctgttgaaaacctctgcacagtaatatggacatggaatccacccgagggagccagctcaaattgtagtctatggtattttagtcattttggcgacaaacaagataagaaaatagctccggaaactcgtcgttcaatagaagtacccctgaatgagaggatttgtctgcaagtggggtcccagtgtagcaccaatgagagtgagaagcctagcattttggttgaaaaatgcatctcacccccagaaggtgatcctgagtctgctgtgactgagcttcaatgcatttggcacaacctgagctacatgaagtgttcttggctccctggaaggaataccagtcccgacactaactatactctctactattggcacagaagcctggaaaaaattcatcaatgtgaaaacatctttagagaaggccaatactttggttgttcctttgatctgaccaaagtgaaggattccagttttgaacaacacagtgtccaaataatggtcaaggataatgcaggaaaaattaaaccatccttcaatatagtgcctttaacttcccgtgtgaaacctgatcctccacatattaaaaacctctccttccacaatgatgacctatatgtgcaatgggagaatccacagaattttattagcagatgcctattttatgaagtagaagtcaataacagccaaactgagacacataatgttttctacgtccaagaggctaaatgtgagaatccagaatttgagagaaatgtggagaatacatcttgtttcatggtccctggtgttcttcctgatactttgaacacagtcagaataagagtcaaaacaaataagttatgctatgaggatgacaaactctggagtaattggagccaagaaatgagtataggtaagaagcgcaattccacactctacataaccatgttactcattgttccagtcatcgtcgcaggtgcaatcatagtactcctgctttacctaaaaaggctcaagattattatattccctccaattcctgatcctggcaagatttttaaagaaatgtttggagaccagaatgatgatactctgcactggaagaagtacgacatctatgagaagcaaaccaaggaggaaaccgactctgtagtgctgatagaaaacctgaagaaagcctctcagtgatggagataatttatttttaccttcactgtgaccttgagaagattcttcccattctccatttgttatctgggaacttattaaatggaaactgaaactactgcaccatttaaaaacaggcagctcataagagccacaggtctttatgttgagtcgcgcaccgaaaaactaaaaataatgggcgctttggagaagagtgtggagtcattctcattgaattataaaagccagcaggcttcaaactaggggacaaagcaaaaagtgatgatagtggtggagttaatcttatcaagagttgtgacaacttcctgagggatctatacttgctttgtgttctttgtgtcaacatgaacaaattttatttgtaggggaactcatttggggtgcaaatgctaatgtcaaacttgagtcacaaagaacatgtagaaaacaaaatggataaaatctgatatgtattgtttgggatcctattgaaccatgtttgtggctattaaaactcttttaacagtctgggctgggtccggtggctcacgcctgtaatcccagcaatttgggagtccgaggcgggcggatcactcgaggtcaggagttccagaccagcctgaccaaaatggtgaaacctcctctctactaaaactacaaaaattaactgggtgtggtggcgcgtgcctgtaatcccagctactcgggaagctgaggcaggtgaattgtttgaacctgggaggtggaggttgcagtgagcagagatcacaccactgcactctagcctgggtgacagagcaagactctgtctaaaaaacaaaacaaaacaaaacaaaacaaaaaaacctcttaatattctggagtcatcattcccttcgacagcattttcctctgctttgaaagccccagaaatcagtgttggccatgatgacaactacagaaaaaccagaggcagcttctttgccaagacctttcaaagccattttaggctgttaggggcagtggaggtagaatgactccttgggtattagagtttcaaccatgaagtctctaacaatgtattttcttcacctctgctactcaagtagcatttactgtgtctttggtttgtgctaggcccccgggtgtgaagcacagaccccttccaggggtttacagtctatttgagactcctcagttcttgccacttttttttttaatctccaccagtcatttttcagaccttttaactcctcaattccaacactgatttccccttttgcattctccctccttcccttccttgtagccttttgactttcattggaaattaggatgtaaatctgctcaggagacctggaggagcagaggataattagcatctcaggttaagtgtgagtaatctgagaaacaatgactaattcttgcatattttgtaacttccatgtgagggttttcagcattgatatttgtgcattttctaaacagagatgaggtggtatcttcacgtagaacattggtattcgcttgagaaaaaaagaatagttgaacctatttctctttctttacaagatgggtccaggattcctcttttctctgccataaatgattaattaaatagcttttgtgtcttacattggtagccagccagccaaggctctgtttatgcttttggggggcatatattgggttccattctcacctatccacacaacatatccgtatatatcccctctactcttacttcccccaaatttaaagaagtatgggaaatgagaggcatttcccccaccccatttctctcctcacacacagactcatattactggtaggaacttgagaactttatttccaagttgttcaaacatttaccaatcatattaatacaatgatgctatttgcaattcctgctcctaggggaggggagataagaaaccctcactctctacaggtttgggtacaagtggcaacctgcttccatggccgtgtagaagcatggtgccctggcttctctgaggaagctggggttcatgacaatggcagatgtaaagttattcttgaagtcagattgaggctgggagacagccgtagtagatgttctactttgttctgctgttctctagaaagaatatttggttttcctgtataggaatgagattaattcctttccaggtattttataattctgggaagcaaaacccatgcctccccctagccatttttactgttatcctatttagatggccatgaagaggatgctgtgaaattcccaacaaacattgatgctgacagtcatgcagtctgggagtggggaagtgatcttttgttcccatcctcttcttttagcagtaaaatagctgagggaaaagggagggaaaaggaagttatgggaatacctgtggtggttgtgatccctaggtcttgggagctcttggaggtgtctgtatcagtggatttcccatcccctgtgggaaattagtaggctcatttactgttttaggtctagcctatgtggattttttcctaacatacctaagcaaacccagtgtcaggatggtaattcttattctttcgttcagttaagtttttcccttcatctgggcactgaagggatatgtgaaacaatgttaacatttttggtagtcttcaaccagggattgtttctgtttaacttcttataggaaagcttgagtaaaataaatattgtctttttgtatgtca

SEQ ID NO: 153 - DNA, 6950 bp, Homo sapiens
ggccaaaggtcaagatacttctctgggaaatgttgctgctgatgctgctttacaaagtcatacaatgagtgtttggtttaagaaagattttcatacttaaaagattttcatcttggaaatacatcaagtgaaaattaaattcttttgggaaacattttccttctgatatattatacttgtaatgggcgacatggcaaacaactcagttgcttacagtggtgtgaaaaactctttgaaggaagctaatcatgatggagactttggaattacgctcgcagagctgcgggctctcatggagctcaggtccacagatgcattacgaaaaatacaggaaagctatggagatgtctatggaatttgcaccaaattgaaaacatctcccaatgaaggtttaagtggaaaccctgcagatttagaaagaagagaagcagtgtttggaaagaattttatacctcctaaaaagccaaaaacctttcttcaattagtatgggaagcattacaagatgtcactttaattatattagaaattgcagccatagtatcattgggcctttctttttatcagcctccagaaggggataatgcactttgtggagaagtttctgttggggaggaagaaggtgaaggtgaaactggttggattgaaggagctgcaatcctcttgtctgtagtgtgtgtggtgttagtaacagctttcaatgactggagtaaggaaaaacagtttagaggtttgcagagccgaattgaacaagaacagaagttcactgtcatcaggggtggtcaggtcattcagatacctgtagctgacattactgttggagatattgctcaagtgaaatatggtgatcttcttccagctgacggcatacttattcaaggcaacgatcttaaaattgatgaaagctcattgactggtgaatcagatcatgttaaaaagtctttagataaggatcccttacttctatcaggtactcatgtaatggaaggctctggaagaatggtagttacagctgtaggtgtaaattctcaaactggaattatctttaccttacttggagctggaggtgaagaggaagagaagaaagatgagaagaaaaaggaaaagaaaaataagaaacaagatggagctattgagaatcgcaacaaagcaaaagcccaggatggtgcagccatggaaatgcagccattgaagagtgaagaaggtggagatggtgatgaaaaagataaaaagaaagcaaatttgccaaaaaaggaaaaatctgttttacaagggaaacttacaaaactggctgttcagattggcaaagcaggtctgttgatgtctgccatcacagttatcattctagtattatattttgtcattgacaccttctgggttcagaaaagaccatggcttgctgagtgcacaccaatttatatacaatactttgtgaagttcttcattattggagttacagttttagtggtcgcagtgccagaaggtcttccacttgcagtcacgatctcactggcttattcagtcaaaaaaatgatgaaagataataacttagtaaggcatctggatgcttgtgaaaccatgggaaatgctacagctatttgttcagataaaacaggaactttgacaatgaacagaatgacagtcgttcaagcttacataaatgaaaaacattataaaaaggttcctgaaccagaagctattccaccaaatattttgtcctatcttgtaacaggaatttctgtgaattgtgcttatacatcaaaaatattgccaccagagaaagagggtggattacctcgtcacgttggtaataaaactgaatgtgccttgttgggacttcttttggatttaaaacgggattatcaggatgttagaaatgaaataccagaagaagcactgtacaaagtctacaccttcaattctgttaggaagtccatgagtactgtcctgaaaaattcagatggaagttatcgaatattcagcaagggtgcatctgagataattctgaaaaagtgtttcaaaatcttgagtgctaatggtgaggcaaaagtattcagaccaagggaccgtgatgatattgtaaaaactgtgattgaaccgatggcatcagaaggcttgagaaccatatgtcttgcattcagagattttccagcaggagaaccagaaccagagtgggataatgaaaatgatattgtcaccggccttacatgcattgctgttgtggggattgaagatcctgtgagacctgaggtgccagatgcaattaaaaagtgtcagagggctggaattactgtgcggatggtcactggtgataatattaatactgctcgggccattgctaccaaatgtggtattttacatcctggggaagattttctgtgcctagaaggtaaagattttaacagaagaatacgaaatgaaaaaggagagattgagcaagagaggatagacaagatttggccaaaacttcgagtacttgcaagatcatctcctactgataagcatacactggttaaaggtataattgacagcactgtctcagaccaacgccaggttgtagctgtaactggtgatggtacaaatgatggcccagcactaaagaaagcagatgttggatttgcaatgggtattgctggaactgatgtagctaaagaagcatccgatattattctcacagatgacaactttacaagcattgttaaagcagttatgtggggacgaaatgtctatgacagcatctcaaaattccttcagttccaacttactgttaatgtagtagcagtgattgttgcttttacgggcgcctgcattactcaagactcaccgcttaaggctgtgcagatgctgtgggtaaacctcataatggatacactcgcttccctggctctggcaacggaaccacccactgagtctctcttgcttcggaaaccttatggtagaaataagcctctcatctcacgtacaatgatgaagaatattttgggtcatgcattctatcaacttgtagtagtctttacactcttatttgctggagaaaagttttttgacattgatagtggaagaaatgctcctttgcatgctcctccttcagaacattatactattgtttttaatacctttgtgctgatgcaacttttcaacgaaataaatgcccggaaaattcatggtgaaagaaatgtattcgaaggaatctttaacaatgccatcttctgcacaattgttttaggcacttttgtggtacagataataattgtgcagtttggtggaaaacctttcagttgttcagaactttcaatagaacagtggctatggtcaatattcctaggaatgggaacattactctggggccagcttatttcaacaattccaactagccgtttaaaattcctcaaagaagctggtcatggaacacaaaaggaagaaatacctgaggaggaattagcagaggatgttgaagagattgatcacgctgaaagggagttgcggcgtggccaaatcttgtggtttagaggtctgaacagaatccaaacacagatggatgtagtgaatgctttccagagtggaagttccattcagggggctctaaggcggcaaccctccatcgccagccagcatcatgatgtaacaaatatttctacccctacacatgtagtgttttcctcttctactgcttctactactgtggggtattcgagtggtgaatgcatttcgtagttctttatatgaagggttagaaaaaccggaatcaagaagttcgattcacaactttatgacacatcctgagtttaggatagaagattcagagcctcatatcccccttattgatgacactgatgccgaagatgatgctcctacaaaacgtaactccagtcctccaccctctcccaacaaaaataacaatgctgttgacagtggaattcaccttacaatagaaatgaacaagtctgctacctcttcatccccaggaagcccactacatagtttggaaacatcactctgattgtaagctgaatgttaacacactagctgcattgtaaagaaacaaattgaaactgggtcttttcacatattgtgatggacaagctagtattcttgtctttggacttcaacagaagacacacttgtacgaatgtagatttatttttttaaaaaaaaaaaagcaaagctttctgccagactgagggtgctttttggggggtgggagaaatgaactgacagataaacagtaactcagcgtaagtgacctgtggatcatcagtagtacccaagcatggtcctgaacagtgtattagcagagctttagtttatctcagtcctggatgggagagagagggaggagtaaaactgggcaagacaaagagccctggatcgttgaattgatagtttaatttctgctgttggctgttaataatttggattatttatgtttataaatgatacagatctgtttacaaggtttgtagatactttttttgttcctgttcatagatgggaagcttccttataactgatgcagagaaaaattagtccttcaaatactgctgtattttcaggaaaaaaaaaaaaaggggtgtttctattgaaactgtactaaatttttgcctacaatttaccttgttaaatattgtagataaattgctaatactaatagccaaatagataacactaatgctttgtttaaaaaaacgaaaaaaacaaaacaaaacaaaaaaacatgagcagtggtgttctaatgaagttatgacatctgtcctaattagtttcttaaatacatttactacttaatggttttgaagcaactgtttaatttttaaaatttttgaaaacttgctaataaccttttgttcagaatttagtagattgtttaatgcaggacatcaactacataatgaaagatgcttgaaatgcttttgttatttcaggcaaatcaaattaaatcagactatcaaactacaagagaaccttagtcttttttgtttttgtctaaacatgttagtttagtgatgtcttggtgaactgtgagtgaactgtattgatttttctaatctttagagaccttcacacagcatgagggctgttggcattttgaaaaaggttaataagtagaagcatacatgttttccttttgtttttgaaacttgtttgtaaacataaataaatatgcccttttattaaataaattcatggcaatgtttttttaaaagacatttcagcttctttactcagttctgcatatacagtgcatcagtctgttctctttgaccacaattggaatacatttcaagatggtaacagccccatgaagtaccgctttaattccttgctggtaatctaatagaatcagattaagaaaattaacacaattttaccatttgacatactcttcattgaatttagtttgtctaaaatagtctcacaggtaaaaaacataacaacaatgaccaccattgtctttgatacatttattttaattcttaagtggccaaataacagattaggtaaaatgagattacatgaaaaggttctaaaatgatatatttagatgcaataattaaccatatgctagaatgcccacctctaagccaattggattctttagctctctttttctttccttcatctaccttcttctcttttttgcctctgtctttaccctttagaaactggcatgtgttagggcccagatttcaccagatacacaatcctcaggctgacataaagtttacgaggactgctactataactgagagtgctgaccaagcaaagaaacatttagttgatggtgcttgatatttttggtgggtgggggaaatctttttctcaccatcaaatctttgcagtaatcctctgcaggtcttagaaacacattggctctgtcagcatttgtaattgtacatttattcatcaggtatttatagtgaatcatactgtaaaaaagaggtagcatgatatgctggaaagcatattagactaggagtcaagacctggtttctagtcttggttttgccattaatgtgctgcatgatcttgggaaaatcatttaccctaaataagggtggtggactatcttgaagaaccctttcaactctaaaaattgaccctatcaactggagagcccacaaggcatagggaatagagaaaagggaaatgttttcagttttcttttttattttggttatgcttaaatatgaatgtaattaccaaaagatttagaagtgcatgtgctttggaggatttgtattgagcttttacagtattcatttttcaactcaaggcaatggctttctacaccaactctaatccataaacgggtcttatgacatctatgaagtagtagcaagacatgcttagtgtgtatttctctctttgagacactgtaatttctaccagaaatttccagagcattatgtaggtagaaaaaaatgcaagcaagctgttaaagatcttggatcccattatatagtatgtatagctgaaatctgtaattcaatcactttttctcttttatcctctaaccaaaaaattgtttaattttgcatcccaaatgtttttaatctttgtatattttttaaaaatccttttctcctcatcattgccttttttgtggttgtaaatagacttacttgcactttgaagatgagttactccttgtcatcttacaaatatgtgatatggtaattttcataacagatgtcagttttgaaccaagaattggtgatttgtttataagaaaaaaactggcttcatttctgtgaaattgctctttgaaaatttctttttacacgtgtaagccaactgagataccgtgatggtgttgatttctttcaatgatgcttaccatctattttagccactgagccttttattatttgtctatttgtaaagtttatttgtcttaactcatttaataaatatactgtttatctgtttctgaaaaaaaaaaaaaaaaaaa

SEQ ID NO: 154 - DNA, 3995 bp, Homo sapiens
ccccgccccgctcctctccggccgcgcagccgctgccgcccacccgcacccgccgtcatgctccgggccgcgctgcccgcgctcctgctgccgttgctgggcctcgccgctgctgccgtcgcggactgtccttcatctacttggattcagttccaagacagttgttacatttttctccaagaagccatcaaagtagaaagcatagaggatgtcagaaatcagtgtactgaccatggagcggacatgataagcatacataatgaagaagaaaatgcttttatactggatactttgaaaaagcaatggaaaggcccagatgatatcctactaggcatgttttatgacacagatgatgcgagtttcaagtggtttgataattcaaatatgacatttgataagtggacagaccaagatgatgatgaggatttagttgacacctgtgcttttctgcacatcaagacaggtgaatggaaaaaaggaaattgtgaagtttcttctgtggaaggaacactatgcaaaacagctatcccatacaaaaggaaatatttatcagataaccacattttaatatcagcattggtgattgctagcacggtaattttgacagttttgggagcaatcatttggttcctgtacaaaaaacattctgattctcgtttcaccacagttttttcaaccgcaccccaatcaccttataatgaagactgtgttttggtagttggagaagaaaatgaatatcctgttcaatttgactaagtttttggtaatcttgcactaagacatcaacaaaatgccctggcagagataacttgggaaagattttaatataaaacttgacattggatattagagctttaatggtattccttattccagtaacatttttatgtactcatctgctgtgaaaagtctttaggttcattaaaaaaacaggttttagaaatgatcttagatctaatatagtgattttaagcatcccgtcaaaggcagaatctgtcacttgaatgaaggaaagcttaaagcccaagcagataaaaataaaagcccagcctatttgtcttgcctgctgtatcttccctatttagttgacccactttagtttatatgtttattagtaaacatgaaatggggaataagtgattttaagtacatcccatacatttaaatatctttgataattgttatttttttggcagataattcctctagaatgtgtatctttttatgatttagatgaagaaaattttacaacttttaacaccccacaccaattttagtttcattacttttacacacaccattttatcacaaatgactcaagttttaatgaatgtttataaattatttgaaacaaaatatgatcgctgtgtccaggatggcatagagaaagctggcaattaggttaacacttacatattatagtgcccctttaaggatttctctcttgccaccataccttttgtactttcccctatacaagatgtatctcattctcctcaagcatttataaatttttccttcaatgacatgaaaactgtgcaagcaaaaaccgaagaaaaacacttaagtacaactgtagtgacagtgatcaaagttttcagtgcatttattgtacattttaagaaaaaggtgaaaatcatttggggagtaaaaaaatgaaaaagctgaaacgagtaattttcctcaccatcaataaaccaaaaacaggaaagataaagaatgtataaatttcacgtaaattagtcacgtatcacttatcaatggggatacgttctaagaaatgcatagttagggaatcttgtgtgaaaatcagcttgtatttacacaaacccagatggtagagcctattttgtcccaaacctacacagcatgttactgtgctgaatactgcagacaattgtaacacaatatttgtgtatctaaatatagaaaaggtacagtaaaaatatggtctactaaggaaacactgttctatatgtggtccattactgactgaagtatactgtctagaagtctgaggctcaaagaaaagtaatccctcttctgaatccacaccccatcaattatcttactttcttctggggagatagatagatatactatctcactagcttgactaatggcaacaaagttccagcttgtgtagtctctttttattgaccacatgaatcgaaaacactcatcacaattaatggcactatcattaatgagacatgagtaactaaaaagtgatagaaaactattaacagtgcggctacatggtactgaaaatgcaggcattacaccagctgttacacaagcacaagcatgctctgtaagagctttacatttctgagattttgtatagtgattgagatgtctattttattattgatagactattactaatgtcaatattgaacactaccctggaattcctgcctggttttcctacccaaattgtaccactccttgaagaactacaggcacagtaaaaaaaatatggcgtattatgtgaactaaaagagttctaaaggagttcttaaaggagtggtagaatttgggtaggaaagtgattaagtccaacttaaaaccaacagtctcaaacgtctacaactacaatgtccaatgagccactagccacatgaggctatttaagtaaatttagtttaaaatccagttttcgaattacattagccacattgtcaagtgttcaaatcacaggtggttagtggctactgtactgggcaacatacattatagaacattttcattataggaagttttattgggcagtgctgctcttaaatcctaccttccactcaactcccatacaactttcttttgtacattttgatactttctacctaatggcagctcttccaaaatagctgctttaaactctgatttaattttcaatatttggtttcatttttcaacaggccaagaggcctctggtaatgaagtgctatatatatatatatgatggagtctcactgtgctgcccaggctacagtgcagtggctcgatcttggctctctccaatctccgccttgcaggttttcaagcaattctcctgcctcagcctccttagtagctgggaccacagacatctgtcaccacacccagctaactttttgtatttttggtagagacggggtttcgccatattgactgggctggtctcaaactcctgacctcaagtgatccacccaccttggtctcccaaagtgctgggattacatgcgtgagccaccacacttggcctacattttttctttatataccagaacatctataacaggcaccttatctactcattagtgaagagataattggattacacaggcaggcttgtttactacatccagaatgtagaaactgctttcttcaacatcttggttctagctagtaataacaatataattctttggcagatattcagaataacattttaaactacattttcttagaaaattgcattcttgtagtgagcagtgtatggtctcttttgttcagaatttaaaactgataaccaatgaaagccttttctcttattcctctaccgtcatttacatgataatctgaagctaatatgacaatatttaaatactaagtggtactagggaactacaagaatactgtaaagcttaagccattgttatcactgtcatttagcatttaataacaaaactatacagaattatgtgcataccaatgaatgttttgtaccatctagttaaattttttaaataaagttttatgggttaagcagaagacaactgtcatactgaattttattaaaagtatatatacttcaaattcaaagcatcccttaggacccacagaatatattaaaactaccacccttaaattttatatttttgctttaagacagacaatgcaaaggtaactggcaagaggtgagcaaatgttttagaacatttatattattgcttaaaatgagatttgaaattgtaataaaattcttggttatgaaaaaaaaaaaaaaaaaa

SEQ ID NO: 155 - DNA, 6227 bp, Homo sapiens
ggggccggccgcctgtcagagggaggtggcgatggtgcgcccggtggcggtggcggcggcggttgcggaggcttccttggtcggattgcaacgaggagaagatgactgaccaaccgactggctgaatgaatgaatggcggagccgagcgcgccatgaggagcctgccgagcctgggcggcctcgccctgttgtgctgcgccgccgccgccgccgccgccgccgtcgcctcagccgcctcggcggggaatgtcaccggtggcggcggggccgcggggcaggtggacgcgtcgccgggccccgggttgcggggcgagcccagccaccccttccctagggcgacggctcccacggcccaggccccgaggaccgggcccccgcgcgccaccgtccaccgacccctggctgcgacttctccagcccagtccccggagaccacccctctttgggcgactgctggaccctcttccaccacctttcaggcgccgctcggcccctcgccgaccacccctccggcggcggaacgcacttcgaccacctctcaggcgccgaccagacccgcgccgaccaccctttcgacgaccactggcccggcgccgaccacccctgtagcgaccaccgtaccggcgcccacgactccccggaccccgacccccgatctccccagcagcagcaacagcagcgtcctccccaccccacctgccaccgaggccccctcttcgcctcctccagagtatgtatgtaactgctctgtggttggaagcctgaatgtgaatcgctgcaaccagaccacagggcagtgtgagtgtcggccaggttatcaggggcttcactgtgaaacctgcaaagagggcttttacctaaattacacttctgggctctgtcagccatgtgactgtagtccacatggagctctcagcataccgtgcaacagttctgggaaatgccagtgcaaagtgggtgtcattggctctatatgtgaccgatgccaagatggatattatggctttagtaagaatggctgcttgccctgccaatgcaataatcggtctgccagttgcgatgccctcacaggtgcttgtttaaactgccaggaaaatagcaaaggaaatcactgtgaagaatgtaaagaaggattttatcagagtcctgatgccactaaagaatgtcttcgctgcccttgttcagcagtgacatctacaggcagctgctctataaaatcgagtgaattggaacctgaatgtgaccagtgtaaagatggttacataggcccgaactgcaataaatgtgaaaatggctattacaattttgacagcatctgtagaaagtgccaatgtcacggccatgtggacccagttaaaactccaaagatttgtaagcccgagagtggtgagtgcatcaactgcctccataacaccactgggttttggtgtgagaactgcctagaaggttatgttcacgacctcgagggaaattgcatcaagaaagaagttattcttccaacacctgaaggttctaccattttggtttccaatgcctctttgaccacatcagtgcccacccctgttataaatagtacttttacccctacaaccctgcagactatcttttcagtaagcacttctgaaaacagcacttcagctttagctgatgtatcatggacccaatttaacatcatcattttgacagtcatcatcattgttgtggtgctgctaatgggatttgtgggggctgtatatatgtaccgcgagtaccaaaaccggaaactcaatgcccccttttggaccatcgagctgaaagaagacaatatcagtttcagcagctaccatgacagcattcccaatgcagatgtttcgggattgttggaagatgatggcaatgaagtggctcccaatgggcagctgaccctgacgacgcccatacataactacaaagcctaaggagctagaactgttctgaattgttaaaccacagtgcttgctaagacagagtcagcccctgggccagacaaagcctggctagagtttgctgagaaagcaaaggcaaatagtgcatctgaaattttcaggtacaaatttgtaatgcgcttagcctatctattgctcttagttttcccatgaagatctgaagcgttcactgtcattaggacttgaagtaaagtatatttttgtaccaaaccacatgggagtatggaaaggctgaaccccatagtgcagcccaaaaccactttgacctccagatagactcctggggaagcattcaccaagccagtggtaacaagatgatgaatgtggagggggaaaagactgctggaagacttcatctccattcctgaaacattttttttaaaacagtgtcagggattatattcgttttactatacaaaaggacatcattgaggaaaagcttgtttctaggctgtatcacagtaaataatcttgattgtttctagaacaggggtagaaaagtcccaagatcttcagaagggcttggttttttcctcccaggattcttgctcagtgatgagttgaaagcacaggataagcttctaagggaggaaggcagcattggggagcaggaggctgatggtcctcctcagggtctcagtgtaaatgataaattgtctaaaaataaggaatattcctgcctctagagaaataaggtgtacatagttaatgtagcatatctggtcgacgttgtatttgtatctatttgtaaaaaaaaaatcatgtcatattttatcatctggaatttatttgtacagcagttaatggtgttgtaaaaagaaaaatatggggattgcttaaaatactgtaaaatagatggcaatattgctagagctgggactctggtgagcatccgtcatttttagtccttcttgaggacattgctgaaatttataagaggtcgaatgtttctttctttcctttctcagtctaaaagtagagttatatgctctttgacttactatgattcaagcaatagattttgaagtcagtaatcgttaagctgggacataggatgcattctccaaaaacattaatctaattagacattagccaccctatatattttacatagattaatataaaacatatcctcattaaaaaatgtttttcttgaatgtaaaagatagtcttccaaaggatagaaatattttagttccaagagaaaagccatcatattacttgggatctgtagttttcatgcctatgaaatatttataatcctccctcaccccaaataaaaaatctcctacatgtgaacatagcctgtcactcatttgccatgaggtatgtgccatctccctgcagtgctatagttctcccattgtcttcctgtctggttaatgagcagctttgtagatgggtgtgtctagttagttcttgctttttgatggagttttttcctagaggccaactactgttgctctcgtttattatgatattgacattttgggttaagcaaggtgggtgggaaaggtggtcagatgttaaatataacttattaggaggaacagtgaactgtgaagtggttagaaaaaaaataaaaacttcttattagattagacctaggaaattcaagctgacccctttgcctaacttccctagagaaaaacctagaacttggtcatccctttataggagacccctaagttgttctcagggtttggagatgatgttctggagggagtacaagcaaataatctacttctggtaatctgagggtgctttgcgtatttggccattgctcagaagaatagaggttacattatattacattatatgaaaattatttagtttttctatagccctttgtagtttgcaaagcacttttccatatgtgtgtcctctcttccacaccatagccccctgaggaagtaattgttgtccccattttatagatgaaaaggctgaggcacagaggagctaaatatcttgttcaaggctatacaatgtgtgtgattattaggcttggaatcagggcctctaactctaaagcacatgttttttcaactatatgcagaaattgcctagccatggacacaagaaagctgggaggaagagttctacttgtggatgtttttaattttttttaaatatcaggagcaatccagggccatacagctatgaagcacttagtgaaaagaacacaagaagatttactaactgaagttagtattagtgattagaaaacaaaactgccagtttgtgcttcattaaggtgaactcatctctccaagcaggaagggaaaatttgctttccctagcagttgctgcatatgtgtgtacagactgcacaattctaagaaattgtgcaaaatggcatacctgtctttctcccagatacaccgccccctgccccccccaaaaaaggtcaggattaaaggtggtgagaagtgaacatttattaaacagaagttaaaccaatagagagaaaggaggtttgttggagtctaagaggattttgaccatgtagaaattccttgaaacagaccttaaaaggtattgaaaaattgaatcacaaagaaagtttacctttaaatacttgttaatggctcctagatcatggttataatttttctcaatgggaaaaaaagtcttaaaatttgttttaaataagatcctctaatgtctcgagctttttgattctggaaataatttgctttaaaatataaatcaatcagaaagtgatctaccactgaaatcattctaggaaactagcatgggatgcactgcacaatgttctttcctctaaaggcatgggccccataaactgtggcatctggcagcaggatgccatcagtcctttagaaagcctaattttgggccgggtgcggtggctcacgcctgtaatcccagcactttgggaggccgaggcgggtggatcacaaggtcaggagttcgagaccagcctggtcaacatggcgaaatcccgtctctactaaaaacacaaaaattagccgggtgtacgtgcctgtagtctcagctacttgggaggctgaggcaggagaatcacttgaacctgggaggcagaggttacagtgagccgagatggcgccatttcactccagcctgggcgacagagcaagactctgtctcaaaaaaaaggaagaaaaagaaagcctaatattgggagaatgtttgtgtaaggattggaaatctgtttatttttaaataagatagcactgatgtgaatcttatttggaaattacagatactgccattaagcgatgcttttatcttcattaattcattttggtaagcgcctatgcatttctgatggttaggtgccctaggtagtgttaagtatgtccgtgtcctcccttactcccctctcgctccctctaccctctatcccctagggttcttttattaatggaatttctccagttatagagaaaaaaatgacatttgaaaactaaagctcatttatattaatactaaggtcctgtgggcctagtgcgttactcttcccagtgatacctagattttaagagtagagaacagaggaaacatgggatgagaggagagaggttttttagacaacatttgtagacacctcaaattatatcactgttctctagcgccaatattcccaggtaaattgaccattaaagcaatactcactgacctactagtttattttggtcagctgagtaccatcaggatatttaaccctttaagtgctgttttgggagtagaaaactaaagcaacaatacttcctcttgacagctttgattggaatggggttattagatcattcaccttggtcctacactttttaggatgcttggtgaacataacaccacttataatgaacatccctggttcctatattttgggctatgtgggtaggaattgttacttgttactgcagcagcagccctagaaagtaagcccagggcttcagatctaagttagtccaaaagctaaatgatttaaagtcaagttgtaatgctaggcataagcactctataatacattaaattataggccgagcaattagggaatgtttctgaaacattaaacttgtatttatgtcactaaaattctaacacaaacttaaaaaatgtgtctcatacatatgctgtactaggcttcatcatgcatttctaaatttgtgtatgatttgaatatatgaaagaatttatacaagagtgttatttaaaattattaaaaataaatgtatataatttgtacctattgtaaaaaaaaaaaaaaaaaa

SEQ ID NO: 156 - DNA, 4168 bp, Homo sapiens
gggggcggcagctttgtgctttttagtggccgcgtcccaggatagctggaaggttaggacgctcttgcggtcccagagtggagtggaaggtctggagctttgggaggagacggggaggacagactggaggcgtgttcctccggagttttctttttcgtgcgagccctcgcgcgcgcgtacagtcatcccgctggtctgacgattgtggagaggcggtggagaggcttcatccatcccacccggtcgtcgccggggattggggtcccagcgagacctccccgggagaagcagtgcccaggaggttttctgaagccggggaagctgtgcagccgaagccgccgccgcgccggagcccgggacaccggccaccctccgcgccacccaccctcgccggctccggcttcctctggcccaggcgccgcgcggacccggcagctgtctgcgcacgccgagctccacggtgaaaaaaaagtgaaggtgtaaaagcagcacaagtgcaataagagatatttcctcaaatttgcctcaagatggaaaccctttgcctcagggcatccttttggctggcactggttggatgtgtaatcagtgataatcctgagagatacagcacaaatctaagcaatcatgtggatgatttcaccacttttcgtggcacagagctcagcttcctggttaccactcatcaacccactaatttggtcctacccagcaatggctcaatgcacaactattgcccacagcagactaaaattacttcagctttcaaatacattaacactgtgatatcttgtactattttcatcgtgggaatggtggggaatgcaactctgctcaggatcatttaccagaacaaatgtatgaggaatggccccaacgcgctgatagccagtcttgcccttggagaccttatctatgtggtcattgatctccctatcaatgtatttaagctgctggctgggcgctggccttttgatcacaatgactttggcgtatttctttgcaagctgttcccctttttgcagaagtcctcggtggggatcaccgtcctcaacctctgcgctcttagtgttgacaggtacagagcagttgcctcctggagtcgtgttcagggaattgggattcctttggtaactgccattgaaattgtctccatctggatcctgtcctttatcctggccattcctgaagcgattggcttcgtcatggtaccctttgaatataggggtgaacagcataaaacctgtatgctcaatgccacatcaaaattcatggagttctaccaagatgtaaaggactggtggctcttcgggttctatttctgtatgcccttggtgtgcactgcgatcttctacaccctcatgacttgtgagatgttgaacagaaggaatggcagcttgagaattgccctcagtgaacatcttaagcagcgtcgagaagtggcaaaaacagttttctgcttggttgtaatttttgctctttgctggttccctcttcatttaagccgtatattgaagaaaactgtgtataacgagatggacaagaaccgatgtgaattacttagtttcttactgctcatggattacatcggtattaacttggcaaccatgaattcatgtataaaccccatagctctgtattttgtgagcaagaaatttaaaaattgtttccagtcatgcctctgctgctgctgttaccagtccaaaagtctgatgacctcggtccccatgaacggaacaagcatccagtggaagaaccacgatcaaaacaaccacaacacagaccggagcagccataaggacagcatgaactgaccacccttagaagcactcctcggtactcccataatcctctcggagaaaaaaatcacaaggcaactgtgagtccgggaatctcttctctgatccttcttccttaattcactcccacacccaagaagaaatgctttccaaaaccgcaagggtagactggtttatccacccacaacatctacgaatcgtacttctttaattgatctaatttacatattctgcgtgttgtattcagcactaaaaaatggtgggagctgggggagaatgaagactgttaaatgaaaccagaaggatatttactacttttgcatgaaaatagagctttcaagtacatggctagcttttatggcagttctggtgaatgttcaatgggaactggtcaccatgaaactttagagattaacgacaagattttctactttttttaagtgatttttttgtccttcagccaaacacaatatgggctcaagtcacttttatttgaaatgtcatttggtgccagtattttttaactgcataatagcctaacatgattatttgaacttatttacacatagtttgaaaaaaaaaagacaaaaatagtattcaggtgagcaattagattagtattttccacgtcactgtttatttttttaaaacacaaattctaaagctacaacaaatactacaggcccttaaagcacagtctgatgacacatttggcagtttaatagatgttactcaaagaattttttaagaactgtattttattttttaaatggtgttttattacaagggaccttgaacatgttttgtatgttaaattcaaaagtaatgcttcaatcagatagttctttttcacaagttcaatctgtttttcatgtaaattttgtatgaaaaatcaatgtcaagtaccaaaatgttaatgtatgtgtcatttaactctgcctgagactttcagtgcactgtatatagaagtctaaaacacacctaagagaaaaagatcgaatttttcagatgattcagaaattttcattcaggtatttgtaatagtgacatatatatgtatatacatatcacctcctattctcttaatttttcttaaaatgttaactggcagtaagtcttttttgatcattcccttttccatataggaaacataattttgaagtggccagatgagtttatcatgtcagtgaaaaataattacccacaaatgccaccagaacttacgattcttcacttcttggggttttcagtatgaacctaactccccaccccaacatctccctcccacattgtcaccatttcaaagggcccacagtgacttttgctgggcattttcccagatgtttacagactgtgagtacagcagaaaatcttttactagtgtgtgtgtgtatatatataaacaattgtaaatttcttttagcccatttttctagactgtctctgtggaatatatttgtgtgtgtgatatatgcatgtgtgtgatggtatgtatggatttaatctaatctaataattgtgccccgcagttgtgccaaagtgcatagtctgagtaaaatctaggtgattgttcatcatgacaacctgcctcagtccattttaacctgtagcaaccttctgcattcataaatcttgtaatcatgttaccattacaaatgggatataagaggcagcgtgaaagcagatgagctgtggactagcaatatagggttttgtttggttggttggtttgataaagcagtatttggggtcatattgtttcctgtgctggagcaaaagtcattacactttgaagtattatattgttcttatcctcaattcaatgtggtgatgaaattgccaggttgtctgatatttctttcagacttcgccagacagattgctgataataaattaggtaagataatttgttgggccatattttaggacaggtaaaataacatcaggttccagttgcttgaattgcaaggctaagaagtactgcccttttgtgtgttagcagtcaaatctattattccactggcgcatcatatgcagtgatatatgcctataatataagccataggttcacaccattttgtttagacaattgtctttttttcaagatgctttgtttctttcatatgaaaaaaatgcattttataaattcagaaagtcatagatttctgaaggcgtcaacgtgcattttatttatggactggtaagtaactgtggtttactagcaggaatatttccaatttctacctttactacatcttttcaacaagtaactttgtagaaatgagccagaagccaaggccctgagttggcagtggcccataagtgtaaaataaaagtttacagaaaccttgaaaaaaaaaaaaaaaaaa

SEQ ID NO: 157 - DNA, 4380 bp, Homo sapiens
ggggagcgccatccgctccacttccacctccacatcctccaccggccaaggtccccgccgctgcatccctcgcggcttccgctgcgctccgggccggagccgagccgcctgcgctgccacagcagccgcctccacacactcgcagacgctcacacgctctccctccctgttcccccgccccctccccagctccttgatctctgggtctgttttattactcctggtgcgagtcccgcggactccgcggcccgctatttgtcatcagctcgctctccattggcggggagcggagagcagcgaagaagggggtggggaggggaggggaagggaagggggtggaaactgcctggagccgtttctccgcgccgctgttggtgctgccgctgcctcctcctcctccgccgccgccgccgccgccgccgcctcctccggctcttcgctcggcccctctccgcctccatgtgccggatagcgggagcgctgcggaccctgctgccgctgctggcggccctgcttcaggcgtctgtagaggcttctggtgaaatcgcattatgcaagactggatttcctgaagatgtttacagtgcagtcttatcgaaggatgtgcatgaaggacagcctcttctcaatgtgaagtttagcaactgcaatggaaaaagaaaagtacaatatgagagcagtgagcctgcagattttaaggtggatgaagatggcatggtgtatgccgtgagaagctttccactctcttctgagcatgccaagttcctgatatatgcccaagacaaagagacccaggaaaagtggcaagtggcagtaaaattgagcctgaagccaaccttaactgaggagtcagtgaaggagtcagcagaagttgaagaaatagtgttcccaagacaattcagtaagcacagtggccacctacaaaggcagaagagagactgggtcatccctccaatcaacttgccagaaaactccaggggaccttttcctcaagagcttgtcaggatcaggtctgatagagataaaaacctttcactgcggtacagtgtaactgggccaggagctgaccagcctccaactggtatcttcattatcaaccccatctcgggtcagctgtcggtgacaaagcccctggatcgcgagcagatagcccggtttcatttgagggcacatgcagtagatattaatggaaatcaagtggagaaccccattgacattgtcatcaatgttattgacatgaatgacaacagacctgagttcttacaccaggtttggaatgggacagttcctgagggatcaaagcctggaacatatgtgatgaccgtaacagcaattgatgctgacgatcccaatgccctcaatgggatgttgaggtacagaatcgtgtctcaggctccaagcaccccttcacccaacatgtttacaatcaacaatgagactggtgacatcatcacagtggcagctggacttgatcgagaaaaagtgcaacagtatacgttaataattcaagctacagacatggaaggcaatcccacatatggcctttcaaacacagccacggccgtcatcacagtgacagatgtcaatgacaatcctccagagtttactgccatgacgttttatggtgaagttcctgagaacagggtagacatcatagtagctaatctaactgtgaccgataaggatcaaccccatacaccagcctggaacgcagtgtacagaatcagtggcggagatcctactggacggttcgccatccagaccgacccaaacagcaacgacgggttagtcaccgtggtcaaaccaatcgactttgaaacaaataggatgtttgtccttactgttgctgcagaaaatcaagtgccattagccaagggaattcagcacccgcctcagtcaactgcaaccgtgtctgttacagttattgacgtaaatgaaaacccttattttgcccccaatcctaagatcattcgccaagaagaagggcttcatgccggtaccatgttgacaacattcactgctcaggacccagatcgatatatgcagcaaaatattagatacactaaattatctgatcctgccaattggctaaaaatagatcctgtgaatggacaaataactacaattgctgttttggaccgagaatcaccaaatgtgaaaaacaatatatataatgctactttccttgcttctgacaatggaattcctcctatgagtggaacaggaacgctgcagatctatttacttgatattaatgacaatgcccctcaagtgttacctcaagaggcagagacttgcgaaactccagaccccaattcaattaatattacagcacttgattatgacattgatccaaatgctggaccatttgcttttgatcttcctttatctccagtgactattaagagaaattggaccatcactcggcttaatggtgattttgctcagcttaatttaaagataaaatttcttgaagctggtatctatgaagttcccatcataatcacagattcgggtaatcctcccaaatcaaatatttccatcctgcgcgtgaaggtttgccagtgtgactccaacggggactgcacagatgtggacaggattgtgggtgcggggcttggcaccggtgccatcattgccatcctgctctgcatcatcatcctgcttatccttgtgctgatgtttgtggtatggatgaaacgccgggataaagaacgccaggccaaacaacttttaattgatccagaagatgatgtaagagataatattttaaaatatgatgaagaaggtggaggagaagaagaccaggactatgacttgagccagctgcagcagcctgacactgtggagcctgatgccatcaagcctgtgggaatccgacgaatggatgaaagacccatccacgccgagccccagtatccggtccgatctgcagccccacaccctggagacattggggacttcattaatgagggccttaaagcggctgacaatgaccccacagctccaccatatgactccctgttagtgtttgactatgaaggcagtggctccactgctgggtccttgagctcccttaattcctcaagtagtggtggtgagcaggactatgattacctgaacgactgggggccacggttcaagaaacttgctgacatgtatggtggaggtgatgactgaacttcagggtgaacttggtttttggacaagtacaaacaatttcaactgatattcccaaaaagcattcagaagctaggctttaactttgtagtctactagcacagtgcttgctggaggctttggcataggctgcaaaccaatttgggctcagagggaatatcagtgatccatactgtttggaaaaacactgagctcagttacacttgaattttacagtacagaagcactgggattttatgtgcctttttgtacctttttcagattggaattagttttctgtttaaggctttaatggtactgatttctgaaacgataagtaaaagacaaaatattttgtggtgggagcagtaagttaaaccatgatatgcttcaacacgcttttgttacattgcatttgcttttattaaaatacaaaattaaacaaacaaaaaaactcatggagcgattttattatcttgggggatgagaccatgagattggaaaatgtacattacttctagttttagactttagtttgtttttttttttttcactaaaatcttaaaacttactcagctggttgcaaataaagggagttttcatatcaccaatttgtagcaaaattgaattttttcataaactagaatgttagacacattttggtcttaatccatgtacacttttttatttctgtatttttccacttcactgtaaaaatagtatgtgtacataatgttttattggcatagtctatggagaagtgcagaaacttcagaacatgtgtatgtattatttggactatggattcaggttttttgcatgtttatatctttcgttatggataaagtatttacaaaacagtgacatttgattcaattgttgagctgtagttagaatactcaatttttaatttttttaatttttttattttttattttctttttggtttggggagggagaaaagttcttagcacaaatgttttacataatttgtaccaaaaaaaaaaaaaaaggaaaggaaagaaaggggtggcctgacactggtggcactactaagtgtgtgtttttttaaaaaaaaaatggaaaaaaaaaagcttttaaactggagagacttctgacaacagctttgcctctgtattgtgtaccagaatataaatgatacacctctgaccccagcgttctgaataaaatgctaattttggatctggaaaaaaaaaaaaa

SEQ ID NO: 158 - DNA, 2733 bp, Homo sapiens
gtaggtgcgtgcccgggactctgccgatgcgggccgcgccccctggggccaagagactccacgtcccgctcagggcaaagggtgtggggagaagcggtcacgcccctcggctggaatccgtgaggaccaggtctttttcagtgtgctcaatatggtcaccaagcctggaaacatagagtctcaccctgttgcttaggcagatggcgcgatctcggctcctgggttcaagcaattctcctgcctcagcctcctgaatagccgggattacagtcgtccagcatgctctgcccaccccacgccgaggtgcactgaccatgagcctcaactcctccctcagctgcaggaaggagctgagtaatctcactgaggaggagggtggcgaagggggcgtcatcatcacccagttcatcgccatcattgtcatcaccatttttgtctgcctgggaaacctggtcatcgtggtcaccttgtacaagaagtcctacctcctcaccctcagcaacaagttcgtcttcagcctgactctgtccaacttcctgctgtccgtgttggtgctgccttttgtggtgacgagctccatccgcagggaatggatctttggtgtagtgtggtgcaacttctctgccctcctctacctgctgatcagctctgccagcatgctaaccctcggggtcattgccatcgaccgctactatgctgtcctgtaccccatggtgtaccccatgaagatcacagggaaccgggctgtgatggcacttgtctacatctggcttcactcgctcatcggctgcctgccacccctgtttggttggtcatccgtggagtttgacgagttcaaatggatgtgtgtggctgcttggcaccgggagcctggctacacggccttctggcagatctggtgtgccctcttcccctttctggtcatgctggtgtgctatggcttcatcttccgcgtggccagggtcaaggcacgcaaggtgcactgtggcacagtcgtcatcgtggaggaggatgctcagaggaccgggaggaagaactccagcacctccacctcctcttcaggcagcaggaggaatgcctttcagggtgtggtctactcggccaaccagtgcaaagccctcatcaccatcctggtggtcctcggtgccttcatggtcacctggggcccctacatggttgtcatcgcctctgaggccctctgggggaaaagctccgtctccccgagcctggagacttgggccacatggctgtcctttgccagcgctgtctgccaccccctgatctatggactctggaacaagacagttcgcaaagaactactgggcatgtgctttggggaccggtattatcgggaaccatttgtgcaacgacagaggacttccaggctcttcagcatttccaacaggatcacagacctgggcctgtccccacacctcactgcgctcatggcaggtggacagcccctggggcacagcagcagcacgggggacactggcttcagctgctcccaggactcagggacagatatgatgctgcttgaggactacacgtctgatgacaaccctccctctcactgcacttgcccacccaagagaaggagctcggtgacatttgaggatgaagtggaacaaatcaaagaagctgccaagaactcgattcttcatgtgaaagctgaagtacacaagtccttggacagttacgcagcaagcttggccaaagccattgaggccgaagccaaaatcaacttatttggggaggaggctttgccaggggtcttggttacagcacggactgtcccggggggcggcttcgggggccgccgaggcagcagaactcttgtgagccagaggctgcagttgcagagcatcgaagaaggagatgttttagctgccgagcagagatgagggcctcagggtgccgtggggctgcagcctgagaggctggcccggggaggagttcccatcaccgcctgtgccgcggccttgggagcatgtcactgtgtacagctggccacacacagggaaggagcagcatctggtatgcagccaccaggacaaggactgaaaataatgtctacagtccacagcttcagcatttccagagaccacatgtgagcttcttttaggtcccagtgatgggaccagaagcatctaaagcaaaaaaaaaaccaaaaaaaaatctagagatgtggctgtggctttttgggaggtggggcatgggaggaccagagacgaagggcttggaaggagacccccacatgcatcatttcctcctcttcacagtgtgctgggagtccagccgtgcactgtgccagatgcctcaggaggagaaccctccccagtgtactgtgaaggatgacacagcacttcttcctaatgacacgcgaccgtcctggtgcctctacatggttgatgcgggcagtgtgggaccctcagttctaggactggtccgcagagaaagcacccaggagcagagcgcttcggagcggtcctcagtggcgccacctgctggtgctaatagggacagccacaggcctcttgcagactggcccaccctgcctacttccctactgacaagttctttggtatttcaaaagggagaaaccactataaaagacaagaggaagggcaggtactaggtgtttcatttccagaattaaaaaaaaaatccatttaaaaaaaaaaaaaaaaaaaaaaaaaaaaaaaaaaaaaaaaaaaaaaaaaaaaaaaaaaa

SEQ ID NO: 159 - DNA, 4001 bp, Homo sapiens
agtggaaggagcgcggtggcgcgggagcggccccggggaccccgcgctgctgacggcggcgaccgcggccggaggcgggcgcgggtctcggaggcggtcgcctcagcaccgccccacgggcggccccagcccctcccgcagccctcctccctcccgctcccttcccgccgcctcctccccgccctcctccctcctcgctcgcgggccgggcccggcatggtgcggcgtcgccgccgatggcgctgaggcggagcatggggcggccggggctcccgccgctgccgctgccgccgccaccgcggctcgggctgctgctggcggctctggcttctctgctgctcccggagtccgccgccgcaggtctgaagctcatgggagccccggtgaagctgacagtgtctcaggggcagccggtgaagctcaactgcagtgtggaggggatggaggagcctgacatccagtgggtgaaggatggggctgtggtccagaacttggaccagttgtacatcccagtcagcgagcagcactggatcggcttcctcagcctgaagtcagtggagcgctctgacgccggccggtactggtgccaggtggaggatgggggtgaaaccgagatctcccagccagtgtggctcacggtagaaggtgtgccatttttcacagtggagccaaaagatctggcagtgccacccaatgcccctttccaactgtcttgtgaggctgtgggtccccctgaacctgttaccattgtctggtggagaggaactacgaagatcgggggacccgctccctctccatctgttttaaatgtaacaggggtgacccagagcaccatgttttcctgtgaagctcacaacctaaaaggcctggcctcttctcgcacagccactgttcaccttcaagcactgcctgcagcccccttcaacatcaccgtgacaaagctttccagcagcaacgctagtgtggcctggatgccaggtgctgatggccgagctctgctacagtcctgtacagttcaggtgacacaggccccaggaggctgggaagtcctggctgttgtggtccctgtgcccccctttacctgcctgctccgggacctggtgcctgccaccaactacagcctcagggtgcgctgtgccaatgccttggggccctctccctatgctgactgggtgccctttcagaccaagggtctagccccagccagcgctccccaaaacctccatgccatccgcacagattcaggcctcatcttggagtgggaagaagtgatccccgaggcccctttggaaggccccctgggaccctacaaactgtcctgggttcaagacaatggaacccaggatgagctgacagtggaggggaccagggccaatttgacaggctgggatccccaaaaggacctgatcgtacgtgtgtgcgtctccaatgcagttggctgtggaccctggagtcagccactggtggtctcttctcatgaccgtgcaggccagcagggccctcctcacagccgcacatcctgggtacctgtggtccttggtgtgctaacggccctggtgacggctgctgccctggccctcatcctgcttcgaaagagacggaaagagacgcggtttgggcaagcctttgacagtgtcatggcccggggagagccagccgttcacttccgggcagcccggtccttcaatcgagaaaggcccgagcgcatcgaggccacattggacagcttgggcatcagcgatgaactaaaggaaaaactggaggatgtgctcatcccagagcagcagttcaccctgggccggatgttgggcaaaggagagtttggttcagtgcgggaggcccagctgaagcaagaggatggctcctttgtgaaagtggctgtgaagatgctgaaagctgacatcattgcctcaagcgacattgaagagttcctcagggaagcagcttgcatgaaggagtttgaccatccacacgtggccaaacttgttggggtaagcctccggagcagggctaaaggccgtctccccatccccatggtcatcttgcccttcatgaagcatggggacctgcatgccttcctgctcgcctcccggattggggagaacccctttaacctacccctccagaccctgatccggttcatggtggacattgcctgcggcatggagtacctgagctctcggaacttcatccaccgagacctggctgctcggaattgcatgctggcagaggacatgacagtgtgtgtggctgacttcggactctcccggaagatctacagtggggactactatcgtcaaggctgtgcctccaaactgcctgtcaagtggctggccctggagagcctggccgacaacctgtatactgtgcagagtgacgtgtgggcgttcggggtgaccatgtgggagatcatgacacgtgggcagacgccatatgctggcatcgaaaacgctgagatttacaactacctcattggcgggaaccgcctgaaacagcctccggagtgtatggaggacgtgtatgatctcatgtaccagtgctggagtgctgaccccaagcagcgcccgagctttacttgtctgcgaatggaactggagaacatcttgggccagctgtctgtgctatctgccagccaggaccccttatacatcaacatcgagagagctgaggagcccactgcgggaggcagcctggagctacctggcagggatcagccctacagtggggctggggatggcagtggcatgggggcagtgggtggcactcccagtgactgtcggtacatactcacccccggagggctggctgagcagccagggcaggcagagcaccagccagagagtcccctcaatgagacacagaggcttttgctgctgcagcaagggctactgccacacagtagctgttagcccacaggcagagggcatcggggccatttggccggctctggtggccactgagctggctgactaagccccgtctgaccccagcccagacagcaaggtgtggaggctcctgtggtagtcctcccaagctgtgctgggaagcccggactgaccaaatcacccaatcccagttcttcctgcaaccactctgtggccagcctggcatcagtttaggccttggcttgatggaagtgggccagtcctggttgtctgaacccaggcagctggcaggagtggggtggttatgtttccatggttaccatgggtgtggatggcagtgtggggagggcaggtccagctctgtgggccctaccctcctgctgagctgcccctgctgcttaagtgcatgcattgagctgcctccagcctggtggcccagctattaccacacttggggtttaaatatccaggtgtgcccctccaagtcacaaagagatgtccttgtaatattcccttttaggtgagggttggtaaggggttggtatctcaggtctgaatcttcaccatctttctgattccgcaccctgcctacgccaggagaagttgaggggagcatgcttccctgcagctgaccgggtcacacaaaggcatgctggagtacccagcctatcaggtgcccctcttccaaaggcagcgtgccgagccagcaagaggaaggggtgctgtgaggcttgcccaggagcaagtgaggccggagaggagttcaggaacccttctccatacccacaatctgagcacgctaccaaatctcaaaatatcctaagactaacaaaggcagctgtgtctgagcccaacccttctaaacggtgacctttagtgccaacttcccctctaactggacagcctcttctgtcccaagtctccagagagaaatcaggcctgatgagggggaattcctggaacctggaccccagccttggtgggggagcctctggaatgcatggggcgggtcctagctgttagggacatttccaagctgttagttgctgtttaaaatagaaataaaattgaagactaaagacctaaaaaaaaaaaaaaaaaaaaaaaaaaaaaaaa

SEQ ID NO: 160 - DNA, 7185 bp, Homo sapiens
agttgtacgttcgaaacctgtcgccgtcacttgcgcgtttggcattatccattgtcaccgcggaggaacgagcgctcgagatatcatcagtgcccgcaaatctccgcgccaaggcgctgagctactcctttccgaggtgcgcctctggtcctccgtccctggtgcccagcagcggcgaggcggcatctccgctcccgccgccgtgtccaccgagccctgggatcagggtggcagttctcaacgatgggcaggagggacctcggcggcgacccctaaaacaataccatgccccgggatccccgctgctgccgcgccagcgtcttccctttccacctccctgaccctgtcggattcggatgagcccattgcaaggagaagacgcagccgtcagattgcagattgagcttaaccaagaagttcgtaggctaatcaaggctggcttgacctacaaaagaagaagagagttctgcctgcccacttgggcttgtgttgacacggctgataacttgccatcacctgttgccagtgtggaaaaattctccctgttgaattttttgcacatggaggacagcagcaaagagggcaacacaggctgataagaccagagacagcagggagattattttaccatacgccctcaggacgttccctctagctggagttctggacttcaacagaaccccatccagtcattttgattttgctgtttattttttttttctttttctttttcccaccacattgtattttatttccgtacttcagaaatgggcctacagaccacaaagtggcccagccatggggcttttttcctgaagtcttggcttatcatttccctggggctctactcacaggtgtccaaactcctggcctgccctagtgtgtgccgctgcgacaggaactttgtctactgtaatgagcgaagcttgacctcagtgcctcttgggatcccggagggcgtaaccgtactctacctccacaacaaccaaattaataatgctggatttcctgcagaactgcacaatgtacagtcggtgcacacggtctacctgtatggcaaccaactggacgaattccccatgaaccttcccaagaatgtcagagttctccatttgcaggaaaacaatattcagaccatttcacgggctgctcttgcccagctcttgaagcttgaagagctgcacctggatgacaactccatatccacagtgggggtggaagacggggccttccgggaggctattagcctcaaattgttgtttttgtctaagaatcacctgagcagtgtgcctgttgggcttcctgtggacttgcaagagctgagagtggatgaaaatcgaattgctgtcatatccgacatggccttccagaatctcacgagcttggagcgtcttattgtggacgggaacctcctgaccaacaagggtatcgccgagggcaccttcagccatctcaccaagctcaaggaattttcaattgtacgtaattcgctgtcccaccctcctcccgatctcccaggtacgcatctgatcaggctctatttgcaggacaaccagataaaccacattcctttgacagccttctcaaatctgcgtaagctggaacggctggatatatccaacaaccaactgcggatgctgactcaaggggtttttgataatctctccaacctgaagcagctcactgctcggaataacccttggttttgtgactgcagtattaaatgggtcacagaatggctcaaatatatcccttcatctctcaacgtgcggggtttcatgtgccaaggtcctgaacaagtccgggggatggccgtcagggaattaaatatgaatcttttgtcctgtcccaccacgacccccggcctgcctctcttcaccccagccccaagtacagcttctccgaccactcagcctcccaccctctctattccaaaccctagcagaagctacacgcctccaactcctaccacatcgaaacttcccacgattcctgactgggatggcagagaaagagtgaccccacctatttctgaacggatccagctctctatccattttgtgaatgatacttccattcaagtcagctggctctctctcttcaccgtgatggcatacaaactcacatgggtgaaaatgggccacagtttagtagggggcatcgttcaggagcgcatagtcagcggtgagaagcaacacctgagcctggttaacttagagccccgatccacctatcggatttgtttagtgccactggatgcttttaactaccgcgcggtagaagacaccatttgttcagaggccaccacccatgcctcctatctgaacaacggcagcaacacagcgtccagccatgagcagacgacgtcccacagcatgggctccccctttctgctggcgggcttgatcgggggcgcggtgatatttgtgctggtggtcttgctcagcgtcttttgctggcatatgcacaaaaaggggcgctacacctcccagaagtggaaatacaaccggggccggcggaaagatgattattgcgaggcaggcaccaagaaggacaactccatcctggagatgacagaaaccagttttcagatcgtctccttaaataacgatcaactccttaaaggagatttcagactgcagcccatttacaccccaaatgggggcattaattacacagactgccatatccccaacaacatgcgatactgcaacagcagcgtgccagacctggagcactgccatacgtgacagccagaggcccagcgttatcaaggcggacaattagactcttgagaacacactcgtgtgtgcacataaagacacgcagattacatttgataaatgttacacagatgcatttgtgcatttgaatactctgtaatttatacggtgtactatataatgggatttaaaaaaagtgctatcttttctatttcaagttaattacaaacagttttgtaactctttgctttttaaatcttaaaaaaaaaaaagttgctgaagtactgtacagggttgtacaatgagaacccaatgccaaggcaaaaagaacgagtgatttttccttaggatacacatcaaccactttgctgttgaagctgtcagaataaattcctggtggtcagatgaaagggcagattaaatggactcatcagggtaagaggaataatatgggtaaaacaagaaatggcccgatagtttcacactattcctatacctccaggtccggaagacaggtaaaaaattctataatgtaagaatggaggtagttaccctgatttgaccctgtgtgggaaatgctgaaagcaccaggaggaagccggttcccgtgagataagttaacccggcctgacagaatcaagaaaattgagatgagatttgaaaggacccgaaaatgcaggggttggctttctgactgggaacttaaaaatcactcttcatgcttccctggtcctatgtgataacagagttagagacttgagtctgatttcagtcatcttcagggaccagtctgatgttgtagcaagaagactccctttaaaagtgttactgttcaaatcatatatcaggttgaatcacattcaacagagatatattctagaatacttttttagaagaggctaataaagggaagaattatattgaatggaattatttttgataatgagaattatttgggtagattcactgaggctatgtcaacatgatatttagaccaacaggtgatcaatgtttggaaaatacaacaatgacttatttaaaaattacccttcctgctatttagacaaaaacaactgatcagtggttctgttatgtcagctgactttgttagtatcatgttgaaatagcttgaagtaatatcttttatccccttgcaaattcttgtcttccaatcatctcccatatattttcataattagttgtttatgacacctttgtttttctccctctgttcagtatttcaaggaaaattatggatgccagtcttggctgcacaagatatccattacgtacttatacattttaaaatgagtactaattttcactgctaataattctgtaaggacacatcaaagctggccaaaataatgaattttttttaaaaagcaatacctggtttccaccttggactgactttgatcctgttccacttttgaaattttatttgttccttttccatcgtggatgttcctctactttggcaattgtggagggctaatcaatcttatgttagcaggacaacccatgaaaaacaagtcagagagtgaaggctttttcccctaatcctggcagagcagggcgtagaaaagagaggatgtccgtgcttaattctagatacttttgagacaacaccttcagaaaacacataatttaatctttgccatccttagatagagaagggctatagatcacatacgttatcaaaaactactcccttggaaaaaatatctttcgaaaatcaaatttaaacatttcactctgtgctgcatatttcttttaccattgaccattattatagggacccatgaagtaaatgtcacaatcatcttactagctctctctctctcagcaaaataaaactgtgatgtgtcttctttgtaaaagtttaggtataaaatgctatgcaactttttctttatagtaagagctttattttctttaataatatagcccaacttatatgttttaatctcccttgtccctcagaataagcagaaaatataactgcagctgtatgtcgtagacacaagaattgaaactgtgcagtcagtagagctgaacttagctatgaattaatttaaattaattctaaagtgactctggtttccattttagtctattagctagagggttttggctgttgctttttttaaagttaggtccacacagtgaagggaaaagagtctgtgaaggtgatcagtgtagcagtaagacatctaaaatcaagacaatgacatgggggctttgtgtacttagctggataattcccttctactgtcctcttccccttggctgtgtagataaaattgtgcattcaaatgatggtactttgacttttgagggtttttatttctgttattcacaaaatactcattctcatttatgtatattgtatgtttaacccccagtgggatttctggctgctgaaaccactttgggccaggaagaacaaggatgaagaggttcctgtcatttcttatggggttcacagaattatttggggcttaaatggtacaatggagacagtcatgtgcaatgcttaagatggtctgacagggtcccttttgctggaggtgttcctgaagagattgaacctagtaacaggctttattttcaccttgtgtacaacatggcaaagactgctaagattaaaatccgtctcccatttgttacagcctcacctgcaccaggatagaaagcacgtgatggaatctgtgatgtctaatgtgtcttatgaaaattgccaaacaactgtccctggggattctgctttgattggcatttttagtcatgggaatgtatatttgctgatatatctgctctgtgtttgggcctctcttgctgtcattatgatgtattttgagatgattagtcaagagtcaaggttgcgagtacaggccaagaccatgggaaaaaaagccatgctcactggccaataaagagcttgatgctgcctggccaaatgaggtgactcagatagaatctgatcccattcagagcttggtaaatgtcactgtacagaagacattgaaaaggaagaggcatagtcatgatcaaaaggatatattgacagttatctatagccagggtagttgttaatacctgcttgtttggggagatatgtttgattatagagagactctgggccaccctcaaacaccgtcagatgcattagcagcccactgcatgggacaatcgcaggcagatacgaggaatgtatcccctgcctattttccttgtgtaacaaatggaaaacattctcccctgtgagaaataatgcaatttctaattatctggatgttcgttgaaaatatattagacattctccctgaggttaaaaacaaaaagtacgtgaccagtctggtaagaagtattaatgaagtagctaatattacagcttcattttctactagcacctatcataatggtcttagtcatttcacacaaatcagaacttccttccccaccagggaggacaacatcttcatgctgtgattgaagcatccattcagaacacgaggcaatattgcagtccacagggaatggatgcttcacttgatctccggaccttggctgcagaggccatcgcagcttttgaaaagtgaaggggttaattcccattggtgtctttgcttatagcatttttctctaacctataacaaggagacattacattttactttagaacatgagaatagcagttttgctcatgacttaccattccagctgcatgggaaagcaaagcagaaaacagtgccccaaatggaaaaaagatactcacacagaacaaaacagttcttggtcttgttcttggtcttgtcaaaccttgcctgatgctctttctaaagtcaaaatatgaatgctaagaaggcataacctacatccttctctgatttcttcagcagggtcaaaagacagttactagcaatggggaatgcttgtcactgtggagaaagagttttgtatatgtctgataccgttgttataacaaaacaaatttttttactatagttttttgttttctacctgcacacccaccagaagagcacaaagcaaggccattgcaacaggcatttaaaaattattatcaaacatgcacatgcttgtacacacacacacacacacacacaaacaggggcatttgtaaaggtgtccctggaatgtaagatttataatgtttaaggcaaggtgaaggcattgccaagtgtgtgtcgctcataggactagtgtatattcactgaaagttaacctgatgatttgttattgtttgaaccatatgctgatttgcttctggtttctgtttagtgtgttctctctgataaggggctgaaagattctgcatcacacatcctctgagacctaccatgtcgcacactttgttaatgacaaacttcactctacactatacagtaccttgttgatatattcagtaaagtcttattttaaaagaaaaccaaaaaaa

SEQ ID NO: 161 - DNA, 3641 bp, Homo sapiens
cttagaccttggttagatttgaaccaaggccctcctcggcctcccaaagtgctgggattacaggcgtgagccactgcccagctgaaaattgatacatttttcaaatgagaagtatttttttcaaatgggtgttggaaagtgagtttcctcacattgttcatgttgtgacactaggttggtgctatgtaatgacatggatatgaacgagctgcctacgaacctccccgtggacactgtgaagcttcgcatagagaagactgtcatccgcagaatctctgcggaggccttctattacctggtggagctccagtatctctgggtgacttacaattccgtggccagcattgaccccagcagcttttacaacctgaagcaactgcatgagttgcgcttggatgggaattctctggctgctttcccttgggcatctctgctggacatgccccttctgaggaccctggacttgcacaataacaaaataaccagtgtgccaaatgaggcgctcaggtatctgaagaaccttgcctacttggatttatcaagcaacagactcaccacattgccaccagatttcctggagagctggactcatttagtttcaacaccttctggagtcctggacctttccccaagcaggattattcttggtctacaggacaatccttggttctgtgactgtcatatttccaaaatgattgagttgtcaaaggtcgttgaccctgctatagtgcttctggatccactgatgacttgcagtgaacctgagcgcctcacaggaattttgtttcagcgggctgaattggagcattgtctgaaaccatcagtgatgacctcagccaccaaaatcatgtctgctctgggcagtaatgttctactgcggtgtgatgccactggcttccccaccccacagatcacatggaccagatctgacagctcgccagttaattatacagtaatacaagaatctccagaggaaggagtcagatggtccataatgagcttgacaggcatttcttccaaagacgctggggattacaaatgtaaggccaaaaatctggctgggatgtcagaagctgtggttactgtgacagtgcttggcattaccacaactccaataccaccagacacttctgaaagaactggagatcatcctgagtgggatgtccagccgggatctggaagatctacatctgtatctagcgcatcatcatatctttggtcctcttccttctcccccacatcttctttttctgcttctactttgtctcctccctctactgcttccttctctttatctcctttctcctcctccactgtttcttcaaccacaactctgagcacaagcatctcagcaagtaccaccatggccaacaagcgatcattccagctccaccaaggtgggaaaagaaatttaaaggtggcaaagaatggaagtaagcttcctccagccagcacaagtaagaaagaagagctggcattgttggatcaaacaatgcttacggagacaaatgccgcaatagaaaacctcagggtggtcagtgagactaaagagagtgtgacattgacgtggaatatgatcaacaccacacataactctgcagtgactgtgttgtattccaagtatggtgggaaggacctgctgctgttgaatgcagactccagcaagaaccaagtaaccatagatggcttggaacccggtgggcaatacatggcctgtgtctgtccaaaaggagtgcctccccagaaagaccaatgcatcaccttttctactgaaagagttgaaggagatgattctcaatggtctctccttctcgtggtgaccagtactgcctgtgttgttatcttaccattgatttgtttcttgttgtacaaagtttgcaaactgcaatgtaaatcagaacctttttgggaagatgatttggcaaaggagacttatatccaatttgagaccctgtttcccaggtctcaaagtgtaggtgagctctggacacgaagccacagggatgactcagagaaattgctgctttgttctaggtcaagtgtggaatctcaggtgacttttaaaagtgaaggttccagaccagagtattattgctaaggttctgcagctcaggtgcatgtgagctacaaaactagcatctaagggtataattgaccctaggtttggatgacttttggacagactttcacattgtacatgaaaatcacaaatggaatgcttttaagtatgtttaaaaaataccatgagacctctgaactgaaaagacaaataatgttgattttttttcttgtgtggaaaaggtctacagaaataatttttagagtggtgcttaataaattattaatactttttagggtaatgttttagttcttaaaaataagttcatgtgaaagtagcaagtgaactctgtatttaaaaatatagttttttgagtcatgaggaaacattagcaaaaccagctaagccttgatgtttattcatgttcgaagtgcattatagcatttgctgtggatgttttctgacattgcctaatggagagcgtgggatcataaaggattttgtgttcactaaggttaaatctaactcacgggagagagagggctctgtctcttggtaccattatgcattgtgatactatagagttgtgttcatatttcttgtaagaaaaatttttgcttttctttagaaatataggtattagcaaaagtaagtatacaaagaggattatgacaaatagaccatttctttaaaaatggtaactgttgcatttaaacacatcgactgacagattatatggatatttaaaaataactttaaatcaatcttttaatattttgctgtttgctcttatgttctcccttctttcttccttccttgtcttccctccctttccttccttcattctttctttcttctgctctgtcagaagatatacaagtagccaaagcatcacgagccaagctgtttgtcttttgccatattgtcttttgattctcttgataaagagaaagcttttgaaattacttactgccctttgaaagtctgttttacaaccccaaaggatattttaggactttaaaagggaagcttcagtggattcatttggttagattcttttcctaggttaaaaacatcggggaacttaaatacataggaaaggagttcacaaataaaatttagtttttttagaaagagaatattttaataactgtagtatactacaagaaacatctcatggctttaagattaacgatagcgataaggcccactcaagcatctcacagtggtgatattacatgtcacttagcaggatgcaacctggcctagggatttccagaagacaaggccacctcagcacagatgcaactttcataaattttagaacaaagcctaaccttactagattaaacttgctctatgaaagaaacacttggtaattgacccagactgaatacatgtataagaaatgggaaagatctcccaaactctgagaacggtcctcaaatagaagctctcctagtcagttggtcatctgacctctgactatatccggcctatgacaccagccagctcctgctttctgtcttgtaagagcactgctggaataaactacttgagcattaaaaaaaaaaaaaaaaaa

SEQ ID NO: 162 - DNA, 8704 bp, Homo sapiens
gaatgcaggtgagaaaaggcacggactctgcggctgcgaacccaaacttgggcaccgcacggtgcgcactgctcagccttcgcccccgtgggcgaaaggctgctgcggtttcaggcggctgcttcgtgactaatgaccttgcgcagagttgttaagaaaaaagagaaacccgcgctctccggggtgagaagggactgactctgggcgtctctgaagatggctcgggcttctctttggcgcgccggggggaccctgacactgaccgctctgtgacgcgagtagtctcccctgcaccgtgcccgaagcgacgtgccgggggatttttcattctcgatctgttgactggctcccccgctgcatgagcagagtcggagttgagactggcttgttgctggccccagcgcctggtgcaggaagcgactcacgtttgtctgggtggccggagccggagcagagcctgggtttggagtgagtgcctggaacgtgaattggactcaactcgagtagcagcaaagaccagcgggctggcaggcgggggaggctgcaggctcattccccacctcttcccagccccactgcccgtctgccggagcggttctggccccttccgacagagcggggactagagccggggattctccgcccgctgaggggatgactctgggttgggggagcgccgaacccgcggcgcgcagtgtcccgtgaactgtgagtactgcgactgaacggcggcaggcgagcgggcgattagcacccattgcatgaattatgaaacaataactttcggaagaagcaggaggaaaaaaagaagcatctatcgctgccctcccacccccattcccggccaactctccacgccgcttttgccccctccctcccctccctctcgctccttcctttccgggagaggggagaggactcgggggagggcaggcggccggccccggaggaggggggcgccgagggggctgtggttagaaggagcagtagcagcagcagcaggagaagatgctgaggatgcggaccgcgggatgggcgcgcggctggtgcttgggctgctgcctcctcctgccgctctcgctcagcctggcggccgccaagcagctcctccggtaccggctggccgaggagggccccgccgacgtccgcatcggcaacgtggcttcagacctgggcatcgtgaccggatcgggtgaggtgactttcagcctggagtccggttccgagtacctgaagatcgacaacctcactggcgagctgagcacgagcgagcggcgcatcgaccgcgagaagctgccccagtgtcagatgatcttcgacgagaacgagtgcttcctggacttcgaggtgtcggtgatcgggccctcgcagagctgggtggacctgtttgagggtcaggtcatcgtgcttgacatcaacgacaacacgcccaccttcccgtcgcccgtgctcacgctcacggtggaggagaatcggccggtgggcacactttacctgctgcccacagccaccgaccgcgacttcggccgcaacggcatcgagcgctacgagctgctccaggagcccggaggcggcggcagcggcggcgagagccggcgcgccggggcggccgacagcgccccctaccccgggggcggcgggaacggcgcgagcggcggcggctcgggaggctccaagcggcggctggacgcatcagagggcggcggcggcaccaaccccggcggccgcagcagcgtgttcgagctgcaggtggcggacaccccggacggcgagaagcagccgcagctgatcgtgaagggggcgctggaccgcgagcagcgcgactcctacgagctgaccctgcgagtgcgcgacggcggcgacccgcctcgctcctcgcaggccatcctacgggtcctcatcaccgacgtgaacgacaacagcccccgcttcgagaagagcgtgtacgaggccgacttggctgagaacagcgccccggggacccccatcctgcaactgcgcgcagccgacttggacgtgggggtcaacgggcagatcgaatacgtgttcggggcggccaccgagtcggtgaggcggctgctgcgccttgacgagacgtccggctggctcagcgtcctgcaccggatcgaccgcgaggaggtgaaccagctgcgcttcacggtcatggcccgcgaccgcgggcagccccccaagaccgacaaggccaccgtggtccttaacatcaaagacgagaacgacaacgtgccgtccattgaaatccgcaagattgggcgcatccccctcaaggacggggtggccaacgtggccgaggacgttctggtcgacacccccatcgctctggtgcaggtgtccgaccgagaccaaggcgagaacggggtggtcacctgcaccgtggtgggcgacgtgcccttccagctcaagccagccagcgacaccgagggcgaccagaacaagaaaaagtacttcttgcacacctcgacccctctggactatgaggccacccgggagttcaacgtggtcatcgtggcggtggactcaggcagccccagcctctcgagcaacaactccctgattgtcaaggtgggagacaccaacgacaacccgcccatgttcggccagtcggtggtggaggtttacttccctgagaacaacatcccgggcgagagggtggccacggtgctggcgacagacgcagacagcggtaagaacgccgagatcgcctactcgctggactcctctgtgatggggatctttgccatcgatcccgattctggggacatcctggtcaataccgtgctggaccgcgagcagactgacaggtatgagtttaaagttaacgccaaagacaaaggcatccccgtgctgcagggcagcactacggtgattgtgcaggtggctgataaaaatgacaatgaccctaagtttatgcaggacgtcttcaccttttatgtgaaagaaaacttgcagcccaacagccctgtggggatggtcaccgtgatggatgctgacaaggggcggaatgcagagatgagcctgtacatagaggagaacaataacattttttctattgaaaatgacacggggaccatttactccacaatgtcttttgaccgggaacatcagaccacatacactttcagagtcaaggctgtggatgggggagatcctcccagatctgccacagctacagtctcgctttttgtgatggatgaaaatgacaatgctcccacagttacccttcccaaaaacatttcctacactttactgccaccttcgagtaatgtcaggacagtagtagctacagtgttggcaacagacagtgatgatggcatcaatgcagacctgaactacagcattgtgggaggaaatcccttcaagctgtttgaaattgatcccactagtggtgtggtttccttagtgggaaaactcacccaaaagcattatggcttgcacaggttggtggtgcaagtgaatgacagtgggcagccttcccagtccaccacgactctggtgcacgtgtttgtcaatgaaagtgtttctaatgcaactgcgattgactcccagatagctagaagtttgcacatcccactcacccaggatatagctggtgacccaagctatgaaattagcaaacagagactcagtattgtcattggcgtggttgctggcattatgacggtgattctaatcatcttaattgtagtgatggcaaggtactgcaggtccaaaaataaaaatggctatgaagccggcaaaaaagatcacgaagacttttttacaccccaacagcatgacaaatctaaaaagcctaaaaaggacaagaaaaacaaaaaatctaagcagcctctctacagcagcattgtcactgtggaggcttctaagccaaatggacagaggtatgatagtgtcaatgagaagctgtcagacagcccaagcatggggcgatacaggtccgttaatggtgggcccggcagtcctgacctggcaaggcattacaaatctagttccccattgcctactgttcagcttcatccccagtcaccaactgcaggaaaaaaacaccaggccgtacaagatctaccaccagccaacacatttgtgggagcaggagacaacatttcaattggatcagatcactgctctgagtacagctgtcaaaccaataacaagtacagcaaacagccatttcgtagagtgacgttttctgttgtgagtcagcctcaggacccacatcaggggtcactgcagagttgctatgacagcgggctggaggagtcagaaacaccaagcagtaagagttcatcagggccaagactgggtgcgcttccactcccagaggacaactatgaaaggaccacgccggatggcagtgttgattcaaggcctcttccagatgtagccctgactgggaagtgcactcgtgagtgtgatgagtatggccactcagactcctgctggatgccggtccgcacttctccggagaggaagaagagccagcctaaactgtccactttcatgcctgttgatgaacgaggaagccaggaaaagctggccaatggggaggccgccatcatgggtgaccgcaacagaaacctcctgaacaaaaagttgacctcatcctatgagaccttcagtgcagctagtttcagcaaaaatgaggaagccaaccctgaggatattccccttacaaaaacaggggaatataagccatctcctgtcaatactctcactagaagagaagtttacctgtaggctataaaggagcaacagcaaagttctttacatgtatgaaaaggagaataaggggcaaaaaccttacaaagcaaaacgtttaatcacaaagagggggctaccaaagagacaaagctttgcctgccacttctgcctccagatcaggcctttagtgatactgttagcctgattctactgtacaatgtagaaaccatccttgttacttgcatgtctaaccccttcactgattcccaacactcactttctcttccccacccctctccaaaaaaaaaaaaacaaaaagaaaagaaaaaaaaagggggatagttgcaagtttctttcacagtaactgtacgaagcctgattagcagaacacaacacaccctcattatccctaagctgaagcatgattttagtcactttgattttgttcgagtgtcatctggctggtcaaaaataagcaggacagataaaatgtatttcagacataccatcagaaaatggtttatcaccatcaaaggcaatcctttgaaagtgatagagtccctctaaaggtacagtccttagaaagagggactgtattaaaaagtattttgggaatatcaaagctttaatattccaacaaagactaagagaaaaacaatactcagtgggtgattgcagtcctaaattgtcatatgttgttattttcaggtcaagagcatcaacttcaattccatacattcaccaaatattctcagtatacacacagtcttgattacatgtatcaatttcaccagttatgacttctaaaaattatatatattttttcagaacaagaccactattattaactaacttgaacaattgtatcatccaaaggccaaagatcatatggcagatcagggaagtcatgaagttgatttggtcttgacgtggaaaaccattaaacaacaaaagcaactgaacccatgtatgcacagaaacaatcaaacactagttcattttatagtgcccaggaaaatgttccttcttttaaaatggattttatttgaaagcgcagaaaatgaaaactagtgagatatatttttggtattataataggcaattggttgaggttcaagtttagtttcaggtaatattatcagggaagattccatgttttaaaatagtatttatggatcatgggtaggttaagaaagatgcattggcatatagtcttgatagttaagtccacgattatcattttagaatccaggctatgcttgctgctctttttatccacattttaaattacaattgcattttttacttgttcagtgcacactttgatgcaccacaagtgcattaattttgaatcgtgtgcaatatagaaatattttgagactcacaacattgaaacaaggtgacaccctagttgactttatcactaatgtgatttgaacattatttaaacaaatctagactgaacatgaaagaaaggagttttgggcagtgacatttttcacagaatgtatatctcaaaggtgaaagcagagtttttccagtgcaataaaaagaaacagaatatgcagattttgagctactcactctatagaggataacctaacacggctgaaaattgagctgggacattcagacgaaagtgacaatccatggacagaatagggaataacaggtgtgaagagaacaaacttatcactgaatgtttgcaagctggttaaggcatagccttgatggctctctagcaaactgtagaaacaatgtagctttgggtagtttcatgctttgcagaatttcttagactataaagtgacacagcctggaatataggttgataattcactataggtcttcaaaatacttatctttgaaaaccgcttctctgtttggtggggtacaatttgggggtcatttccttatgctctttcttaaatggagttttcattttgatgttagtttatgtataataggtaggatgcaaaaagatatgtaattgaaacaaaaaacattggactaaaatatcagtaattgaacatgtttatgtttgattattatttacactatggaaagatgcaattctagtactttgttaggaaactgcattaaagcagttctgccttgtataatctgtaagtacctattaagacaaaatacttctaaagatacttatgaaatgtatacacattttttcttgcacgttacaaagaaaatactcaattgcataacacggatgtttgacaaacttttttttttttaatgcatttctttctttcatgagacattgaaaccactgatagctcatttcaccctatcttaaacccttctcttgtctataaaactaatacgggtcacaccggaccttcggattaattggatccacattccccaatgatgtttgcaccccattcaagatagccatgccattgtcatttaactcgtgaacctctctttaaaactaaaatggatgtgaaagaataaaattcagtgtactgtaagtattcacagtaattctagtagaattagctgtcataacatgtttattatataatgagctggcatgacacagaaatatattttgtgtttgtatgacttttattttaaataggttaaatctggtgccactccatatatagagtgcttttgaaaaaaaatcaataaaaagaaacaaaaaaaataaatgagtgaatgcaaaataagcaactgtgccttttatacctgttgttacggtaaaaaaacggttgttgggtttggacaatgaggggaaatgggctattcccaacttttttgatcctgtatatttgtccatgtttattttctgaacataataaataatatattaaaaatttgccttctgacaaactcagataatggaccagtcttaaatattgttatgtcataaagcaaagttaaggcattaatatgggctgcttaaatctgactagaagatgaaagcgtttattgtaagtgtaacacagagatactatcaggagtgaaatcagtccatttggcaaggtaaaatactgatttagagttttattctttatttcttttttgttgtgtttctttcagctatggtttcattttggttgtacagtatataaaccatatttgttttctgtacacaagactctcaagtgaattttgcatgcattatacattaggacacatttataaattaatgagtaactatataaatttatgtgtattaaaacgtctgtagcttcaatctaaaatctactgctctttctgaatctccagatatcatttctgtatggtttctgactggcctgctgcctgagtttcagaaaacaagggaggcattatttttatgggaggaggaactaagatggtactgaggatgtctgactgaaacactaccctaggaagctgtcttgtaggaaaatagaataaaacacacagaccagaagaaattgtcaagaagcaaacagccatccaaaaacagtcatgagaaatctaaagacctaaataatcttaggtatatgctctcagtgagaaataagaaaatgtgtccttaagcaaaaataaataaataaataaataaataaataaataataaaaagtgagcatgatcatgaatatagtaaatcttgtgagttgtgacctaggtgaaggtgtaatgataacatctggaggaagcatcatttgttcagctacctagggtttactttcagacttttcctacagtttaaagcacttgcgttcagtgtggtacgatctgtttgtaatgttaatcattgactattgttctgctacttggatgttgatagtgaagcagagaacaatttatcatcgtttattatgagtcactatgcacgcaactatgcttaacatggcgaaatgtattaaacactcgtccaactatttatgaaatactttgcataatttaatttgcttttgtacagttttatgtaaataaattgcttgtcatttttgtctctgcaaattaaaatataacatggtcaaatggttt

SEQ ID NO: 163 - DNA, 6305 bp, Homo sapiens
tttcccgcatgaaaattacttaaacgttgcacacaacgtttcacaaaatcttttgtgaaagaagaaaaggaaattcagtgtgtgagtctcagcaggagttaagctaatgcagcttaaaataatgccgaaaaagaagcgcttatctgcgggcagagtgcccctgattctcttcctgtgccagatgattagtgcactggaagtacctcttgatccaaaacttcttgaagacttggtacagcctccaaccatcacccaacagtctccaaaagattacattattgaccctcgggagaatattgtaatccagtgtgaagccaaagggaaaccgcccccaagcttttcctggacccgtaatgggactcattttgacatcgataaagaccctctggtcaccatgaagcctggcacaggaacgctcataattaacatcatgagcgaagggaaagctgagacctatgaaggagtctatcagtgtacagcaaggaacgaacgcggagctgcagtttctaataacattgttgtccgcccatccagatcaccattgtggaccaaagaaaaacttgaaccaatcacacttcaaagtggtcagtctttagtacttccctgcagacccccaattggattaccaccacctataatattttggatggataattcctttcaaagacttccacaaagtgagagagtttctcaaggtttgaatggggacctttatttttccaatgtcctcccagaggacacccgcgaagactatatctgttatgctagatttaatcatactcaaaccatacagcagaagcaacctatttctgtgaaggtgatttcagtggatgaattgaatgacactatagctgctaatttgagtgacactgagttttatggtgctaaatcaagtagagagaggccaccaacatttttaactccagaaggcaatgcaagtaacaaagaggaattaagaggaaatgtgctttcactggagtgcattgcagaaggactgcctaccccaattatttactgggcaaaggaagatggaatgctacccaaaaacaggacagtttataagaactttgagaaaaccttgcagatcattcatgtttcagaagcagactctggaaattaccaatgtatagcaaaaaacgcattaggagccatccaccataccatttctgttagagttaaagcggctccatactggatcacagcccctcaaaatcttgtgctgtccccaggagaggatgggaccttgatctgcagagctaatggcaaccccaaacccagaattagctggttaacaaatggagtcccaatagaaattgcccctgatgaccccagcagaaaaatagatggcgataccattattttttcaaatgttcaagaaagatcaagtgcagtctatcagtgcaatgcctctaatgaatatggatatttactggcaaacgcatttgtaaatgtgctggctgagccaccacgaatcctcacacctgcaaacacactctaccaggtcattgcaaacaggcctgctttactagactgtgccttctttgggtctcctctcccaaccatcgagtggtttaaaggagctaaaggaagtgctcttcatgaagatatttatgttttacatgaaaatggaactttggaaattcctgtggcccaaaaggacagtacaggaacttatacgtgtgttgcaaggaataaattagggatggcgaagaatgaagttcacttagaaatcaaagatcctacatggatcgttaaacagcccgaatatgcagttgtgcaaagagggagcatggtgtcctttgaatgcaaagtgaaacatgatcacaccttatccctcactgtcctgtggctgaaggacaacagggaactgcccagtgatgaaaggttcactgttgacaaggatcatctagtggtagctgatgtcagtgacgatgacagcgggacctacacgtgtgtggccaacaccactctggacagcgtctccgccagcgctgtgcttagcgttgttgctcctactccaactccagctcccgtttacgatgtcccaaatcctccctttgacttagaactgacagatcaacttgacaaaagtgttcagctgtcatggaccccaggcgatgacaacaatagccccattacaaaattcatcatcgaatatgaagatgcaatgcacaagccagggctgtggcaccaccaaactgaagtttctggaacacagaccacagcccagctgaagctgtctccttacgtgaactactccttccgcgtgatggcagtgaacagcattgggaagagcttgcccagcgaggcgtctgagcagtatttgacgaaagcctcagaaccagataaaaaccccacagctgtggaaggactgggatcagagcctgataatttggtgattacgtggaagcccttgaatggtttcgaatctaatgggccaggccttcagtacaaagttagctggcgccagaaagatggtgatgatgaatggacatctgtggttgtggcaaatgtatccaaatatattgtctcaggcacgccaacctttgttccatacctgatcaaagttcaggccctgaatgacatggggtttgcccccgagccagctgtagtcatgggacattctggagaagacctcccaatggtggctcctgggaacgtgcgtgtgaatgtggtgaacagtaccttagccgaggtgcactgggacccagtacctctgaaaagcatccgaggacacctacaaggctatcggatttactattggaagacccagagttcatctaaaagaaacagacgtcacattgagaaaaagatcctcaccttccaaggcagcaagactcatggcatgttgccggggctagagccctttagccactacacactgaatgtccgagtggtcaatgggaaaggggagggcccagccagccctgacagagtctttaatactccagaaggagtccccagtgctccctcgtctttgaagattgtgaatccaacactggactctctcactttggaatgggatccaccgagccacccgaatggcattttgacagagtacaccttaaagtatcagccaattaacagcacacatgaattaggccctctggtagatttgaaaattcctgccaacaagacacggtggactttaaaaaatttaaatttcagcactcgatataagttttatttctatgcacaaacatcagcaggatcaggaagtcaaattacagaggaagcagtaacaactgtggatgaagctggtattcttccacctgatgtaggtgcaggcaaagttcaagcagtaaatcccaggatcagcaatcttactgctgcagctgctgagacctatgccaatatcagttgggaatatgagggaccagagcatgtgaacttttatgttgaatatggtgtagcaggcagcaaagaagaatggagaaaagaaattgtaaatggttctcggagcttctttgggttaaagggtctaatgccaggaacagcatacaaagttcgagttggtgctgtgggggactctggttttgtgagttcagaggatgtgtttgagacaggcccagcgatggcaagccggcaggtggatattgcaactcagggctggttcattggtctgatgtgtgctgttgctctccttatcttaattttgctgattgtttgcttcatcagaagaaacaagggtggtaaatatccagttaaagaaaaggaagatgcccatgctgaccctgaaatccagcctatgaaggaagatgatgggacatttggagaatacagtgatgcagaagaccacaagcctttgaaaaaaggaagtcgaactccttcagacaggactgtgaaaaaagaagatagtgacgacagcctagttgactatggagaaggggttaatggccagttcaatgaggatggctcctttattggacaatacagtggtaagaaagagaaagagccggctgaaggaaacgaaagctcagaggcaccttctcctgtcaacgccatgaattcctttgtttaatttttaagctctttgccaatattccatttctctagaatgtttatcctaagcacttgtttgtcagccctctcatactatgaacatatgggtagagagtatattttctgctgtatgttagtattatgagaatagttacagcaaaaacataactcagtcaaatgatatgttaatatgaactggaatgcaaagtgcatactttttcattcaaaatgggtattcttgatttcctcagaactgataaaaaataatgcaacatcaccaacagatcctgttatttcctctgcaggatacagttcaatatgatgcatgaaaaatgctccacatttaaaggacatacccgtgtatgttatgaaaacatggtttgatactttgtttatactaccctcagctgaacccctatatatgaattccgttttcattgtcaagaatgttactgtagtattctctagaacttcaatgtctttgtggacattgttgtgaaattggtgactatgtatagctgtcgttagtctttttgggagactgttaggaacagtttgtacagtatatacttgctaaatgagttcattatgacagtcacattgctgatgcttactgagaactattacctactcttggctcctgttactccgtaggcttcttaatcttccaggcattacagcagcacagtgttctactttttacatcatttctatgttcggttgtttttaggcataaacaatgtgtattgcagtgcatttcggcatttgtgccatactgaaagaatcaaaaacaaatcatccaaattaaatttcaaacattatttcagagaacacagggcaagacacatacagtgccttcagatattaagcattccacaacatcgtgcattctgtatcagctggtccagtccattctgggtcctagattactgtcattgtctaaaagtaacttttaaaaagcagagttcatgaaaactgcaatgctgggaaaagaaggaaacatgaaaataaaaataagacagtttattagaaatagcatttcctcataagcataaaaagaaaatctttgttgccaactgaagcacatgatgattttgtggtcctttatggtttctattacattcagtaagaaagatgtcaacatgctagaaaattaattttaaaactaagttattccaacactaaaagcatacaacagcatgccaacagtaatatattattctccaagactttacctatgtaagtgttcaaaactctgcagcattaaacaacgtgtatgcaaattgttatggatacatttcagaatctaagaaatcaggcaagtgcttaaaaggccaacggtccaagggattacatctgcagtttaaaaagtaaatatatattctatcgtattcataaacaatatctatcaaatgggttacctccaaatatgaaaatctataacaacctatggttgaaggaatgctcagtttcatttgccaataaattggtttctcataacttgcatcaagtttaattttaagtaaagctttttatatgtagatattttgttgaatttgtaaatacacttaaaatgtagatgctatatgcttataggtgttacatacaaataaacatgcaatgtttatgttgtactgtataagaggtaagctaattaatgcagtgaatgggattggaaagcatctacttaaatatctattgggttcccccctccccccaccttttttgctgtgaaactgaaatagtgaacttttctacgtattgacagcagatttttcgatgaaatcttcagagctttgcctatggggcacagtaggcctagtaacctggcatgtttgatatatgtaggtaaagcataatttaaagtaatcccaggtaaagatggccctaaatactttcatgtctctatattcatttttcacagatccacctgtctcttgaaaatataaaaagacaaaacaggtttgccttggcatcagagagcacaaagattaaaagttactttaaatttgccaatattttgggagaacaataaaactacattttttcctcttccatactggtagatgcgaaatttatctgtgcatgaaagggtcacttctgtaatagtgcaacagatttggtattaaaaattaaatgtggttttaaaagttcctctctcttttgtaatttatgttcccaattgagtgtgaatgtccaagtaatggtgtatgtaatggtacaggcaaatgtgactggatttccctcaaaaaagtaactattaaacagtcttgatctctttgtgacttttaactttttcaaac

SEQ ID NO: 164 - DNA, 1076 bp, Homo sapiens
acattcgccgcagccacctcggccgtggcaggaaccgaaacccggagcggccgaagctcagcgctccgctggggcagagggtcgcggcggctgggaacgccgctccccgacgcaccggccgcccccagcgcagcgcgctccgcggggtgctgatctgcctcttctccaagaaactcaaccactagtgacaatgaccagcctcctgactactccttctccaagagaagaactgatgaccaccccaattttacagcccactgaggccctgtccccagaagatggagccagcacagcactcattgcagttgttatcaccgttgtcttcctcaccctgctctcggtcgtgatcttgatcttcttttacctgtacaagaacaaaggcagctacgtcacctatgaacctacagaaggtgagcccagtgccatcgtccagatggagagtgacttggccaagggcagcgagaaagaggaatatttcatctaatgactcccaggccccaaggagcttattcctggctccatcgctaacacgttgactgcttattatgggaaagttttctctgaagccagggagaagcattgattgatgtgggcaaatccaagctccagccaggtcgcagtcccaaatgccgacatcactgactccagggaccagggacatggagaaagctgtttatgatatctttaaccaggccctcttactagagctggtgtttgtgactggccaacaagatgtggctatgccaggggacatctgagtatgtgcccagtcatcttttttcacaggttgaagggagagaaaagattttgagttaaggtcattggctgctctactctgtcccctacctggtcacctagtgatagccccagtggagatactgtccatacaaggtcttcccagaggctggataccacagtaaaaggccaggccaggaggggtaggagactatggagatcttacctcctgataaatgtgctacaccccctaatctgagcccttcctttccgtgttccccaacaacctcatgcttacgtgatttttattcaaattaaaaattttcattgctacagaaatc

SEQ ID NO: 165 - DNA, 1863 bp, Homo sapiens
gtatctgaagaaagatttggccaggggcagctgtgctggcttatgctcttctccttctgctgctgccatcctccagcaagatgctagggtctttggggctttgggcattacttcccacagctgtggaagcacccccaaacaggcgaacctgtgtgttctttgaggcccctggagtgcggggaagcacaaagacactgggagagctgctagatacaggcacagagctccccagagctatccgctgcctctacagccgctgctgctttgggatctggaacctgacccaagaccgggcacaggtggaaatgcaaggatgccgagacagtgatgagccaggctgtgagtccctccactgtgacccaagtccccgagcccaccccagccctggctccactctcttcacctgctcctgtggcactgacttctgcaatgccaattacagccatctgcctcctccagggagccctgggactcctggctcccagggtccccaggctgccccaggtgagtccatctggatggcactggtgctgctggggctgttcctcctcctcctgctgctgctgggcagcatcatcttggccctgctacagcgaaagaactacagagtgcgaggtgagccagtgccagagccaaggccagactcaggcagggactggagtgtggagctgcaggagctgcctgagctgtgtttctcccaggtaatccgggaaggaggtcatgcagtggtttgggccgggcagctgcaaggaaaactggttgccatcaaggccttcccaccgaggtctgtggctcagttccaagctgagagagcattgtacgaacttccaggcctacagcacgaccacattgtccgatttatcactgccagccgggggggtcctggccgcctgctctctgggcccctgctggtactggaactgcatcccaagggctccctgtgccactacttgacccagtacaccagtgactggggaagttccctgcggatggcactgtccctggcccagggcctggcatttctccatgaggagcgctggcagaatggccaatataaaccaggtattgcccaccgagatctgagcagccagaatgtgctcattcgggaagatggatcgtgtgccattggagacctgggccttgccttggtgctccctggcctcactcagccccctgcctggacccctactcaaccacaaggcccagctgccatcatggaagctggcacccagaggtacatggcaccagagctcttggacaagactctggacctacaggattggggcatggccctccgacgagctgatatttactctttggctctgctcctgtgggagatactgagccgctgcccagatttgaggcctgacagcagtccaccacccttccaactggcctatgaggcagaactgggcaatacccctacctctgatgagctatgggccttggcagtgcaggagaggaggcgtccctacatcccatccacctggcgctgctttgccacagaccctgatgggctgagggagctcctagaagactgttgggatgcagacccagaagcacggctgacagctgagtgtgtacagcagcgcctggctgccttggcccatcctcaagagagccacccctttccagagagctgtccacgtggctgcccacctctctgcccagaagactgtacttcaattcctgcccctaccatcctcccctgtaggcctcagcggagtgcctgccacttcagcgttcagcaaggcccttgttccaggaatcctcagcctgcctgtaccctttctcctgtgtaaatatgcagtttatgtgtcatcaatgtacatgccaacataaatatggcgattgtatagctgt

SEQ ID NO: 166 - DNA, 3619 bp, Homo sapiens
acaaaagaggccggaaagtgtccggaggaagccggcgcgtcacggaggacggatccgggaccctgccgcgcccgcccagcggcgcccggtcccgggtccacagccgcactcactccgccgcgctctccgccaccgccaccactgcggccaccgccaatgaaacgcctcccgctcctagtggttttttccactttgttgaattgttcctatactcaaaattgcaccaagacaccttgtctcccaaatgcaaaatgtgaaatacgcaatggaattgaagcctgctattgcaacatgggattttcaggaaatggtgtcacaatttgtgaagatgataatgaatgtggaaatttaactcagtcctgtggcgaaaatgctaattgcactaacacagaaggaagttattattgtatgtgtgtacctggcttcagatccagcagtaaccaagacaggtttatcactaatgatggaaccgtctgtatagaaaatgtgaatgcaaactgccatttagataatgtctgtatagctgcaaatattaataaaactttaacaaaaatcagatccataaaagaacctgtggctttgctacaagaagtctatagaaattctgtgacagatctttcaccaacagatataattacatatatagaaatattagctgaatcatcttcattactaggttacaagaacaacactatctcagccaaggacaccctttctaactcaactcttactgaatttgtaaaaaccgtgaataattttgttcaaagggatacatttgtagtttgggacaagttatctgtgaatcataggagaacacatcttacaaaactcatgcacactgttgaacaagctactttaaggatatcccagagcttccaaaagaccacagagtttgatacaaattcaacggatatagctctcaaagttttcttttttgattcatataacatgaaacatattcatcctcatatgaatatggatggagactacataaatatatttccaaagagaaaagctgcatatgattcaaatggcaatgttgcagttgcatttgtatattataagagtattggtcctttgctttcatcatctgacaacttcttattgaaacctcaaaattatgataattctgaagaggaggaaagagtcatatcttcagtaatttcagtctcaatgagctcaaacccacccacattatatgaacttgaaaaaataacatttacattaagtcatcgaaaggtcacagataggtataggagtctatgtgcattttggaattactcacctgataccatgaatggcagctggtcttcagagggctgtgagctgacatactcaaatgagacccacacctcatgccgctgtaatcacctgacacattttgcaattttgatgtcctctggtccttccattggtattaaagattataatattcttacaaggatcactcaactaggaataattatttcactgatttgtcttgccatatgcatttttaccttctggttcttcagtgaaattcaaagcaccaggacaacaattcacaaaaatctttgctgtagcctatttcttgctgaacttgtttttcttgttgggatcaatacaaatactaataagctcttctgttcaatcattgccggactgctacactacttctttttagctgcttttgcatggatgtgcattgaaggcatacatctctatctcattgttgtgggtgtcatctacaacaagggatttttgcacaagaatttttatatctttggctatctaagcccagccgtggtagttggattttcggcagcactaggatacagatattatggcacaaccaaagtatgttggcttagcaccgaaaacaactttatttggagttttataggaccagcatgcctaatcattcttgttaatctcttggcttttggagtcatcatatacaaagtttttcgtcacactgcagggttgaaaccagaagttagttgctttgagaacataaggtcttgtgcaagaggagccctcgctcttctgttccttctcggcaccacctggatctttggggttctccatgttgtgcacgcatcagtggttacagcttacctcttcacagtcagcaatgctttccaggggatgttcatttttttattcctgtgtgttttatctagaaagattcaagaagaatattacagattgttcaaaaatgtcccctgttgttttggatgtttaaggtaaacatagagaatggtggataattacaactgcacaaaaataaaaattccaagctgtggatgaccaatgtataaaaatgactcatcaaattatccaattattaactactagacaaaaagtattttaaatcagtttttctgtttatgctataggaactgtagataataaggtaaaattatgtatcatatagatatactatgtttttctatgtgaaatagttctgtcaaaaatagtattgcagatatttggaaagtaattggtttctcaggagtgatatcactgcacccaaggaaagattttctttctaacacgagaagtatatgaatgtcctgaaggaaaccactggcttgatatttctgtgactcgtgttgcctttgaaactagtcccctaccacctcggtaatgagctccattacagaaagtggaacataagagaatgaaggggcagaatatcaaacagtgaaaagggaatgataagatgtattttgaatgaactgttttttctgtagactagctgagaaattgttgacataaaataaagaattgaagaaacacattttaccattttgtgaattgttctgaacttaaatgtccactaaaacaacttagacttctgtttgctaaatctgtttctttttctaatattctaaaaaaaaaaaaaaggtttacctccacaaattgaaaaaaaaaaagtgaaaaaaatctgtttctaaggttagactgagatatatactatttccttacttatttcacagattgtgactttggatagttaatcagtaaaatataaatgtgtcaagatataatattgtttatacctatcaatgtaaaaacagtgtaataaagctgaagtattctattacctttcagtgaagtgaaagttatactatctcattagtatatttgaatcctttattatttttaattttataaatatcacagttcacattgcaatattccctttaatttactatttttaaaggggtattgtaaatatgaaagtatttataaagtgaattgctattttttctgttcagaaaagtacacacttaaaattgttattgttaacaatgtgtaaacacatttaaaattgttattgttaacaaagaaatcatggagaactgtagaggttttcacagtggatccattttctgacagttttctactatctattaaatcatatctgcttaaatatatagcttctatctgtctttaaatcttctcattaaaatgtataagcagtgattttgatctcaaaaataggtaatttttctttgccgacctgtaaaagtgtgccaatacactaaatttgtgattttaaattaattcctccagctgttgaaatgaagtctgccaaatcttgctctaacaaataaaatgttatctaaatgaa

SEQ ID NO: 167 - DNA, 2681 bp, Homo sapiens; identical to SEQ ID NO: 104

SEQ ID NO: 168 - DNA, 6364 bp, Homo sapiens
ctgggatagaagcggcaggagcagcgttggcaccggcgaaccatggctgggattttctatttcgccctattttcgtgtctcttcgggatttgcgacgctgtcacaggttccagggtataccccgcgaatgaagttaccttattggattccagatctgttcagggagaacttgggtggatagcaagccctctggaaggagggtgggaggaagtgagtatcatggatgaaaaaaatacaccaatccgaacctaccaagtgtgcaatgtgatggaacccagccagaataactggctacgaactgattggatcacccgagaaggggctcagagggtgtatattgagattaaattcaccttgagggactgcaatagtcttccgggcgtcatggggacttgcaaggagacgtttaacctgtactactatgaatcagacaacgacaaagagcgtttcatcagagagaaccagtttgtcaaaattgacaccattgctgctgatgagagcttcacccaagtggacattggtgacagaatcatgaagctgaacaccgagatccgggatgtagggccattaagcaaaaaggggttttacctggcttttcaggatgtgggggcctgcatcgccctggtatcagtccgtgtgttctataaaaagtgtccactcacagtccgcaatctggcccagtttcctgacaccatcacaggggctgatacgtcttccctggtggaagttcgaggctcctgtgtcaacaactcagaagagaaagatgtgccaaaaatgtactgtggggcagatggtgaatggctggtacccattggcaactgcctatgcaacgctgggcatgaggagcggagcggagaatgccaagcttgcaaaattggatattacaaggctctctccacggatgccacctgtgccaagtgcccaccccacagctactctgtctgggaaggagccacctcgtgcacctgtgaccgaggctttttcagagctgacaacgatgctgcctctatgccctgcacccgtccaccatctgctcccctgaacttgatttcaaatgtcaacgagacatctgtgaacttggaatggagtagccctcagaatacaggtggccgccaggacatttcctataatgtggtatgcaagaaatgtggagctggtgaccccagcaagtgccgaccctgtggaagtggggtccactacaccccacagcagaatggcttgaagaccaccaaagtctccatcactgacctcctagctcataccaattacacctttgaaatctgggctgtgaatggagtgtccaaatataaccctaacccagaccaatcagtttctgtcactgtgaccaccaaccaagcagcaccatcatccattgctttggtccaggctaaagaagtcacaagatacagtgtggcactggcttggctggaaccagatcggcccaatggggtaatcctggaatatgaagtcaagtattatgagaaggatcagaatgagcgaagctatcgtatagttcggacagctgccaggaacacagatatcaaaggcctgaaccctctcacttcctatgttttccacgtgcgagccaggacagcagctggctatggagacttcagtgagcccttggaggttacaaccaacacagtgccttcccggatcattggagatggggctaactccacagtccttctggtctctgtctcgggcagtgtggtgctggtggtaattctcattgcagcttttgtcatcagccggagacggagtaaatacagtaaagccaaacaagaagcggatgaagagaaacatttgaatcaaggtgtaagaacatatgtggacccctttacgtacgaagatcccaaccaagcagtgcgagagtttgccaaagaaattgacgcatcctgcattaagattgaaaaagttataggagttggtgaatttggtgaggtatgcagtgggcgtctcaaagtgcctggcaagagagagatctgtgtggctatcaagactctgaaagctggttatacagacaaacagaggagagacttcctgagtgaggccagcatcatgggacagtttgaccatccgaacatcattcacttggaaggcgtggtcactaaatgtaaaccagtaatgatcataacagagtacatggagaatggctccttggatgcattcctcaggaaaaatgatggcagatttacagtcattcagctggtgggcatgcttcgtggcattgggtctgggatgaagtatttatctgatatgagctatgtgcatcgtgatctggccgcacggaacatcctggtgaacagcaacttggtctgcaaagtgtctgattttggcatgtcccgagtgcttgaggatgatccggaagcagcttacaccaccaggggtggcaagattcctatccggtggactgcgccagaagcaattgcctatcgtaaattcacatcagcaagtgatgtatggagctatggaatcgttatgtgggaagtgatgtcgtacggggagaggccctattgggatatgtccaatcaagatgtgattaaagccattgaggaaggctatcggttaccccctccaatggactgccccattgcgctccaccagctgatgctagactgctggcagaaggagaggagcgacaggcctaaatttgggcagattgtcaacatgttggacaaactcatccgcaaccccaacagcttgaagaggacagggacggagagctccagacctaacactgccttgttggatccaagctcccctgaattctctgctgtggtatcagtgggcgattggctccaggccattaaaatggaccggtataaggataacttcacagctgctggttataccacactagaggctgtggtgcacgtgaaccaggaggacctggcaagaattggtatcacagccatcacgcaccagaataagattttgagcagtgtccaggcaatgcgaacccaaatgcagcagatgcacggcagaatggttcccgtctgagccagtactgaataaactcaaaactcttgaaattagtttacctcatccatgcactttaattgaagaactgcactttttttacttcgtcttcgccctctgaaattaaagaaatgaaaaaaaaaaacaatatctgcagcgttgcttggtgcacagattgctgaaactgtggggcttacagaaatgactgccggtcatttgaatgagacctggaacaaatcgtttctcagaagtacttttctgttcatcaccagtctgtaaaatacatgtacctatagaaatagaacactgcctctgagttttgatgctgtatttgctgccagacactgagcttctgagacatccctgattctctctccatttggaattacaaccattgtattttgtttgtggcataaattacagtcatctgtctttcactggaatgaagaccatgcctaggaacattttttaaggactcagctgtggcttttagggcttggttcataccatgggggaaaaaaaagtcctaggagaaagcgacgtggctcattagtgttgcctcttcagtgctcaagccgcctggtggattcctatgacacagggggcctggaaagaaagggaaagtggatttaaaatatatatatacgtaacccaagccccataacccctaactggacaaatgaggtctgtttctttgggcctgaggctgtgccatataaagtcttattttgggactttacaaacttgtcctaactatcttgtggatagtgggctgtgacaatctggaatagagaacgttcacacttcgctcctttaaagaagcgaccccagatctgcaagggagtagattctgctatcttggcctcacagcccttcctgttgattacaaagcccgtggaagaaaacagaacacaccctcctcagttccgtctaaatgtgtttcttctgcttcaattacaccagttctggggcaaagacactgatgaaacaacacccatacctgaaaagaataaatgtgtgactttcaaatcccctttcgcagtgaaagaaacagcaaacacttaagattcagcatctgttctccagttgcactgaggaatgcactgtctcgcagcaccagctctgcagagcccttgccccagactctttgcggttttatttatatgtatttccatatttcattcctgtgtgtcactgctgcattggtgtggcagcaagtgaccaaatgctacaggtcttactatggacaccaggtcaggtgcaaccacacaaaacaaagccagttccatgagctgcctatgatatgcattgcggaagtaacattttacccagggtgtgccattgcagtgatataaatatatttttttcttagactaaatatgagctgactatctcttttgatgtgtgtacataggtgtgagtgtgtgtgtatgcgtgcctgtctgtgtgcgggtgtgtgtatgtgcatagcctcatgcttaggactacccatgaatgttgtggaatgctacacctggagagttctggttttccaccagtttcaagatgaagaactacatgatacagtggacctggagaccatccccttggaaagacaacccagagatgttcagcatcctgtatctacacgcatcctgtatctacacgtgtattttgtagctgtcacactaaccttaataagaattctacagctttggacagaggcattttcaccttaatggtgaagtaatttaaaatataaatccattcaggtgacaacccatcatcaaaattacaaattttctgattgaactcatctgaatcatcagttccttgatggagagagagaaggagatggaatgtgtctggtaaccccaaatggagtacaagtagcctttgttttcctgcataaatggacttgttgaatgcgaacgaatatatgcaattcatatacttttggagatgaacgtagatatgtgtgtcagctttgagatggtgtgtcctggattaatactttgtctcccaatatcacagaaaaatacatgccagtgactcttgaggttaaggtagttgggatgaaatggcctcaggcaatttcacattccctaattacctggaaagttctacagtaattaatatgcagctaactcctgttgccctcacaagagcatcagccttctagaatcggagctccggagtgtgaagattcagtattgatatgatatgtataccaaactccagccaacttactgccatttttcataatctgagtggctgccttgcttatcctaagctgtggttgcagaaaccgtggccatttatataagctataacatcaaatcagggaaaaatgaggaaaaaaaatagattctgaaccatttattgttgaataagtagagaaaatcatcaataaatatttattacattctgacagggtgtgtggcattgtgttctatgccagagtgacaaagttgattcacccctttttggggaccttaatatattttttaagggatgtgcctatgcattgatgcctgaaaaatatgtataaagaaatgaggttgactcttctgagcagttcatcttttccagaggtaagggtaggaggccaacttcagggtctgggtctgagcccgtgggcaagccctggccgagtgagctccaatgctaactcatgtgccgatctctagagcagtgggaaactaccccgctgcaccaaatcaagtagcttcaccttgtgtatgcaggccccaagttattttttagcaatcttacgagtgaaatgttctggtgggttgaaaaacgttcttattttaaagaaaggttgtgctcgctacactgctggtgtgtgcattctgagacctcttgtattcaatctgtgaaggatatgtgtattaatccgtacacccgtatagcctcaatatttgtctgaagacacttaaattctgacccataaaggaaagttctagaagcaatattttcacttatttaacattctccaaacaacatcaagcattgatacacactgaagagtgcgtttattttttgtatcactctaagtatgttggaatatgcaaggactgtggttcaaattagaatgtataaggcatattataatttagttcatactgaataagaaattaacagaacattgttcggttcacacgttccaaactttgagtgatttctggagttagacatagattttctattttgttttaatttgtcaaggtatttttcttcccttcatgaactttaggtacacataacttatgtcatttatttatggtcttttatacctagtttgtaaaattgtaaaatagcaaactaaatgcaaagagtttgcatttgaaaataataaagtagttgccgtatacaaccctgcaaaaaaaaaaaaaaaaaa

SEQ ID NO: 169 - DNA, 1207 bp, Homo sapiens
ggaggccggggcggggcgggcgcagccggcgctgagcttgcagggccgctcccctcacccgcccccttcgagtccccgggcttcgccccacccggcccgtgggggagtatctgtcctgccgccttcgcccacgccctgcactccgggaccgtccctgcgcgctctgggcgcaccatggcccgcggggctgcgctggcgctgctgctcttcggcctgctgggtgttctggtcgccgccccggatggtggtttcgatttatccgatgcccttcctggggatgactttgacttaggagatgctgttgttgatggagaaaatgacgacccacgaccaccgaacccacccaaaccgatgccaaatccaaaccccaaccaccctagttcctccggtagcttttcagatgctgaccttgcggatggcgtttcaggtggagaaggaaaaggaggcagtgatggtggaggcagccacaggaaagaaggggaagaggccgacgccccaggcgtgatccccgggattgtgggggctgtcgtggtcgccgtggctggagccatctctagcttcattgcttaccagaaaaagaagctatgcttcaaagaaaatgcagaacaaggggaggtggacatggagagccaccggaatgccaacgcagagccagctgttcagcgtactcttttagagaaatagaagattgtcggcagaaacagcccaggcgttggcagcagggttagaacagctgcctgaggctcctccctgaaggacacctgcctgagagcagagatggaggccttctgttcacggcggattctttgttttaatcttgcgatgtgctttgcttgttgctgggcggatgatgtttactaacgatgaattttacatccaaagggggataggcacttggacccccattctccaaggcccgggggggcggtttcccatgggatgtgaaaggctggccattattaagtccctgtaactcaaatgtcaaccccaccgaggcacccccccgtcccccagaatcttggctgtttacaaatcacgtgtccatcgagcacgtctgaaacccctggtagccccgacttctttttaattaaaataaggtaagcccttcaatttgtttcttcaatatttctttcatttgtagggatatttgtttttcatatcagactaataaaaagaaattagaaaccaaaaaaaaaaaaaaaaaaaa

SEQ ID NO: 170 - DNA, 5837 bp, Homo sapiens
actgagtcccgggaccccgggagagcggtcaatgtgtggtcgctgcgtttcctctgcctgcgccgggcatcacttgcgcgccgcagaaagtccgtctggcagcctggatatcctctcctaccggcacccgcagacgcccctgcagccgcggtcggcgcccgggctccctagccctgtgcgctcaactgtcctgcgctgcggggtgccgcgagttccacctccgcgcctccttctctagacaggcgctgggagaaagaaccggctcccgagttctgggcatttcgcccggctcgaggtgcaggatgcagagcaaggtgctgctggccgtcgccctgtggctctgcgtggagacccgggccgcctctgtgggtttgcctagtgtttctcttgatctgcccaggctcagcatacaaaaagacatacttacaattaaggctaatacaactcttcaaattacttgcaggggacagagggacttggactggctttggcccaataatcagagtggcagtgagcaaagggtggaggtgactgagtgcagcgatggcctcttctgtaagacactcacaattccaaaagtgatcggaaatgacactggagcctacaagtgcttctaccgggaaactgacttggcctcggtcatttatgtctatgttcaagattacagatctccatttattgcttctgttagtgaccaacatggagtcgtgtacattactgagaacaaaaacaaaactgtggtgattccatgtctcgggtccatttcaaatctcaacgtgtcactttgtgcaagatacccagaaaagagatttgttcctgatggtaacagaatttcctgggacagcaagaagggctttactattcccagctacatgatcagctatgctggcatggtcttctgtgaagcaaaaattaatgatgaaagttaccagtctattatgtacatagttgtcgttgtagggtataggatttatgatgtggttctgagtccgtctcatggaattgaactatctgttggagaaaagcttgtcttaaattgtacagcaagaactgaactaaatgtggggattgacttcaactgggaatacccttcttcgaagcatcagcataagaaacttgtaaaccgagacctaaaaacccagtctgggagtgagatgaagaaatttttgagcaccttaactatagatggtgtaacccggagtgaccaaggattgtacacctgtgcagcatccagtgggctgatgaccaagaagaacagcacatttgtcagggtccatgaaaaaccttttgttgcttttggaagtggcatggaatctctggtggaagccacggtgggggagcgtgtcagaatccctgcgaagtaccttggttacccacccccagaaataaaatggtataaaaatggaataccccttgagtccaatcacacaattaaagcggggcatgtactgacgattatggaagtgagtgaaagagacacaggaaattacactgtcatccttaccaatcccatttcaaaggagaagcagagccatgtggtctctctggttgtgtatgtcccaccccagattggtgagaaatctctaatctctcctgtggattcctaccagtacggcaccactcaaacgctgacatgtacggtctatgccattcctcccccgcatcacatccactggtattggcagttggaggaagagtgcgccaacgagcccagccaagctgtctcagtgacaaacccatacccttgtgaagaatggagaagtgtggaggacttccagggaggaaataaaattgaagttaataaaaatcaatttgctctaattgaaggaaaaaacaaaactgtaagtacccttgttatccaagcggcaaatgtgtcagctttgtacaaatgtgaagcggtcaacaaagtcgggagaggagagagggtgatctccttccacgtgaccaggggtcctgaaattactttgcaacctgacatgcagcccactgagcaggagagcgtgtctttgtggtgcactgcagacagatctacgtttgagaacctcacatggtacaagcttggcccacagcctctgccaatccatgtgggagagttgcccacacctgtttgcaagaacttggatactctttggaaattgaatgccaccatgttctctaatagcacaaatgacattttgatcatggagcttaagaatgcatccttgcaggaccaaggagactatgtctgccttgctcaagacaggaagaccaagaaaagacattgcgtggtcaggcagctcacagtcctagagcgtgtggcacccacgatcacaggaaacctggagaatcagacgacaagtattggggaaagcatcgaagtctcatgcacggcatctgggaatccccctccacagatcatgtggtttaaagataatgagacccttgtagaagactcaggcattgtattgaaggatgggaaccggaacctcactatccgcagagtgaggaaggaggacgaaggcctctacacctgccaggcatgcagtgttcttggctgtgcaaaagtggaggcatttttcataatagaaggtgcccaggaaaagacgaacttggaaatcattattctagtaggcacggcggtgattgccatgttcttctggctacttcttgtcatcatcctacggaccgttaagcgggccaatggaggggaactgaagacaggctacttgtccatcgtcatggatccagatgaactcccattggatgaacattgtgaacgactgccttatgatgccagcaaatgggaattccccagagaccggctgaagctaggtaagcctcttggccgtggtgcctttggccaagtgattgaagcagatgcctttggaattgacaagacagcaacttgcaggacagtagcagtcaaaatgttgaaagaaggagcaacacacagtgagcatcgagctctcatgtctgaactcaagatcctcattcatattggtcaccatctcaatgtggtcaaccttctaggtgcctgtaccaagccaggagggccactcatggtgattgtggaattctgcaaatttggaaacctgtccacttacctgaggagcaagagaaatgaatttgtcccctacaagaccaaaggggcacgattccgtcaagggaaagactacgttggagcaatccctgtggatctgaaacggcgcttggacagcatcaccagtagccagagctcagccagctctggatttgtggaggagaagtccctcagtgatgtagaagaagaggaagctcctgaagatctgtataaggacttcctgaccttggagcatctcatctgttacagcttccaagtggctaagggcatggagttcttggcatcgcgaaagtgtatccacagggacctggcggcacgaaatatcctcttatcggagaagaacgtggttaaaatctgtgactttggcttggcccgggatatttataaagatccagattatgtcagaaaaggagatgctcgcctccctttgaaatggatggccccagaaacaatttttgacagagtgtacacaatccagagtgacgtctggtcttttggtgttttgctgtgggaaatattttccttaggtgcttctccatatcctggggtaaagattgatgaagaattttgtaggcgattgaaagaaggaactagaatgagggcccctgattatactacaccagaaatgtaccagaccatgctggactgctggcacggggagcccagtcagagacccacgttttcagagttggtggaacatttgggaaatctcttgcaagctaatgctcagcaggatggcaaagactacattgttcttccgatatcagagactttgagcatggaagaggattctggactctctctgcctacctcacctgtttcctgtatggaggaggaggaagtatgtgaccccaaattccattatgacaacacagcaggaatcagtcagtatctgcagaacagtaagcgaaagagccggcctgtgagtgtaaaaacatttgaagatatcccgttagaagaaccagaagtaaaagtaatcccagatgacaaccagacggacagtggtatggttcttgcctcagaagagctgaaaactttggaagacagaaccaaattatctccatcttttggtggaatggtgcccagcaaaagcagggagtctgtggcatctgaaggctcaaaccagacaagcggctaccagtccggatatcactccgatgacacagacaccaccgtgtactccagtgaggaagcagaacttttaaagctgatagagattggagtgcaaaccggtagcacagcccagattctccagcctgactcggggaccacactgagctctcctcctgtttaaaaggaagcatccacacccccaactcctggacatcacatgagaggtgctgctcagattttcaagtgttgttctttccaccagcaggaagtagccgcatttgattttcatttcgacaacagaaaaaggacctcggactgcagggagccagtcttctaggcatatcctggaagaggcttgtgacccaagaatgtgtctgtgtcttctcccagtgttgacctgatcctctttttcattcatttaaaaagcatttatcatgccccctgctgcgggtctcaccatgggtttagaacaaagacgttcaagaaatggccccatcctcaaagaagtagcagtacctggggagctgacacttctgtaaaactagaagataaaccaggcaatgtaagtgttcgaggtgttgaagatgggaaggatttgcagggctgagtctatccaagaggctttgtttaggacgtgggtcccaagccaagccttaagtgtggaattcggattgatagaaaggaagactaacgttaccttgctttggagagtactggagcctgcaaatgcattgtgtttgctctggtggaggtgggcatggggtctgttctgaaatgtaaagggttcagacggggtttctggttttagaaggttgcgtgttcttcgagttgggctaaagtagagttcgttgtgctgtttctgactcctaatgagagttccttccagaccgttacgtgtctcctggccaagccccaggaaggaaatgatgcagctctggctccttgtctcccaggctgatcctttattcagaataccacaaagaaaggacattcagctcaaggctccctgccgtgttgaagagttctgactgcacaaaccagcttctggtttcttctggaatgaataccctcatatctgtcctgatgtgatatgtctgagactgaatgcgggaggttcaatgtgaagctgtgtgtggtgtcaaagtttcaggaaggattttacccttttgttcttccccctgtccccaacccactctcaccccgcaacccatcagtattttagttatttggcctctactccagtaaacctgattgggtttgttcactctctgaatgattattagccagacttcaaaattattttatagcccaaattataacatctattgtattatttagacttttaacatatagagctatttctactgatttttgcccttgttctgtcctttttttcaaaaaagaaaatgtgttttttgtttggtaccatagtgtgaaatgctgggaacaatgactataagacatgctatggcacatatatttatagtctgtttatgtagaaacaaatgtaatatattaaagccttatatataatgaactttgtactattcacattttgtatcagtattatgtagcataacaaaggtcataatgctttcagcaattgatgtcattttattaaagaacattgaaaaacttgaaggaa

SEQ ID NO: 171 - DNA, 2913 bp, Homo sapiens
agtgggctctgcggataactcagacgccattaagctggggaatccaaactctaaaagaaggacgcattttaggtaagatctagtggctagatcttcagggtgggcttcgttcttgtggaaatcagtcaagaaagatcggattcgcggttatttatgcaaatcatctgggtggattgtgtacggagttaaactgcgccttctggaccgggtctgaacaatggagactgcgctagcaaaaacgccacagaaaaggcaagttatgtttcttgctatattgttgcttttgtgggaggctggctctgaggcagttaggtattccataccagaagaaacagaaagtggctattctgtggccaacctggcaaaagacctgggtcttggggtgggggaactggccactcggggcgcgcgaatgcattacaaaggaaacaaagagctcttgcagcttgatataaagaccggcaatttgcttctatatgaaaaactagaccgggaggtgatgtgcggggcgacagaaccctgtatattgcatttccagctcttactagaaaatccagtgcagttttttcaaactgatctgcagctcacagatataaatgaccatgccccagagttcccagagaaggaaatgctcctaaaaatcccagagagcacccagccagggactgtgtttcccttaaaaatagcccaggactttgacataggtagcaacactgttcagaactacacaatcagcccaaattcacactttcatgttgctacgcataatcgcggagatggcagaaaatacccagagctggtgctggacaaagcgctggaccgggaggagcggcctgagctcagcttaacactcactgcactggacggtggggctccgcccaggtccgggaccaccacaattcgcattgtcgtcttggataataatgacaacgcccccgaatttttacaatcattctatgaggtacaggtgcccgagaacagcccccttaactccttagttgtcgttgtctccgctcgagatttagatgcaggagcatatgggagtgtagcctatgctctattccaaggcgatgaagttactcaaccatttgtaatagacgagaaaacagcagaaattcgcctgaaaagggcattggatttcgaggcaactccatattataacgtggaaattgtagccacagatggtgggggcctttcaggaaaatgcactgtggctatagaagtggtggatgtgaatgacaacgcccctgaactcaccatgtctacgctctccagccctaccccagaaaatgccccggaaactgtagttgccgttttcagtgtttctgatccagactccggggacaacggtaggatgatttgctccatccagaatgatctcccctttcttttgaagcccacattaaaaaacttttacaccctagtgacacagagaacactggacagagagagccaagccgagtacaacatcaccatcactgtcaccgacatggggacacccaggctgaaaaccgagcacaacataacggtcctggtctccgacgtcaatgacaacgcccccgccttcacccaaacctcctacaccctgttcgtccgagagaacaacagccccgccctgcacatcggcagtgtcagcgccacagacagagactcaggcaccaacgcccaggtcacctactcgctgctgccgccccagaacccacacctgcgcctcgcctccctggtctccatcaacgcggacaacggccacctgtttgccctcaggtcgctggactacgaggccctgcaggcgttcgagttccgcgtgggagccacagaccgcggctccccggcgctgagcagcgaggcgctggtgcgcgtgctggtgctggacgccaacgacaactcgcccttcgtgctgtatccgctgcagaacggctcggcgccttgcaccgagctggtgccccgggcggccgagccgggctacctggtgaccaaggtggtggcggtggacggcgactcgggccagaacgcctggctgtcgtaccagctgctcaaggccacggagcccgggctgttcagcatgtgggcgcacaatggcgaggtgcgcaccgccaggctgctgagcgagcgcgacgcggccaagcacaggctggtggtgctggtcaaggacaatggcgagcctccgcgctcggccaccgccacgctgcacgtgctcctggtggacggcttctcccagccctacctgccgctgccggaggcggccccggcccaggcccaggccgactcgctcactgtctacctggtggtggcattggcctcggtgtcgtcgctcttcctcttttcggtgctcctgttcgtggcagtgcggctgtgcaggaggagcagggcggcctcggtcggtcgctgctcggtgcccgagggcccctttccagggcatctggtggacgtgagcggcaccgggaccctatcccagagctaccactacgaggtgtgtttgaccggagactcaggggccggcgagttcaagttcctgaagccgattattcctaaccttttgccccagggcgctggtgaagaaatagggaaaactgctgccttccggaatagctttggattaaattagagatctcgtgatgacgcgttgttttctgccatttatcccaaactttttcagatctagaattcgagagtgtcatggacaaaaatttcaccttgagattgagcttttatttccctttttaatggatttgtctgttgaacttcatgctgtccaagtgttgaaaagtcaattttatttcattgcatttatttacatagtgtcattccaaatccatgcatgctgttgattttcctgagatttttttctcttcttgttggtatttgttgtgataaaccaccttaataaaatcaagtattaattttattttctat

SEQ ID NO: 172 - DNA, 14844 bp, Homo sapiens
atggacttagcaccagacagggctactggccgcccgtggctcccgttgcacactctatcagtatctcagctccttcgagtgttttggctactgtcattgcttccggggcaggcctgggtccacggggccgagccgcgccaggtgttccaagtgctggaagagcaacctccaggcactctggtaggcaccatccagacgcgccccggcttcacctacaggctcagcgaaagccacgccctgtttgccataaacagtagcaccggagccctgtacaccacctccaccatcgaccgcgagagcctgcccagcgacgtgatcaacctggtggtcctttccagcgcgcccacctaccccaccgaagtgcgagtgctggtgcgggacctcaatgacaacgcccccgttttcccggacccctctatcgtggtcactttcaaggaagacagtagcagcggacgccaagtcatcttagacaccgccaccgactcggacatcggctcaaacggtgtggaccaccgctcctaccgcatcatccgcggcaatgaggcggggcgcttccgtctggacatcaccctgaacccgagcggcgagggagcgttcctgcatctggtgtccaagggcggactggaccgtgaggtcactccgcagtaccagctcctggttgaggtggaggacaagggtgagcctaagcggcggggctaccttcaggtaaacgtgactgtgcaagacattaatgacaaccccccggtttttggcagttctcactaccaggcgggggtgcctgaggacgcggttgtgggttccagcgtcctccaggtggcggcggcggacgcggacgagggcaccaacgcggacatccgctatcgcctgcaggacgaggggacccccttccaaatggaccctgagacgggacttatcacggtgcgggagcccctggacttcgaagctcggcgccaatactcgcttacggtgcaggcgatggacagaggcgtgccttccctcactgggcgcgccgaggcgctgattcagctgctggacgtgaatgacaatgacccggtagtgaagttccgctacttcccggccacctcgcgctacgcctcggtagatgagaatgctcaagtgggcaccgtggtggctctgctcaccgtgacggacgcagattctcccgcggccaacgggaacatctccgtgcaaattctcgggggcaatgagcagcgccactttgaagtgcaaagcagcaaagtgccgaacctgagcctaatcaaggtggccagcgccttggaccgcgagcgcatcccttcctacaacctcacagtttccgtctctgataactacggggcgccccctggcgcagcagtccaggcgcgctcttctgtggcaagcctggtgatttttgttaatgacatcaatgaccatcctcctgtcttttcacagcaagtgtacagagtgaacctgagcgaggaggcgcctccgggaagctatgtgagtgggatatctgccactgatggcgactctggtctcaatgctaatctgcgttacagcattgtctctggcaatggactgggatggttccatatcagtgaacatagcggcctcgtgaccactgggtcctctgggggcctggaccgtgaacttgcttcccagattgttctgaatataagtgcccgggaccagggagttcaccccaaggtgtcctatgcccagcttgtagtaactctcctagatgtgaatgatgaaaagccagtatttagccagccagaagggtatgatgtgtctgtggttgagaatgccccaacagggacagaactgttgatgctcagggcaactgacggggacctgggtgacaacggaacagtgcgcttctccttacaagaggcagagactgaccggaggtccttccgtctggatcctgtgtctgggaggttgagtactatttcctccttggacagagaagagcaagccttctactccctgttggttctggccacagatctgggctcccctccccagtcatcaatggctcgcataaatgtgagtcttctggatataaatgataacagccctgtcttctacccggtccaatactttgctcacattaaggagaatgagcctggaggtagctacatcaccactgtgtctgccactgacccagacttgggtaccaatggtactgtcaaatatagcatatctgctggggacaggtctcggtttcaggtcaatgctcagagtggggttatttctacaagaatggccctagacagagaagaaaaaacagcttatcagttgcaaatagtagctactgatggtggcaatttacaatctcccaaccaggcaatagtaaccatcactgtattggacactcaagacaacccacctgtattcagtcaggttgcctacagctttgtggtttttgagaacgtggcgctgggatatcatgtgggtagtgtgtctgcatccaccatggatctcaattccaacatcagttatctcattactactggggatcagaaaggtatgtttgctatcaaccaggtcactgggcagcttaccacagcaaatgtgattgatagagaagagcaatccttttatcagctgaaggtagtggccagtgggggcacagtgactggagacactatggttaacataacagttaaggatttgaatgacaactctccccatttccttcaggcaatagagagtgtaaatgtggtggagaattggcaggcaggtcacagcattttccaggccaaagctgtggaccctgatgaaggtgtcaatggcatggtactctatagtctgaagcaaaaccccaagaacctgtttgctatcaatgaaaagaatggcactattagtctgcttgggcccctggatgttcatgctggctcctaccaaatagagatcttggcatctgacatgggtgtcccacagctctcctctagtgtcatcttaacagtttatgtccatgatgtaaatgacaattcaccagtgtttgaccaactctcttatgaagtcaccctttctgagtcagaacctgtgaattctcgattctttaaagtacaagcttctgataaggattcaggagcaaatggtgaaattgcatacaccattgctgaaggaaatacaggggatgcttttggcatattcccagatggtcaattgtatataaaaagtgaactggaccgtgaacttcaagacagatatgttttaatggttgttgcttctgacagagcagtggaaccccttagtgctactgtgaatgttactgtaattttagaagatgtaaatgataacagacctctttttaacagtaccaattacacattttacttcgaagaagagcagagggctgggtcgtttgtgggcaaagtaagtgctgtagataaagactttgggccaaatggagaagtaaggtattcttttgaaatggtgcagccagattttgagttgcatgccatcagtggggaaattacaaatactcatcagtttgacagggagtctcttatgaggcggagagggactgctgtgtttagctttacagtcatagcaacagatcaggggatccctcagcctctcaaggatcaggccactgtacatgtttacatgaaggatataaatgataatgctcccaaatttttaaaagacttttaccaagctacaatatcagaatcagcagccaatctgacacaagtgttaagagtatctgcctcagatgttgatgaaggtaataatggacttattcactattctataataaaaggaaatgaagaaagacagtttgctatagacagtacctctggtcaggtaacactaattggcaaattagactatgaagcaacacctgcctattcccttgtaattcaagcagtggattcagggacaatccccctcaattcaacgtgtactttaaatattgatattttagatgaaaatgacaataccccttctttccctaaatcaacactctttgttgatgttttggaaaacatgagaattggtgaactcgtgtcctctgttactgcaactgattccgattcaggtgacaatgctgatttatattacagtattactgggactaacaaccacggaacttttagcattagcccaaacactgggagtatttttcttgccaaaaaactggactttgaaacacagtctttgtataaattaaatataacagcaaaagaccaaggaagacctcctcgttcatctacaatgtcagtggttattcacgtgagggactttaatgacaatcctcctagctttcctcctggagatattttcaagtctattgttgagaacattcccatcggtacatctgtcatttcagtgactgcacatgaccctgatgcagacattaatggtcaactatcctacacaatcattcaacagatgccaagaggcaaccactttaccatagatgaagtcaaagggactatatatactaatgctgaaatagatcgggaatttgctaatctctttgagttgactgtaaaagccaatgatcaagctgtgccaatagaaactagacggtatgctttgaagaacgtgaccattttggttacagacctcaatgacaatgtcccaatgtttatatcacaaaacgcccttgctgcagacccatcagctgtgattggttccgttctgacaacaattatggctgctgacccagatgaaggtgctaatggagaaatagagtatgagatcatcaatggggacacagacaccttcattgttgatcgttatagtggagacctgagagtggcttcagcgttggtgccttcacagttgatctacaatctcatagtttcagcaacagaccttgggcctgaaaggaggaaatcgaccactgaattgaccatcattcttcagggccttgatggacctgtttttactcaacccaaatatataactattttgaaggaaggagaacccattggcacaaacgtgatatcaatagaagcagctagccccagaggatctgaggccccagtggagtattatattgtttcagttcgttgtgaagaaaaaactgttggacgcctctttactattggacgacatactggtataattcagaccgcagccattctggaccgggagcaaggagcatgtctttacctggtggatgtttatgccatagaaaaatcaactgcttttcccagaacacagagagcagagatggtaacaacggtagtggcagtgggtgataccttagctcaaccattagctgcagctgaagtgtttattgtagaaataacacttcaggatatcaatgacaatccaccagtatttccaacggacatgctggatctcacggtagaggagaacattggagatggctctaagattatgcagctgacagccatggatgctgatgagggtgcaaatgctctcgtcacatacactatcattagtggagctgatgatagttttcgcatcgacccagaatccggagatctgatagcaaccaggcggttggacagggaacgccgctccaaatattcactgctagttcgtgctgatgatggtcttcagtcctcggatatgagaattaatatcactgtcagtgatgtgaatgaccatacacccaaattttccagacccgtgtactcttttgacattcctgaggacacaatccctggttctttggtagcagccattttagccacggatgatgactctggtgtgaatggagaaattacatatattgtgaatgaagatgatgaagatggcatctttttcctgaatcctattactggggtctttaatttgactcgattattagattatgaagtacagcaatattatatcctcactgttcgagcagaagatggtgggggacaatttactaccatcagagtttatttcaatattctagatgtaaatgataatccacctattttcagcttgaattcatacagcacatctttaatggagaatctacctgtgggatctactgttcttgtgtttaatgttactgatgcagatgatggcatcaactctcaattgacttatagcattgcttcaggtgatagccttgggcagtttactgttgacaagaatggtgtactcaaagtcctaaaagctttggatcgggaaagtcagtccttctacaacttggttgttcaagtgcatgacctgccacagattccagcctccagattcacaagcactgctcaagtctccattattttgttggatgtaaatgataacccaccgacatttctttcccctaaattgacatacattccagaaaatacacctattgatactgttgttttcaaagctcaagcaactgacccagatagtggcccaaacagctatattgagtacactctgctgaaccctttgggaaacaagttcagtattgggaccattgatggtgaagtgaggctcactggagaactggacagagaagaagtttctaattatactctaacagtggtggctacagacaaaggtcaaccatctctctcttcatctacagaggttgtagttatggtacttgacatcaatgataacaaccccatctttgcacaagctttgtataaagtggagattaatgaaaacacacttactggaacagatataatacaagtgttcgcagcagatggagatgaaggcacaaatggacaggttcgctatggcattgttaatggtaataccaatcaggaatttcggatagactctgtcacaggtgccatcactgtcgctaaacctttggatagagaaaagacccctacctaccatttaactgttcaggcaacagatcgaggcagcacacccagaactgatacctccacggtcagcattgttctactggatattaatgactttgttcctgtatttgagctatctccatattctgtaaatgtccctgagaatttagggacactacccagaacaattcttcaggtggtggcaagagatgatgatcgaggatctaacagcaaactctcatatgttctgtttggtggtaatgaagacaatgcttttactctctcagccagtggagaacttggagtaacacagagtctggatcgggaaacaaaagagcgctttgtcttaatgattacagctacagattcaggatcccctgccttgactggaactggaacaatcaacgtcatagtagatgatgtcaatgacaatgtccccacatttgccagtaaagcgtatttcacaacaattcctgaggatgcaccaactggaacagatgttttattggtaaatgcctcagatgctgatgcttcaaagaatgcagttataaggatcatcggtggaaactctcagttcacgatcaacccatcgacaggacaaatcatcaccagcgcattgttagatagggaaacaaaagataattatactttggtagtggtctgcagtgatgcgggatccccagagcctctttccagttccaccagtgtgcttgtcactgtgactgatgtcaatgacaatccaccaagatttcagcatcacccatatgtcactcacatcccatctcctactcttccaggttcctttgtctttgcggttacagtcacagatgctgatattggaccaaattctgaactgcattattctctttcgggtagaaattctgaaaaatttcacattgacccactgaggggagccattatggccgccggaccactaaacggagcttcagaagtgacattttctgtgcatgtaaaagatggtggctcatttccaaagacagattctacaacagtgactgttagattcgtgaataaggccgatttccctaaagtgagagccaaagaacaaacgttcatgtttcctgaaaaccaaccagtcagctctcttgtcaccaccatcacaggatcctctttaagaggagaacctatgtcatattatatcgcaagtgggaatcttggcaatactttccagattgatcagttaacagggcaggtgtctattagtcaacctctggattttgaaaagatacaaaaatatgttgtatggatagaggccagagacggtggtttccctcctttctcctcttacgagaaacttgatataacagtattagatgtcaatgataatgccccaatttttaaggaagacccatttatatctgaaatattggaaaacctttcccctcgaaaaatacttactgtttcggcaatggacaaggacagtggacccaatggacagttagattatgaaattgttaatggcaacatggaaaatagtttcagtatcaatcatgctactggtgaaattagaagcgttagacctttggacagggaaaaagtatctcattatgtcctaaccataaaatcatcagacaaagggtccccgtctcagagtacttcagtaaaagtcatgattaacattttagatgaaaatgataatgcccctaggttttctcagatatttagtgcccatgttcctgaaaattcccccttaggatacacagttacccgtgtcacaacttctgatgaagacattgggatcaatgcaattagtagatattctataatggatgcaagtcttccatttacaattaatcccagcacaggggatattgtcataagcagacctttaaatagggaagatacagaccgttacagaattcgagtttccgcacatgattctgggtggactgtaagtacagatgtcacaatatttgtgacagacatcaatgacaatgctccaagatttagcagaacttcctattatttagattgccctgaacttactgagattggctccaaagtaactcaggtatttgcaacagatcctgatgagggatcaaatggacaagtgttttatttcataaaatcccaatcagaatatttcaggattaatgccaccactggagagattttcaataaacagatcttaaaataccaaaatgtcactggcttcagtaatgtgaatatcaacaggcatagttttatagtgacatcttcagatcgaggtaaaccttccttaattagtgagacaacagttaccatcaatatagtggacagtaatgacaatgcacctcaatttcttaaaagtaaatatttcactccagtcaccaaaaatgttaaggttggtacgaagttaatcagagttacagcaatagatgacaaagattttggactgaattcagaagtggagtatttcatttctaatgataaccatttaggaaaatttaagttggacaatgatacggggtggatttcagtagcatcctccctgatttctgacttgaaccaaaacttttttatcacagtcactgcaaaggataagggaaaccctccactttcttcccaagcaactgttcacataactgtcactgaggaaaactaccatacacctgaattctctcaaagccacatgagtgcaaccatccctgagagccatagcattgggtccattgtcagaactgtttctgcaagagatagagatgcagcgatgaatggcttgattaagtacagcatttcttcaggaaatgaagaaggcatttttgcaatcaattcttctacaggtatattaacactagccaaagctcttgattatgagctatgccagaaacacgaaatgacgattagtgctatagatggaggatgggttgcaagaactggttactgcagtgtgaccgtaaatgtgattgatgtgaatgataattctccagtattcctctctgatgactatttccctactgttttggaaaatgccccaagtggaacaacagttatccacctaaatgcaacagatgctgactctggaacaaatgctgtgattgcgtatactgtacagtcatctgacagtgacctctttgtcattgaccctaacacaggagtcataaccactcaaggcttcttggattttgaaaccaagcagagctaccatcttactgtgaaagccttcaatgtccccgatgaggaaaggtgtagctttgccactgttaatatacaattaaaagggacaaatgaatatgtgccccgttttgtttccaaactttactattttgaaatctcagaagcagctcctaaaggtactattgttggagaagtgtttgctagcgaccgtgatttgggcactgatggggaggtacactatttgatttttggtaatagtcgaaagaagggtttccagatcaataagaagactggacagatttatgtttctggaattcttgatcgagaaaaagaagaaagggtgtctttgaaggtattggccaagaactttggcagcattagaggtgcagatatagatgaggtcactgtaaatgtcaccgtgcttgatgcaaatgacccacccatttttactctaaacatctacagtgtgcagatcagtgaaggggtcccaataggaactcatgtgacctttgtcagtgcctttgactcagactccatccccagctggagcaggttttcttacttcatcggatcagggaatgaaaatggtgccttttctattaatccgcagacaggacagatcaccgttactgcagaattagatcgagaaacccttcccatctataatctctcagttttggctgttgattcagggaccccctcagctacaggtagtgcctctttattagtcaccctggaagatataaatgataacgggcccatgctgactgtcagtgaaggagaagtcatggaaaacaaacggccaggcactttggtgatgacccttcagtccactgaccctgatctccctccaaatcaaggtccctttacttattacttgctgagcacaggtcctgccaccagttatttcagtctgagcactgctggagttctgagcacaaccagagagattgacagagagcagattgcagacttctatctgtctgtggttaccaaggattctggtgttcctcaaatgtcttccacaggaactgtgcatatcacagttatagaccaaaatgacaatccttcacagtctcggacggtggagatatttgttaattattatggtaacttgtttcccggtgggattttaggctctgtgaagccacaggatccagatgtgttagacagcttccactgctcccttacttcaggagttaccagcctcttcagtattccagggggtacttgtgatctgaattcccagccaaggtccacagatggcacgtttgatctgactgtccttagcaatgatggagttcacagcacagtcacgagcaacatccgagttttctttgctggattttccaatgccacagtggataacagcatcttacttcgtctcggcgtaccaacagtaaaggacttcttgaccaaccactatcttcattttttacgcattgccagctcacagctgacaggcttagggactgctgtgcaactgtacagtgcatatgaagagaacaatagaacgtttcttttggcagctgtgaagcgaaatcataatcagtatgtgaatcccagtggcgtagccaccttctttgaaagcatcaaagagatccttctccggcagagtggagtaaaggtggaatctgtggatcatgactcctgtgtgcatggcccatgtcagaatggagggagctgtctacgaagattggctgtgagctccgtattaaaaagccgtgagagtcttccagtcatcatcgtggcaaatgaacctctgcagcctttcttatgcaagtgtctgccaggatatgcgggtagctggtgtgaaatagatatagatgaatgtcttccatcaccttgccacagtggtggaacctgtcacaatttagtgggaggattttcatgcagctgcccagatggcttcactggtagggcgtgtgagagagatatcaatgagtgcctgcagagtccttgcaagaatggtgccatctgccagaattttccaggaagcttcaactgtgtttgcaaaactggatacacaggtgtctttggaaaacactgcgagttgaacagttatggatttgaggagttatcatacatggaatttccaagcttggaccccaataacaactatatttatgtcaaatttgccacgattaaaagtcatgccttattgctttacaactatgacaaccagacaggcgaccgggctgagtttttggcccttgaaattgccgaagaaagactaagattctcttataatttaggcagtggtacatataagctcaccaccatgaagaaggtgtcagatggacattttcacactgtgattgccaggagagcaggaatggcagcctccttaactgtggactcctgttctgagaaccaagagccaggatattgtactgtcagtaatgtggcagtttcagatgactggactcttgatgttcagccaaatagagttacagttggaggtatcagatctctagaaccaatccttcagagaagaggacacgtggaaagccatgattttgttgggtgtataatggagtttgcagtcaatggaaggcctctggaacccagccaagctttggcagcacaaggcatcctagatcagtatggcgattttatttcttactgttttaaagaaaaaaaatgcaaaaaagtatgcttcactgttactcctgacactgccttatcattagaaggcaaagggcgcttggactaccacatgagtcagaatgagaagcgggaatatttgttaaggcaaagcttacgaggtgccatgttggagccttttggtgtgaacagtctggaagtaaaatttaggaccagaagcgagaatggcgttttaatccatatccaagaaagcagcaattacactactgtgaagattaagaatggcaaagtatattttacatccgatgcaggaattgctgggaaagtggagagaaatattcctgaagtatatgttgcagacggccactggcacacttttctaattgggaaaaatggaacagcaacagtattgtctgttgacagaatatataacagagatattatccaccctactcaggacttcggtggccttgatgtgcttactatatcacttggaggaattccacccaatcaagcacatcgagatgcccaaacagcaggttttgatggctgcattgcttctatgtggtatggtggagaaagtcttcctttcagcgggaagcatagcttggcctccatctcaaaaacagatccctcagtgaagattggctgccgtggcccgaacatttgtgccagcaacccctgctggggtgatttgctgtgcattaatcagtggtatgcctacaggtgtgtccctcctggggactgtgcctcccacccgtgccagaatggtggcagctgtgagccaggcctgcactccggcttcacctgtagctgcccagactcgcacacgggaaggacctgtgagatggtggtggcctgtcttggcgtcctctgtcctcaggggaaggtgtgcaaagctggaagtcctgcggggcatgtctgtgttctgagtcagggccctgaagagatctctctgcctttgtgggctgtgcctgccatcgtgggcagctgcgcaaccgtcttggccctcctggtccttagcctgatcctgtgtaaccagtgcagggggaagaaggccaaaaatcccaaagaggagaagaaaccgaaggagaagaagaaaaagggaagtgagaacgttgcttttgatgaccctgacaatatccctccctatggggatgacatgactgtgaggaagcagcctgaagggaacccaaaaccagatatcattgaaagggaaaacccctaccttatctatgatgaaactgatattcctcacaactcagaaaccatccccagcgcccctttggcatctccagagcaggagatagagcactatgacattgacaacgccagcagcatcgccccttcggatgcagacatcattcaacactacaagcagttccgcagccacacaccaaaattttcaatccagaggcacagtcccctaggctttgcaaggcaatcccccatgcccttaggagcaagcagtttgacttaccagccttcatatggtcaaggtttgagaaccagctccctaagccactcagcatgcccaactcccaaccctctgtctcgacacagtccagcccctttctccaaatcttctacgttctatagaaacagcccagcaagggaattgcatcttcctataagggatggtaatactttggaaatgcatggtgacacctgccaacctggcattttcaactatgccacaaggctgggaaggagaagcaagagtcctcaggccatggcatcacatggttctagaccagggagtcgcctaaagcagccgattgggcagattccactggaatcttctcctccagtcggactttctattgaagaagtggagaggctcaacacacctcgccctagaaacccaagtatctgcagtgcagaccatgggaggtcttcttcagaggaggactgcagaaggccactgtctagaacaaggaatccagcggatggcattccagctccagaatcctcttctgatagtgactcccatgaatctttcacttgctcagaaatggaatatgacagggagaagccaatggtatatacttccagaatgcccaaattatctcaagtcaatgaatctgatgcagatgatgaagataattatggagccagactgaagcctcgaaggtaccacggtcgcagggccgagggaggacctgtgggcacccaggcagcagcaccaggcactgctgacaacacactgcccatgaagctagggcagcaagcagggactttcaactgggacaaccttttgaactggggccctggctttggccattatgtagatgtttttaaagatttggcatctcttccagaaaaagcagcagcaaatgaagaaggcaaagctgggacaactaaaccagtccccaaagatggggaagcagaacagtatgtgtga

SEQ ID NO: 173 - DNA, 6206 bp, Homo sapiens
gcggacactcctctcggctcctccccggcagcggcggcggctcggagcgggctccggggctcgggtgcagcggccagcgggcgcctggcggcgaggattacccggggaagtggttgtctcctggctggagccgcgagacgggcgctcagggcgcggggccggcggcggcgaacgagaggacggactctggcggccgggtcgttggccgcggggagcgcgggcaccgggcgagcaggccgcgtcgcgctcaccatggtcagctactgggacaccggggtcctgctgtgcgcgctgctcagctgtctgcttctcacaggatctagttcaggttcaaaattaaaagatcctgaactgagtttaaaaggcacccagcacatcatgcaagcaggccagacactgcatctccaatgcaggggggaagcagcccataaatggtctttgcctgaaatggtgagtaaggaaagcgaaaggctgagcataactaaatctgcctgtggaagaaatggcaaacaattctgcagtactttaaccttgaacacagctcaagcaaaccacactggcttctacagctgcaaatatctagctgtacctacttcaaagaagaaggaaacagaatctgcaatctatatatttattagtgatacaggtagacctttcgtagagatgtacagtgaaatccccgaaattatacacatgactgaaggaagggagctcgtcattccctgccgggttacgtcacctaacatcactgttactttaaaaaagtttccacttgacactttgatccctgatggaaaacgcataatctgggacagtagaaagggcttcatcatatcaaatgcaacgtacaaagaaatagggcttctgacctgtgaagcaacagtcaatgggcatttgtataagacaaactatctcacacatcgacaaaccaatacaatcatagatgtccaaataagcacaccacgcccagtcaaattacttagaggccatactcttgtcctcaattgtactgctaccactcccttgaacacgagagttcaaatgacctggagttaccctgatgaaaaaaataagagagcttccgtaaggcgacgaattgaccaaagcaattcccatgccaacatattctacagtgttcttactattgacaaaatgcagaacaaagacaaaggactttatacttgtcgtgtaaggagtggaccatcattcaaatctgttaacacctcagtgcatatatatgataaagcattcatcactgtgaaacatcgaaaacagcaggtgcttgaaaccgtagctggcaagcggtcttaccggctctctatgaaagtgaaggcatttccctcgccggaagttgtatggttaaaagatgggttacctgcgactgagaaatctgctcgctatttgactcgtggctactcgttaattatcaaggacgtaactgaagaggatgcagggaattatacaatcttgctgagcataaaacagtcaaatgtgtttaaaaacctcactgccactctaattgtcaatgtgaaaccccagatttacgaaaaggccgtgtcatcgtttccagacccggctctctacccactgggcagcagacaaatcctgacttgtaccgcatatggtatccctcaacctacaatcaagtggttctggcacccctgtaaccataatcattccgaagcaaggtgtgacttttgttccaataatgaagagtcctttatcctggatgctgacagcaacatgggaaacagaattgagagcatcactcagcgcatggcaataatagaaggaaagaataagatggctagcaccttggttgtggctgactctagaatttctggaatctacatttgcatagcttccaataaagttgggactgtgggaagaaacataagcttttatatcacagatgtgccaaatgggtttcatgttaacttggaaaaaatgccgacggaaggagaggacctgaaactgtcttgcacagttaacaagttcttatacagagacgttacttggattttactgcggacagttaataacagaacaatgcactacagtattagcaagcaaaaaatggccatcactaaggagcactccatcactcttaatcttaccatcatgaatgtttccctgcaagattcaggcacctatgcctgcagagccaggaatgtatacacaggggaagaaatcctccagaagaaagaaattacaatcagaggtgagcactgcaacaaaaaggctgttttctctcggatctccaaatttaaaagcacaaggaatgattgtaccacacaaagtaatgtaaaacattaaaggactcattaaaaagtaacagttgtctcatatcatcttgatttattgtcactgttgctaactttcaggctcggaggagatgctcctcccaaaatgagttcggagatgatagcagtaataatgagacccccgggccccagctctgggccccccattcaggccgagggggctgctccggggggccgacttggtgcacgtttggatttggaggatccctgcactgccttctctgtgtttgttgctcttgctgttttctcctgcctgataaacaacaacttgggatgatcctttccttccattttgatgccaacctctttttatttttaagatcaggaagcaccatacctcctgcgaaacctcagtgatcacacagtggccatcagcagttccaccactttagactgtcatgctaatggtgtccccgagcctcagatcacttggtttaaaaacaaccacaaaatacaacaagagcctggaattattttaggaccaggaagcagcacgctgtttattgaaagagtcacagaagaggatgaaggtgtctatcactgcaaagccaccaaccagaagggctctgtggaaagttcagcatacctcactgttcaaggaacctcggacaagtctaatctggagctgatcactctaacatgcacctgtgtggctgcgactctcttctggctcctattaaccctctttatccgaaaaatgaaaaggtcttcttctgaaataaagactgactacctatcaattataatggacccagatgaagttcctttggatgagcagtgtgagcggctcccttatgatgccagcaagtgggagtttgcccgggagagacttaaactgggcaaatcacttggaagaggggcttttggaaaagtggttcaagcatcagcatttggcattaagaaatcacctacgtgccggactgtggctgtgaaaatgctgaaagagggggccacggccagcgagtacaaagctctgatgactgagctaaaaatcttgacccacattggccaccatctgaacgtggttaacctgctgggagcctgcaccaagcaaggagggcctctgatggtgattgttgaatactgcaaatatggaaatctctccaactacctcaagagcaaacgtgacttattttttctcaacaaggatgcagcactacacatggagcctaagaaagaaaaaatggagccaggcctggaacaaggcaagaaaccaagactagatagcgtcaccagcagcgaaagctttgcgagctccggctttcaggaagataaaagtctgagtgatgttgaggaagaggaggattctgacggtttctacaaggagcccatcactatggaagatctgatttcttacagttttcaagtggccagaggcatggagttcctgtcttccagaaagtgcattcatcgggacctggcagcgagaaacattcttttatctgagaacaacgtggtgaagatttgtgattttggccttgcccgggatatttataagaaccccgattatgtgagaaaaggagatactcgacttcctctgaaatggatggctcctgaatctatctttgacaaaatctacagcaccaagagcgacgtgtggtcttacggagtattgctgtgggaaatcttctccttaggtgggtctccatacccaggagtacaaatggatgaggacttttgcagtcgcctgagggaaggcatgaggatgagagctcctgagtactctactcctgaaatctatcagatcatgctggactgctggcacagagacccaaaagaaaggccaagatttgcagaacttgtggaaaaactaggtgatttgcttcaagcaaatgtacaacaggatggtaaagactacatcccaatcaatgccatactgacaggaaatagtgggtttacatactcaactcctgccttctctgaggacttcttcaaggaaagtatttcagctccgaagtttaattcaggaagctctgatgatgtcagatacgtaaatgctttcaagttcatgagcctggaaagaatcaaaacctttgaagaacttttaccgaatgccacctccatgtttgatgactaccagggcgacagcagcactctgttggcctctcccatgctgaagcgcttcacctggactgacagcaaacccaaggcctcgctcaagattgacttgagagtaaccagtaaaagtaaggagtcggggctgtctgatgtcagcaggcccagtttctgccattccagctgtgggcacgtcagcgaaggcaagcgcaggttcacctacgaccacgctgagctggaaaggaaaatcgcgtgctgctccccgcccccagactacaactcggtggtcctgtactccaccccacccatctagagtttgacacgaagccttatttctagaagcacatgtgtatttatacccccaggaaactagcttttgccagtattatgcatatataagtttacacctttatctttccatgggagccagctgctttttgtgatttttttaatagtgcttttttttttttgactaacaagaatgtaactccagatagagaaatagtgacaagtgaagaacactactgctaaatcctcatgttactcagtgttagagaaatccttcctaaacccaatgacttccctgctccaacccccgccacctcagggcacgcaggaccagtttgattgaggagctgcactgatcacccaatgcatcacgtaccccactgggccagccctgcagcccaaaacccagggcaacaagcccgttagccccagggatcactggctggcctgagcaacatctcgggagtcctctagcaggcctaagacatgtgaggaggaaaaggaaaaaaagcaaaaagcaagggagaaaagagaaaccgggagaaggcatgagaaagaatttgagacgcaccatgtgggcacggagggggacggggctcagcaatgccatttcagtggcttcccagctctgacccttctacatttgagggcccagccaggagcagatggacagcgatgaggggacattttctggattctgggaggcaagaaaaggacaaatatcttttttggaactaaagcaaattttagaactttacctatggaagtggttctatgtccattctcattcgtggcatgttttgatttgtagcactgagggtggcactcaactctgagcccatacttttggctcctctagtaagatgcactgaaaacttagccagagttaggttgtctccaggccatgatggccttacactgaaaatgtcacattctattttgggtattaatatatagtccagacacttaactcaatttcttggtattattctgttttgcacagttagttgtgaaagaaagctgagaagaatgaaaatgcagtcctgaggagaggagttttctccatatcaaaacgagggctgatggaggaaaaaggtcaataaggtcaagggaaaaccccgtctctataccaaccaaaccaattcaccaacacagttgggacccaaaacacaggaagtcagtcacgtttccttttcatttaatggggattccactatctcacactaatctgaaaggatgtggaagagcattagctggcgcatattaagcactttaagctccttgagtaaaaaggtggtatgtaatttatgcaaggtatttctccagttgggactcaggatattagttaatgagccatcactagaagaaaagcccattttcaactgctttgaaacttgcctggggtctgagcatgatgggaatagggagacagggtaggaaagggcgcctactcttcagggtctaaagatcaagtgggccttggatcgctaagctggctctgtttgatgctatttatgcaagttagggtctatgtattta

SEQ ID NO: 174 - DNA, 2057 bp, Homo sapiens
aaacccccctgcatcgtagagagcgggctggattctctgtggtgctgatggaggagggggagcaggttgaaacaatcgagtgggcgcgccaggactccccagctcctggcggggaagggagggggagcccctgttctgcgcagggaggcggcggggctggggggcccccggaacgaggaagaggcaggggtgaccgctagaataggaaagtgctcacccccgggaggcaaaatttcgttcagatcgcacattaattggagatatctgattaattccagcttctgatgactataaatggcgattctctaccaaggtgtctatattaaaaaaaaaatcattccgtgtcatcccccacgtcaggcctgctcgtgggcgtgaggctgtacttcctccgcccccttctaatggagtgaaccattcccagctctcccccccccctcagcctctctctctctctctctttctctctctctctctctttctgtctcttcctcgctccctctctttctctcctccctctgccttcccagtgcataaagtctctgtcgctcccggaacttgttggcaatgcctattttttggctttcccccgcgttctctaaactaactatttaaaggtctgcggtcgcaaatggtttgactaaacgtaggatgggacttaagttgaacggcagatatatttcactgatcctcgcggtgcaaatagcgtatctggtgcaggccgtgagagcagcgggcaagtgcgatgcggtcttcaagggcttttcggactgtttgctcaagctgggcgacagcatggccaactacccgcagggcctggacgacaagacgaacatcaagaccgtgtgcacatactgggaggatttccacagctgcacggtcacagcccttacggattgccaggaaggggcgaaagatatgtgggataaactgagaaaagaatccaaaaacctcaacatccaaggcagcttattcgaactctgcggcagcggcaacggggcggcggggtccctgctcccggcgttcccggtgctcctggtgtctctctcggcagctttagcgacctggctttccttctgagcgtggggccagctccccccgcgcgcccacccacactcactccatgctcccggaaatcgagaggaagatccattagttctttggggacgttgtgattctctgtgatgctgaaaacactcatataggattgtgggaaatcctgattctcttttttatttcgtttgatttcttgtgttttatttgccaaatgttaccaatcagtgagcaagcaagcacagccaaaatcggacctcagctttagtccgtcttcacacacaaataagaaaacggcaaacccaccccattttttaattttattattattaattttttttgttggcaaaagaatctcaggaacggccctgggccacctactatattaatcatgctagtaacatgaaaaatgatgggctcctcctaataggaaggcgaggagaggagaaggccaggggaatgaattcaagagagatgtccacggacgaaacatacggtgaataattcacgctcacgtcgttcttccacagtatcttgttttgatcatttccactgcacatttctcctcaagaaaagcgaaaggacagactgttggctttgtgtttggaggataggagggagagagggaaggggctgaggaaatctctggggtaagagtaaaggcttccagaagacatgctgctatggtcactgaggggttagctttatctgctgttgttgatgcatccgtccaagttcactgcctttattttccctcctccctcttgttttagctgttacacacacagtaatacctgaatatccaacggtatagatcacaagggggggatgttaaatgttaatctaaaatatagctaaaaaaagattttgacataaaagagccttgattttaaaaaaaaaagagagagagatgtaatttaaaaagtttattataaattaaattcagcaaaaaaagatttgctacaaagtatagagaagtataaaataaaagttattgtttgaaa

SEQ ID NO: 175 - DNA, 5811 bp, Homo sapiens
aggaggaggagacggcatccagtacagaggggctggacttggacccctgcagcagccctgcacaggagaagcggcatataaagccgcgctgcccgggagccgctcggccacgtccaccggagcatcctgcactgcagggccggtctctcgctccagcagagcctgcgcctttctgactcggtccggaacactgaaaccagtcatcactgcatctttttggcaaaccaggagctcagctgcaggaggcaggatggtctggaggctggtcctgctggctctgtgggtgtggcccagcacgcaagctggtcaccaggacaaagacacgaccttcgaccttttcagtatcagcaacatcaaccgcaagaccattggcgccaagcagttccgcgggcccgaccccggcgtgccggcttaccgcttcgtgcgctttgactacatcccaccggtgaacgcagatgacctcagcaagatcaccaagatcatgcggcagaaggagggcttcttcctcacggcccagctcaagcaggacggcaagtccaggggcacgctgttggctctggagggccccggtctctcccagaggcagttcgagatcgtctccaacggccccgcggacacgctggatctcacctactggattgacggcacccggcatgtggtctccctggaggacgtcggcctggctgactcgcagtggaagaacgtcaccgtgcaggtggctggcgagacctacagcttgcacgtgggctgcgacctcatagacagcttcgctctggacgagcccttctacgagcacctgcaggcggaaaagagccggatgtacgtggccaaaggctctgccagagagagtcacttcaggggtttgcttcagaacgtccacctagtgtttgaaaactctgtggaagatattctaagcaagaagggttgccagcaaggccagggagctgagatcaacgccatcagtgagaacacagagacgctgcgcctgggtccgcatgtcaccaccgagtacgtgggccccagctcggagaggaggcccgaggtgtgcgaacgctcgtgcgaggagctgggaaacatggtccaggagctctcggggctccacgtcctcgtgaaccagctcagcgagaacctcaagagagtgtcgaatgataaccagtttctctgggagctcattggtggccctcctaagacaaggaacatgtcagcttgctggcaggatggccggttctttgcggaaaatgaaacgtgggtggtggacagctgcaccacgtgtacctgcaagaaatttaaaaccatttgccaccaaatcacctgcccgcctgcaacctgcgccagtccatcctttgtggaaggcgaatgctgcccttcctgcctccactcggtggacggtgaggagggctggtctccgtgggcagagtggacccagtgctccgtgacgtgtggctctgggacccagcagagaggccggtcctgtgacgtcaccagcaacacctgcttggggccctccatccagacacgggcttgcagtctgagcaagtgtgacacccgcatccggcaggacggcggctggagccactggtcaccttggtcttcatgctctgtgacctgtggagttggcaatatcacacgcatccgtctctgcaactccccagtgccccagatggggggcaagaattgcaaagggagtggccgggagaccaaagcctgccagggcgccccatgcccaatcgatggccgctggagcccctggtccccgtggtcggcctgcactgtcacctgtgccggtgggatccgggagcgcacccgggtctgcaacagccctgagcctcagtacggagggaaggcctgcgtgggggatgtgcaggagcgtcagatgtgcaacaagaggagctgccccgtggatggctgtttatccaacccctgcttcccgggagcccagtgcagcagcttccccgatgggtcctggtcatgcggctcctgccctgtgggcttcttgggcaatggcacccactgtgaggacctggacgagtgtgccctggtccccgacatctgcttctccaccagcaaggtgcctcgctgtgtcaacactcagcctggcttccactgcctgccctgcccgccccgatacagagggaaccagcccgtcggggtcggcctggaagcagccaagacggaaaagcaagtgtgtgagcccgaaaacccatgcaaggacaagacacacaactgccacaagcacgcggagtgcatctacctgggccacttcagcgaccccatgtacaagtgcgagtgccagacaggctacgcgggcgacgggctcatctgcggggaggactcggacctggacggctggcccaacctcaatctggtctgcgccaccaacgccacctaccactgcatcaaggataactgcccccatctgccaaattctgggcaggaagactttgacaaggacgggattggcgatgcctgtgatgatgacgatgacaatgacggtgtgaccgatgagaaggacaactgccagctcctcttcaatccccgccaggctgactatgacaaggatgaggttggggaccgctgtgacaactgcccttacgtgcacaaccctgcccagatcgacacagacaacaatggagagggtgacgcctgctccgtggacattgatggggacgatgtcttcaatgaacgagacaattgtccctacgtctacaacactgaccagagggacacggatggtgacggtgtgggggatcactgtgacaactgccccctggtgcacaaccctgaccagaccgacgtggacaatgaccttgttggggaccagtgtgacaacaacgaggacatagatgacgacggccaccagaacaaccaggacaactgcccctacatctccaacgccaaccaggctgaccatgacagagacggccagggcgacgcctgtgaccctgatgatgacaacgatggcgtccccgatgacagggacaactgccggcttgtgttcaacccagaccaggaggacttggacggtgatggacggggtgatatttgtaaagatgattttgacaatgacaacatcccagatattgatgatgtgtgtcctgaaaacaatgccatcagtgagacagacttcaggaacttccagatggtccccttggatcccaaagggaccacccaaattgatcccaactgggtcattcgccatcaaggcaaggagctggttcagacagccaactcggaccccggcatcgctgtaggttttgacgagtttgggtctgtggacttcagtggcacattctacgtaaacactgaccgggacgacgactatgccggcttcgtctttggttaccagtcaagcagccgcttctatgtggtgatgtggaagcaggtgacgcagacctactgggaggaccagcccacgcgggcctatggctactccggcgtgtccctcaaggtggtgaactccaccacggggacgggcgagcacctgaggaacgcgctgtggcacacggggaacacgccggggcaggtgcgaaccttatggcacgaccccaggaacattggctggaaggactacacggcctataggtggcacctgactcacaggcccaagactggctacatcagagtcttagtgcatgaaggaaaacaggtcatggcagactcaggacctatctatgaccaaacctacgctggcgggcggctgggtctatttgtcttctctcaagaaatggtctatttctcagacctcaagtacgaatgcagagatatttaaacaagatttgctgcatttccggcaatgccctgtgcatgccatggtccctagacacctcagttcattgtggtccttgtggcttctctctctagcagcacctcctgtcccttgaccttaactctgatggttcttcacctcctgccagcaaccccaaacccaagtgccttcagaggataaatatcaatggaactcagagatgaacatctaacccactagaggaaaccagtttggtgatatatgagactttatgtggagtgaaaattgggcatgccattacattgctttttcttgtttgtttaaaaagaatgacgtttacatataaaatgtaattacttattgtatttatgtgtatatggagttgaagggaatactgtgcataagccattatgataaattaagcatgaaaaatattgctgaactacttttggtgcttaaagttgtcactattcttgaattagagttgctctacaatgacacacaaatcccattaaataaattataaacaagggtcaattcaaatttgaagtaatgttttagtaaggagagattagaagacaacaggcatagcaaatgacataagctaccgattaactaatcggaacatgtaaaacagttacaaaaataaacgaactctcctcttgtcctacaatgaaagccctcatgtgcagtagagatgcagtttcatcaaagaacaaacatccttgcaaatgggtgtgacgcggttccagatgtggatttggcaaaacctcatttaagtaaaaggttagcagagcaaagtgcggtgctttagctgctgcttgtgccgctgtggcgtcggggaggctcctgcctgagcttccttccccagctttgctgcctgagaggaaccagagcagacgcacaggccggaaaaggcgcatctaacgcgtatctaggctttggtaactgcggacaagttgcttttacctgatttgatgatacatttcattaaggttccagttataaatattttgttaatatttattaagtgactatagaatgcaactccatttaccagtaacttattttaaatatgcctagtaacacatatgtagtataatttctagaaacaaacatctaataagtatataatcctgtgaaaatatgaggcttgataatattaggttgtcacgatgaagcatgctagaagctgtaacagaatacatagagaataatgaggagtttatgatggaaccttaaatatataatgttgccagcgattttagttcaatatttgttactgttatctatctgctgtatatggaattcttttaattcaaacgctgaaaagaatcagcatttagtcttgccaggcacacccaataatcagtcatgtgtaatatgcacaagtttgtttttgtttttgttttttttgttggttggtttgtttttttgctttaagttgcatgatctttctgcaggaaatagtcactcatcccactccacataaggggtttagtaagagaagtctgtctgtctgatgatggatagggggcaaatctttttcccctttctgttaatagtcatcacatttctatgccaaacaggaacaatccataactttagtcttaatgtacacattgcattttgataaaattaattttgttgtttcctttgaggttgatcgttgtgttgttgttttgctgcactttttacttttttgcgtgtggagctgtattcccgagaccaacgaagcgttgggatacttcattaaatgtagcgactgtcaacagcgtgcaggttttctgtttctgtgttgtggggtcaaccgtacaatggtgtgggagtgacgatgatgtgagtatttagaatgtaccatattttttgtaaattatttatgtttttctaaacaaatttatcgtataggttgatgaaacgtcatgtgttttgccaaagactgtaaatatttatttatgtgttcacatggtcaaaatttcaccactgaaaccctgcacttagctagaacctcatttttaaagattaacaacaggaaataaattgtaaaaaaggttttctatacatga

SEQ ID NO: 176 - DNA, 8159 bp, Homo sapiens
acagccgggctggagcgcgcacccggcactgaggcttcgctgctctcggagcgctcagaccgcggccgccgcagccggcgaaagaggcaaagtcccgcacgccggaggacatgcgcctcggctagcggccccgggccccaccaccgtgcggctttctccagattattcctctctcgctgtctctgactgtctctctctgtctctgtctctgtctctctctctctcacacacacacacacacacacaaacacacatacgcacgcacgatctcacttcgatctatacactggaggattaaaacaaacaaacaaaaaaaacatttccttcgctccccctccctctccactctgagaagcagaggagccgcacggcgaggggccgcagaccgtctggaaatgcgaatcctaaagcgtttcctcgcttgcattcagctcctctgtgtttgccgcctggattgggctaatggatactacagacaacagagaaaacttgttgaagagattggctggtcctatacaggagcactgaatcaaaaaaattggggaaagaaatatccaacatgtaatagcccaaaacaatctcctatcaatattgatgaagatcttacacaagtaaatgtgaatcttaagaaacttaaatttcagggttgggataaaacatcattggaaaacacattcattcataacactgggaaaacagtggaaattaatctcactaatgactaccgtgtcagcggaggagtttcagaaatggtgtttaaagcaagcaagataacttttcactggggaaaatgcaatatgtcatctgatggatcagagcatagtttagaaggacaaaaatttccacttgagatgcaaatctactgctttgatgcggaccgattttcaagttttgaggaagcagtcaaaggaaaagggaagttaagagctttatccattttgtttgaggttgggacagaagaaaatttggatttcaaagcgattattgatggagtcgaaagtgttagtcgttttgggaagcaggctgctttagatccattcatactgttgaaccttctgccaaactcaactgacaagtattacatttacaatggctcattgacatctcctccctgcacagacacagttgactggattgtttttaaagatacagttagcatctctgaaagccagttggctgttttttgtgaagttcttacaatgcaacaatctggttatgtcatgctgatggactacttacaaaacaattttcgagagcaacagtacaagttctctagacaggtgttttcctcatacactggaaaggaagagattcatgaagcagtttgtagttcagaaccagaaaatgttcaggctgacccagagaattataccagccttcttgttacatgggaaagacctcgagtcgtttatgataccatgattgagaagtttgcagttttgtaccagcagttggatggagaggaccaaaccaagcatgaatttttgacagatggctatcaagacttgggtgctattctcaataatttgctacccaatatgagttatgttcttcagatagtagccatatgcactaatggcttatatggaaaatacagcgaccaactgattgtcgacatgcctactgataatcctgaacttgatcttttccctgaattaattggaactgaagaaataatcaaggaggaggaagagggaaaagacattgaagaaggcgctattgtgaatcctggtagagacagtgctacaaaccaaatcaggaaaaaggaaccccagatttctaccacaacacactacaatcgcatagggacgaaatacaatgaagccaagactaaccgatccccaacaagaggaagtgaattctctggaaagggtgatgttcccaatacatctttaaattccacttcccaaccagtcactaaattagccacagaaaaagatatttccttgacttctcagactgtgactgaactgccacctcacactgtggaaggtacttcagcctctttaaatgatggctctaaaactgttcttagatctccacatatgaacttgtcggggactgcagaatccttaaatacagtttctataacagaatatgaggaggagagtttattgaccagtttcaagcttgatactggagctgaagattcttcaggctccagtcccgcaacttctgctatcccattcatctctgagaacatatcccaagggtatatattttcctccgaaaacccagagacaataacatatgatgtccttataccagaatctgctagaaatgcttccgaagattcaacttcatcaggttcagaagaatcactaaaggatccttctatggagggaaatgtgtggtttcctagctctacagacataacagcacagcccgatgttggatcaggcagagagagctttctccagactaattacactgagatacgtgttgatgaatctgagaagacaaccaagtccttttctgcaggcccagtgatgtcacagggtccctcagttacagatctggaaatgccacattattctacctttgcctacttcccaactgaggtaacacctcatgcttttaccccatcctccagacaacaggatttggtctccacggtcaacgtggtatactcgcagacaacccaaccggtatacaatggtgagacacctcttcaaccttcctacagtagtgaagtctttcctctagtcacccctttgttgcttgacaatcagatcctcaacactacccctgctgcttcaagtagtgattcggccttgcatgctacgcctgtatttcccagtgtcgatgtgtcatttgaatccatcctgtcttcctatgatggtgcacctttgcttccattttcctctgcttccttcagtagtgaattgtttcgccatctgcatacagtttctcaaatccttccacaagttacttcagctaccgagagtgataaggtgcccttgcatgcttctctgccagtggctgggggtgatttgctattagagcccagccttgctcagtattctgatgtgctgtccactactcatgctgcttcagagacgctggaatttggtagtgaatctggtgttctttataaaacgcttatgttttctcaagttgaaccacccagcagtgatgccatgatgcatgcacgttcttcagggcctgaaccttcttatgccttgtctgataatgagggctcccaacacatcttcactgtttcttacagttctgcaatacctgtgcatgattctgtgggtgtaacttatcagggttccttatttagcggccctagccatataccaatacctaagtcttcgttaataaccccaactgcatcattactgcagcctactcatgccctctctggtgatggggaatggtctggagcctcttctgatagtgaatttcttttacctgacacagatgggctgacagcccttaacatttcttcacctgtttctgtagctgaatttacatatacaacatctgtgtttggtgatgataataaggcgctttctaaaagtgaaataatatatggaaatgagactgaactgcaaattccttctttcaatgagatggtttacccttctgaaagcacagtcatgcccaacatgtatgataatgtaaataagttgaatgcgtctttacaagaaacctctgtttccatttctagcaccaagggcatgtttccagggtcccttgctcataccaccactaaggtttttgatcatgagattagtcaagttccagaaaataacttttcagttcaacctacacatactgtctctcaagcatctggtgacacttcgcttaaacctgtgcttagtgcaaactcagagccagcatcctctgaccctgcttctagtgaaatgttatctccttcaactcagctcttattttatgagacctcagcttcttttagtactgaagtattgctacaaccttcctttcaggcttctgatgttgacaccttgcttaaaactgttcttccagctgtgcccagtgatccaatattggttgaaacccccaaagttgataaaattagttctacaatgttgcatctcattgtatcaaattctgcttcaagtgaaaacatgctgcactctacatctgtaccagtttttgatgtgtcgcctacttctcatatgcactctgcttcacttcaaggtttgaccatttcctatgcaagtgagaaatatgaaccagttttgttaaaaagtgaaagttcccaccaagtggtaccttctttgtacagtaatgatgagttgttccaaacggccaatttggagattaaccaggcccatcccccaaaaggaaggcatgtatttgctacacctgttttatcaattgatgaaccattaaatacactaataaataagcttatacattccgatgaaattttaacctccaccaaaagttctgttactggtaaggtatttgctggtattccaacagttgcttctgatacatttgtatctactgatcattctgttcctataggaaatgggcatgttgccattacagctgtttctccccacagagatggttctgtaacctcaacaaagttgctgtttccttctaaggcaacttctgagctgagtcatagtgccaaatctgatgccggtttagtgggtggtggtgaagatggtgacactgatgatgatggtgatgatgatgatgatgacagaggtagtgatggcttatccattcataagtgtatgtcatgctcatcctatagagaatcacaggaaaaggtaatgaatgattcagacacccacgaaaacagtcttatggatcagaataatccaatctcatactcactatctgagaattctgaagaagataatagagtcacaagtgtatcctcagacagtcaaactggtatggacagaagtcctggtaaatcaccatcagcaaatgggctatcccaaaagcacaatgatggaaaagaggaaaatgacattcagactggtagtgctctgcttcctctcagccctgaatctaaagcatgggcagttctgacaagtgatgaagaaagtggatcagggcaaggtacctcagatagccttaatgagaatgagacttccacagatttcagttttgcagacactaatgaaaaagatgctgatgggatcctggcagcaggtgactcagaaataactcctggattcccacagtccccaacatcatctgttactagcgagaactcagaagtgttccacgtttcagaggcagaggccagtaatagtagccatgagtctcgtattggtctagctgaggggttggaatccgagaagaaggcagttataccccttgtgatcgtgtcagccctgacttttatctgtctagtggttcttgtgggtattctcatctactggaggaaatgcttccagactgcacacttttacttagaggacagtacatcccctagagttatatccacacctccaacacctatctttccaatttcagatgatgtcggagcaattccaataaagcactttccaaagcatgttgcagatttacatgcaagtagtgggtttactgaagaatttgagacactgaaagagttttaccaggaagtgcagagctgtactgttgacttaggtattacagcagacagctccaaccacccagacaacaagcacaagaatcgatacataaatatcgttgcctatgatcatagcagggttaagctagcacagcttgctgaaaaggatggcaaactgactgattatatcaatgccaattatgttgatggctacaacagaccaaaagcttatattgctgcccaaggcccactgaaatccacagctgaagatttctggagaatgatatgggaacataatgtggaagttattgtcatgataacaaacctcgtggagaaaggaaggagaaaatgtgatcagtactggcctgccgatgggagtgaggagtacgggaactttctggtcactcagaagagtgtgcaagtgcttgcctattatactgtgaggaattttactctaagaaacacaaaaataaaaaagggctcccagaaaggaagacccagtggacgtgtggtcacacagtatcactacacgcagtggcctgacatgggagtaccagagtactccctgccagtgctgacctttgtgagaaaggcagcctatgccaagcgccatgcagtggggcctgttgtcgtccactgcagtgctggagttggaagaacaggcacatatattgtgctagacagtatgttgcagcagattcaacacgaaggaactgtcaacatatttggcttcttaaaacacatccgttcacaaagaaattatttggtacaaactgaggagcaatatgtcttcattcatgatacactggttgaggccatacttagtaaagaaactgaggtgctggacagtcatattcatgcctatgttaatgcactcctcattcctggaccagcaggcaaaacaaagctagagaaacaattccagctcctgagccagtcaaatatacagcagagtgactattctgcagccctaaagcaatgcaacagggaaaagaatcgaacttcttctatcatccctgtggaaagatcaagggttggcatttcatccctgagtggagaaggcacagactacatcaatgcctcctatatcatgggctattaccagagcaatgaattcatcattacccagcaccctctccttcataccatcaaggatttctggaggatgatatgggaccataatgcccaactggtggttatgattcctgatggccaaaacatggcagaagatgaatttgtttactggccaaataaagatgagcctataaattgtgagagctttaaggtcactcttatggctgaagaacacaaatgtctatctaatgaggaaaaacttataattcaggactttatcttagaagctacacaggatgattatgtacttgaagtgaggcactttcagtgtcctaaatggccaaatccagatagccccattagtaaaacttttgaacttataagtgttataaaagaagaagctgccaatagggatgggcctatgattgttcatgatgagcatggaggagtgacggcaggaactttctgtgctctgacaacccttatgcaccaactagaaaaagaaaattccgtggatgtttaccaggtagccaagatgatcaatctgatgaggccaggagtctttgctgacattgagcagtatcagtttctctacaaagtgatcctcagccttgtgagcacaaggcaggaagagaatccatccacctctctggacagtaatggtgcagcattgcctgatggaaatatagctgagagcttagagtctttagtttaacacagaaaggggtgggggaactcacatctgagcattgttttcctcttcctaaaattaggcaggaaaatcagtctagttctgttatctgttgatttcccatcacctgacagtaactttcatgacataggattctgccgccaaatttatatcattaacaatgtgtgcctttttgcaagacttgtaatttacttattatgtttgaactaaaatgattgaattttacagtatttctaagaatggaattgtggtatttttttctgtattgattttaacagaaaatttcaatttatagaggttaggaattccaaactacagaaaatgtttgtttttagtgtcaaatttttagctgtatttgtagcaattatcaggtttgctagaaatataacttttaatacagtagcctgtaaataaaacactcttccatatgatattcaacattttacaactgcagtattcacctaaagtagaaataatctgttacttattgtaaatactgccctagtgtctccatggaccaaatttatatttataattgtagatttttatattttactactgagtcaagttttctagttctgtgtaattgtttagtttaatgacgtagttcattagctggtcttactctaccagttttctgacattgtattgtgttacctaagtcattaactttgtttcagcatgtaattttaacttttgtggaaaatagaaataccttcattttgaaagaagtttttatgagaataacaccttaccaaacattgttcaaatggtttttatccaaggaattgcaaaaataaatataaatattgccattaa

SEQ ID NO: 177 - DNA, 7809 bp, Homo sapiens
gcatgtacacgcgcacccgcacccgcgcgcctgtatcccgtgctgtttccctggcagacacacaggcgctcacgagtctctccttgccagcctgcagggcggcgacccccaaaacccagctccgggtcccaacctaggcaagaagctgcttctctgccaacagctcctcttcggcctccgtcacagccacctggaccctaccctttcgcgactgctgctgctgctgcccggacgtggaagcagcaagaggcgcttggtcaagacacactgacggtacctacagaatactggacatacggattcagaatccataaggctttatcaccttgaatcaaggatttatttgatatcatcctcggtctttacttcctatcaagtaacattgttttgaaaaatagagttaacacatttgccataagggagtttttttttttttttttaaatacttcgcatactctccaatgcccaaaaatagcaaggtggtaaaaagagaattagatgatgatgttactgagtctgtcaaagaccttctttccaatgaagacgcagctgatgatgcttttaagacaagtgaactaattgttgatggccaggaagagaaagatacagatgttgaagaaggatctgaagtcgaagatgaaagaccagcttggaacagtaaactacaatacatcctggcccaagttggattttctgtaggtttaggaaatgtgtggcgatttccatacctatgtcagaagaatgggggcggtgcatatcttttaccatatttaatactacttatggtaataggtattcccctttttttcttggaactctctgtgggtcaaagaattcggcgaggcagcattggtgtatggaattacataagccctaaactgggcgggattggatttgcaagttgtgtagtgtgctattttgtagctctctactacaacgtcatcattggctggagtttgttttatttttctcagtcttttcagcaacccctgccttgggatcagtgtcctttggtgaaaaatgcttcacacacttttgtagaaccagaatgtgaacaaagttctgccaccacctattactggtacagggaagcactgaatatttcaagttccatttctgaaagtgggggcttaaactggaagatgaccatctgcttgttggctgcctgggtcatggtttgcttggctatgatcaaaggcattcagtcttctggaaaagttagtatgttagagcccttcctcattctgctaatcaccatttctggattcatccctctctcaaattctgttacagatttctgtgggcaaatcacacataacacttcattctaggtagttaaatattagtgaaaagtgacacttcaaaagtgtgcttacatttttaaaaagacaaataaaaacagtgttttatagtgaaatctaaggttaattataatctttccttatttcaacaagatctttaaaatttttgtgaatacttaaaagtcctttctttttgccctttattcaattagtcctaatgtttcagttctctaattaccaattagttaaattatggaaattggggaaagtggtaaaatgagtaattcattcattttgtttgtttgatatcatttgtttctctctgctgtaggtgttctaaggaatagctgcataagacattttgaaataatgtaatgtgaagtgtttcttaaagctctgaacatcattaagtagttaataataattccaacaaggaattcagagtaatgtaaaagactaaatatcattccttctaaggcaaattgaaaattagaatggttgtggtttaaaaagacattaagtgaattctaggtagcttgtttgttattatttttaaaggacgctctaggaaagtaattgctattcactattttgctttcgtattactttttttttttttttttcattatcacagccattgttctaaagctctccacatctcttggctggatcatagcaagaatttactgttggctcttctctctgccgtttaactgtccagctgtgctattttccttttcaaagtataactgatttcaggctaacttattaccactcatcatcatatactagcaggaatggcaatagtagtagtagtagcagcagcaatagtagaagtagtcataataacaataataataaatgatgataaagatgtttctgacaagaattagggtaagaacagtaattgaagccaattatttattacaaatgtattttgctttgggtactgtgataactactttttatactttatcccatttaattataaaaaccactcttgagaagtaatttttattttcagaaccattttacagatttaaaataaacaggtttgaggaattagtttaacttatccaaagtttcgtggctattaagttctagtatttggagtcaaatgcaagtctgtctaaatctagagcccatgttctttaactgcaacactataatgtctcaccccgtcctagtcccaccaattagtcaactcttttagggcagaagtctgtctaattcatctttgcttcctgttactttatatttaattaaaaattttagtgactttttaacttgtaaattgtagctgattttacatttatcttcctgaaggaaactctgtatcattttgtcttttgaatttgtgaatatacttgttaacacatctaaatatctttaagtctttggcaatgttattgtattatatgactaaataacttcgaattgttcaattgtgtatgtcttccactatgtcagagccacattcccgtcacattataaatgaaggagtggattcttaaataagacctaaccatatttatatgattcctaacataatatcatttggtagaaagaaaaccaactgtggtcatccagagaagctcaaaaactcttgtactcaggttctcttactaccacgttttgtttctgtttcttcttagtctgtgtcttagcatcacttaaagaactattcatccttttcttatcacagaatcttggggttgttcttctcatgtcatgtagtgtaaatttatatagaaaatgtaatacaatttatttagtacatacatttattattttaatgagaatgcctcaggaaaagactagtatttgggcaatatttgaagaaagaatttaacaggcactgatggggagaaagctagctgtaggtaatgtgagcaaagatgtggaagccaaaattgtcacaattcctcaatctgaaacaatgagttaaatataataacaatgactttatgaggaattaaaggttaagctttgtgtttacctactaaacagaaaatgcctccaaataaacagtgtcacaagtacagaagagagaaatattgtttaaggctagcacatggaaaaacaacttagaggatttagcagctaaaagaagaatgagtcagctggtgatgtgcttggtcaaaacacacagtcatacatgcatatacatataccccaaaatgctaagtggaaactgcatgaattaaaagaggggtatgatagggacattgtcctttgggctaggtaggcacatatcagttggaccacatctgcaatactggattttactgaaatcttgtattttcctttttattatgagaaatttcagctcagtgatcaaagtcttcaaatagttaaaccaaaagaagaatagggctgctttgtgtggccatagagagcaaaactatgatcaaatagtgggtattatggaggaggttgtgatggtggtaagccttcaaagaaagaaaggcctttcaagaatcaaacttgataataatgaaatcagttgcctcaatggtagagagctcagcatcactggaggtggtcacacagaggtagcatgtgccctagttacagaatctattaaggggatgactgtctcaaatatgtaggacagaaatgagaagccccaagcttgcttttaactctaaggtagtattttctactctgactactttcctgttgttactactactatgctaaatactatgcatacattatcttgtttattctttctatcagctagataatttgcatattttatccccattttactgcaaagttgacaagctcagggaaaataaatagttggccagaattaagcaaccaatacatgatagacagggctaaaactgggctacagaattttcaaaaagaatgatacattctgaaggtatgtttataataaacatttttcatatgtaaaaatcatatattttagttctctgtttccatatgtggtacttatttgcttcctcatcagagcattccttttaaatggttcaattgatggcattcgccacatgtttacccctaagcttgaaataatgctggagcccaaggtctggagagaagctgctactcaagtgttctttgccttaggtctgggatttggtggtgtcattgccttttcaagctacaacaagagagacaacaactgccactttgatgctgtcctggtgtccttcatcaattttttcacttctgtcctggcaacattggtggtgtttgcagttctgggcttcaaagcaaatgtcataaatgagaaatgcattacacaaaattcagagacgatcatgaaatttttgaaaatggggaacattagtcaggatattattccccatcatatcaacctttcaactgttactgcagaagattatcatttagtttatgacatcattcaaaaagtgaaagaagaagagtttcctgctcttcatctcaattcctgtaaaattgaagaagagctaaataaagctgttcaggggaccggcttagcttttattgcctttacagaagcgatgacacattttcctgcatctcccttctggtcagtgatgtttttcctcatgctggtcaatctaggccttggcagtatgtttggaaccattgaagggattgtcacgcctattgtggacactttcaaagtgaggaaagaaattcttactgttatctgttgtcttctggcattttgtattggcctgatatttgtgcaacgctctggaaattactttgttacaatgtttgatgattattctgctacactgcctctgctaattgtagtcattttggagaatattgctgtatgctttgtttatggcatagataagtttatggaagacctaaaagatatgctgggctttgctcccagcagatattactactatatgtggaaatatatttctcctctaatgctattatcattgctaatagctagtgttgtgaatatgggattaagtcctcctggctataacgcatggattgaagataaggcatctgaagaatttctgagctatccaacatggggactggttgtttgtgtctctctggttgtctttgcaatactcccagtccctgtagttttcattgttcgtcgcttcaaccttatagatgatagttctggtaatttagcatctgtgacctataagagaggaagggtcctgaaagagcctgtgaacttagagggcgatgatacaagcctcattcacggaaaaataccgagcgagatgccatctccaaattttggtaaaaatatttatcgaaaacagagtggatccccaactctggatactgctcccaatggacggtatggaatagggtacttgatggcagatattatgccagatatgccagaatctgatttgtagctgggggaaaagtcagtgggttttatttggttcatttttaccaatgaacattggccctagtaggagaagcattaggcttcacttatcagagggcaatctcaggtgttccgtggctgtgatctttaatcctaacagtatatgtcagttcaacttgagcattcttttggattctttggtttacatttgtgcagaaaggattgcagacaaatcttaggagggctgaggtacatgtttgccaggatttttttttaagtacctttggtgtattttcaaatatttctatctcttaaaaaaatggtattacctcagtttctaataatttctgggtttagtagtgttgacaattaaaaatggtatacattaaaatttataagtttgccttcagggtaacttccagtgtcacaatgagcagttctgtaagtgggtgcctctcagcacatttctatgaatatattatgtagataggctgtattgattttggtagcattgacaccttcttaggcaattagttgaagaaaactgcaaaatattttcttatgtaatagctgtatagagcaatagcaatcaaagcatgagaaggcactaacgctgggatgaaagatgagattcagaggtgactgagaatcatgtgagtgatggctgtatattttgtgtaaaatatatgtgtgaaaatgaactaagagtgagttactcagcactctcaagaattatgcagattctgcatttttcttatgccgtgtgcctaaaaacctacttgatatttattgtggtttcaagattattcatagtatatttatacaatatacttgcaatgcatttaagtacttaaagtactaatttgaaaacttgaagcaagatggcattttaattaatatatttctgttttgcttctgttttatgcaaatataaatcatttttaagtgattgttaaaattgtaatgcattacattttaatctacaaataaacaaagtttaaaaatgatgtttgtttttcacattgattttctttgtatcacctgaactggattgtctttcatttcagtcagcacttagacatttcataataactaaacatcacattccaagtgggatgaattacattaattgaatagagttaccaccgcttcagagtctaaggaaaaatagagtattatggttcaatggtgttcttatgtagtcttatgattcttgaaaaagtacttacagcctcccaagaaaccatgtgtacaattgactgcttgctgattcaatattgtctgcaaagtataaaagactatgatttttaaataaaactgttgtatatatgaaattggatagagcagaggaacctcactgagtgtcctctagttaaaaatctttcatttatcctaccaccagatcagttacatttttaaaacaatgatggatatagcagcaaaataagtgaggtaatacacatgccatatcaattgatttatttcagccagtattctcgctctgctatagatagatgttaataaatggtatcacagcatttaaagtattaaatccactggtgcataaatttttagtcttttaaaatatattcatgaatattgtgtttgtatccctttaaaatgtttaatattttataaataggcagtatatgcacattatacaaaactaaaaaattatgacaattcagtgtgaagtaagttctcatccaacatttctcctggccatccattctccatctttaaaggcaatcaccattgccagtttcttctgtatccttctggaaatacaatatattacataaatgacagcattctatattctctcttctatatcttacctatttctgtgaataatttattttggacagcattttatgtatgaatattcacaaatgtgcttccttatttcagaggctgaactaataaaaattttgtttatttttgtgttgaggcaatatttttatatggtaccctaatctttaatacttaacctgccagactttaaccgtaacacaataatgtattgccaaatagcaccattcttcttctctcactctcttgccatgggggctcttaaaaaaaaaagtatacatctaaggtgtacaacatgctgttttgatgtatataaatatagtgaaagcaaataaagtatatatctaaggtgtacaa

SEQ ID NO: 178 - DNA, 4570 bp, Homo sapiens
tgggggcgtcctccttcgtccccgcccggctgtcaagctgtgttctagcggccgagggaccgaggggggctaagaaagggggcgcccagccatgcagaggcaaaaaggcgctgcggaacggggtccccgtcgccagtgctgaggcaggaggtcggagccacaagtgaggggctgggaagcaggacccagcacgggcgtcttggcaggcggccgggcgcagggccaggctgctggggacgctcagggctttccacccaagccatgggcgctgtcgggcactcgggggtcccctcgtggctccggccactcggcgtgggcattacgttggcttcacatcgccatccagcctcgaagccaacaggactgaaaaatagcttcggccaaacgttctcctcccgctaaggagaggggtcgagtgcgtcagcccgaggggactggagagggatgccctagccctcgaggggcggaggacccgcggttgaaggaggcagcgggagcggagagcgccctccttgaccatcgaatgcctccttctgtgtttccattcctgtcgagtgggctgggccacgctgaccaccctggaggagggacggacgacgctcggcgggctctgaccgtgccgccttcttgtggctgctgactgggatccaggagggagtgggcatggggcgcagccgcgcctccctccctccccgcctcccgggcgccggggttggcgatgtggagacgtgaggggacccgtcggctgctccggcttctccaggactccgccaggcgcccgcgcgtccctcctcacccggaggaggagaggctccgcgcggggctccgaggcgggcggcgcgcggagccggagtcccagcctcgccatgggacataacgggagctggatctctccaaatgccagcgagccgcacaacgcgtccggcgccgaggctgcgggtgtgaaccgcagcgcgctcggggagttcggcgaggcgcagctgtaccgccagttcaccaccaccgtgcaggtcgtcatcttcataggctcgctgctcgagtttggcaacatggaggtcactagaaaacttgataagagcagactgcctgggattgaaacttcatggtgttatggtcaacttgccgcacaaccgtgttcaaatctgtcaccaacaggttcattaaaaacctggcctgctcggggatttgtgccagcctggtctgtgtgcccttcgacatcatcctcagcaccagtcctcactgttgctggtggatctacaccatgctcttctgcaaggtcgtcaaatttttgcacaaagtattctgctctgtgaccatcctcagcttccctgctattgctttggacaggtactactcagtcctctatccactggagaggaaaatatctgatgccaagtcccgtgaactggtgatgtacatctgggcccatgcagtggtggccagtgtccctgtgtttgcagtaaccaatgtggctgacatctatgccacgtccacctgcacggaagtctggagcaactccttgggccacctggtgtacgttctggtgtataacatcaccacggtcattgtgcctgtggtggtggtgttcctcttcttgatactgatccgacgggccctgagtgccagccagaagaagaaggtcatcatagcagcgctccggaccccacagaacaccatctctattccctatgcctcccagcgggaggccgagctgcacgccaccctgctctccatggtgatggtcttcatcttgtgtagcgtgccctatgccaccctggtcgtctaccagactgtgctcaatgtccctgacacttccgtcttcttgctgctcactgctgtttggctgcccaaagtctccctgctggcaaaccctgttctctttcttactgtgaacaaatctgtccgcaagtgcttgatagggaccctggtgcaactacaccaccggtacagtcgccgtaatgtggtcagtacagggagtggcatggctgaggccagcctggaacccagcatacgctcgggtagccagctcctggagatgttccacattgggcagcagcagatctttaagcccacagaggatgaggaagagagtgaggccaagtacattggctcagctgacttccaggccaaggagatatttagcacctgcctggagggagagcaggggccacagtttgcgccctctgccccacccctgagcacagtggactctgtatcccaggtggcaccggcagcccctgtggaacctgaaacattccctgataagtattccctgcagtttggctttgggccttttgagttgcctcctcagtggctctcagagacccgaaacagcaagaagcggctgcttccccccttgggcaacaccccagaagagctgatccagacaaaggtgcccaaggtaggcagggtggagcggaagatgagcagaaacaataaagtgagcatttttccaaaggtggattcctagcaaggattgtaaattcttggaagcaacggggagcttccatattcccaccagagtgtgggaatgctgtggccatgtgattgtatgatctccttgcaactcagtgtgagttgattcctccaatatgggccagatgcttttgaatgatagggaaatctacataaaatccagtgtcctctttattgagggagtatatgtatccatctcagtgatccatgtccttagtgaagtccacattattctctgtggggacaagagctgggcagttttgaatgggtcttgaggtgggtaccccatgtgcactttctgaggatgcctcacttccctgggctctgcagagaacacacagagagaagactttcagagctcacaggagcagggagcaggagcactctaagggaattccaagatcatgatggagcatggtggctccagagaaaatgcctgtttgatgaacttaaacatgtcaaacattttctgttgagaaggtagggatttggtgtcttacactgtttctctggaagccccagtcatatgactcactgtttctcctgatacccttcgtccctttcattgggatgtaggtaaggaatgacgattcctcacctatggtacacatggcgatagatgtgcccgggagtaagggagatattttgtccttgataattctgattttcccttggcatcaccaacgcctcagagagatacacctgcaccctccagtcagggtcagtgttggctggaaaacactgaaaagtcttcgctctgtctttcaccttaaattgtgttttctcaacaaatgagagagaagcttacgggggagatgcctgagagatgcctatggcgctgtagtttttttttcttccctatgatctcacatgaaaggtgctatgtaacaaccagtatgagtcaaatatattgaaaaaatcatcttatgcaaactttaggaattaaaaggtatttttaaaatggagagttagtgtaagctgggtcctttggaaacatcaaactgaaaaggcctgatttggaaaggtgactctgcccaaaaggttggcaagaatctgacaaagatggtttccttccgaggaagactccggaactcaggtgtggccagtctccttttcagtctgtttgtacagctgcggttctctcttaattttggacacagaggaggaacagaacagggagaaataatcattgtagagtgccaaggcaacatctgacccagatgagctcttcacttcctccttccctgtcgttgtagagccagactgggtagaagagggagggcagtgtcctcaactcatcagcctcacaagcaatttgggacccctctggggtggatttcaccaggttgaattagaaccgcagataatacttccctgttagtgaggacaaaccaagcgccagctctgcccttttctctagagtgttgtgttcttgctcttggtacttacaggagctagtctggtgccttgagcaagcttgaagggaagtgggtgtcctcaccagcaaacttccacatctcaactcgtgccctcttttggccacactggccccgtctcttggagggagcccagaccctgtagggagttttgttttcctttcttctcttgggtgtggtgtcttgtgtttctgaatgtgaacccaaagaccctacccctggagaggaagcaccttcctctttgtgttggtctcctcatagcactgtttgctcacagcagaaacggggctgccacagcctcctgcggctctgctgccttctgggccctgcgtgcatggcatctatagctccttgccctgatagtcaatgctgtggcccttcaagcttgtctttcaaagctttcacaatcattacaacttttatcaaggggaataataatctctaggaaaattatgtccactttaggagaatctgtcaagtgtagccactttggtgttgttctgataatatactgtatatgtacaacttaataaattttgatgaggcagaatctggttgggtatgtttcttatatatgtttgaagcagatggctgactactaacaggtcattgccaggtgtatttctatactctttgaagaataacattttaataaaaaa

SEQ ID NO: 179 - DNA, 7029 bp, Homo sapiens
gggtcggaggagacgccagccaaagtaggcggagttgcggaaggagagtccgatctgcgcaatccagtccgggacttggctccgcccgggagcggcggcctctccggtgacagaggagtagtgagcggcacggggtgaggctgcagccaactccgctccccgcgcactcggctgcccaggcgctcggaacccagcagcggcgctcctccgcggtgccggtcgcccgcgatgcccgcttagcagcgtgtagcagcggccagcatcaccacacccgcggcaccgcgctgccggccgcagagccgggccagagccttgcacccctgccccagcccccaccccgccccccgccctgaaatgacttgttaatcggcgcagacaccaccaaggggactcaccgaagtggaatccaagtggaatttggatttggagaagagtttcttgaacatttaccctcttccttgttggttttctttttctttttcttctttttttttttggcttcttttttcctctccccttctccgctcgtcattggagatgaacacatcgcgtttgcatcccagaaagtagtcgccgcgactatttcccccaaagagacaagcacacatgtaggaatgacaaaggcttgcgaaggagagagcgcagcccgcggcccggagagatcccctcgataatggattactaaatgggatacacgctgtaccagttcgctccgagccccggccgcctgtccgtcgatgcaccgaaaagggtgaagtagagaaataaagtctccccgctgaactactatgaggtcagaagccttgctgctatatttcacactgctacactttgctggggctggtttcccagaagattctgagccaatcagtatttcgcatggcaactatacaaaacagtatccggtgtttgtgggccacaagccaggacggaacaccacacagaggcacaggctggacatccagatgattatgatcatgaacggaaccctctacattgctgctagggaccatatttatactgttgatatagacacatcacacacggaagaaatttattgtagcaaaaaactgacatggaaatctagacaggccgatgtagacacatgcagaatgaagggaaaacataaggatgagtgccacaactttattaaagttcttctaaagaaaaacgatgatgcattgtttgtctgtggaactaatgccttcaacccttcctgcagaaactataagatggatacattggaaccattcggggatgaattcagcggaatggccagatgcccatatgatgccaaacatgccaacgttgcactgtttgcagatggaaaactatactcagccacagtgactgacttccttgccattgacgcagtcatttaccggagtcttggagaaagccctaccctgcggaccgtcaagcacgattcaaaatggttgaaagaaccatactttgttcaagccgtggattacggagattatatctacttcttcttcagggaaatagcagtggagtataacaccatgggaaaggtagttttcccaagagtggctcaggtttgtaagaatgatatgggaggatctcaaagagtcctggagaaacagtggacgtcgttcctgaaggcgcgcttgaactgctcagttcctggagactctcatttttatttcaacattctccaggcagttacagatgtgattcgtatcaacgggcgtgatgttgtcctggcaacgttttctacaccttataacagcatccctgggtctgcagtctgtgcctatgacatgcttgacattgccagtgtttttactgggagattcaaggaacagaagtctcctgattccacctggacaccagttcctgatgaacgagttcctaagcccaggccaggttgctgtgctggctcatcctccttagaaagatatgcaacctccaatgagttccctgatgataccctgaacttcatcaagacgcacccgctcatggatgaggcagtgccctccatcttcaacaggccatggttcctgagaacaatggtcagataccgccttaccaaaattgcagtggacacagctgctgggccatatcagaatcacactgtggtttttctgggatcagagaagggaatcatcttgaagtttttggccagaataggaaatagtggttttctaaatgacagccttttcctggaggagatgagtgtttacaactctgaaaaatgcagctatgatggagtcgaagacaaaaggatcatgggcatgcagctggacagagcaagcagctctctgtatgttgcgttctctacctgtgtgataaaggttccccttggccggtgtgaacgatatgggaagtgtaaaaaaacctgtattgcctccagagacccatattgtggatggataaaggaaggtggtgcctgcagccatttatcacccaacagcagactgacttttgagcaggacatagagcgtggcaatacagatggtctgggggactgtcacagtaagtacaattcctttgtggcactgaatgacatttcaactcctctaccagataatgaaatgtcttacaacacagtgtatgggaatgtgggtctctctgggcattccagttccctcttgcccagcacaaccacatcagattcgacggctcaagaggggtatgagtctaggggaggaatgctggactggaagcatctgcttgactcacctgacagcacagaccctttgggggcagtgtcttcccataatcaccaagacaagaaggggcctgtgacgggagtgattcgggaaagttacctcaaaggccacgaccagctggttcccgtcaccctcttggccattgcagtcatcctggctttcgtcatgggggccgtcttctcgggcatcaccgtctactgcgtctgtgatcatcggcgcaaagacgtggctgtggtgcagcgcaaggagaaggagctcacccactcgcgccggggctccatgagcagcgtcaccaagctcagcggcctctttggggacactcaatccaaagacccaaagccggaggccatcctcacgccactcatgcacaacggcaagctcgccactcccggcaacacggccaagatgctcattaaagcagaccagcaccacctggacctgacggccctccccaccccagagtcaaccccaacgctgcagcagaagcggaagcccagccgcggcagccgcgagtgggagaggaaccagaacctcatcaatgcctgcacaaaggacatgccccccatgggctcccctgtgattcccacggacctgcccctgcgggcctcccccagccacatccccagcgtggtggtcctgcccatcacgcagcagggctaccagcatgagtacgtggaccagcccaaaatgagcgaggtggcccagatggcgctggaggaccaggccgccacactggagtataagaccatcaaggaacatctcagcagcaagagtcccaaccatggggtgaaccttgtggagaacctggacagcctgccccccaaagttccacagcgggaggcctccctgggtcccccgggagcctccctgtctcagaccggtctaagcaagcggctggaaatgcaccactcctcttcctacggggttgactataagaggagctaccccacgaactcgctcacgagaagccaccaggccaccactctcaaaagaaacaacactaactcctccaattcctctcacctctccagaaaccagagctttggcaggggagacaacccgccgcccgccccgcagagggtggactccatccaggtgcacagctcccagccatctggccaggccgtgactgtctcgaggcagcccagcctcaacgcctacaactcactgacaaggtcggggctgaagcgtacgccctcgctaaagccggacgtaccccccaaaccatcctttgctcccctttccacatccatgaagcccaatgatgcgtgtacataatcccagggggagggggtcaggtgtcgaaccagcaggcaaggcgaggtgcccgctcagctcagcaaggttctcaactgcctcgagtacccaccagaccaagaaggcctgcggcagagccgaggacgctgggtcctcctctctgggacacaggggtactcacgaaaactgggccgcgtggtttggtgaaggtttgcaacggcggggactcaccttcattctcttccttcactttcccccacaccctacaacaggtcggacccacaaaagacttcagttatcatcacaaacatgagccaaaagcacatacctaccccatcccccacccccacacacacacacacacacacatgcacacaacacatacacacacacgcacagaggtgaacagaaactgaaacattttgtccacaacttcacgggacgtggccagactgggtttgcgttccaacctgcaaaacacaaatacattttttaaaatcaagaaaatttaaaaagacaaaaaaaaaagaattcattgataattctaactcagactttaacaatggcagaagtttactatgcgcaaatactgtgaaatgcccgccagtgttacagctttctgttgcagcagataaatgccatgttgggcaactatgtcatagatttctgctcctcctctcttttaatgaaataacgtgaccgttaacgcaagtaactctttatttattgttcaccctttttttccttaaggaaaggactcttccaaatatcatcctatgaacagctcttcagaaagcccattgaaagttaaactatttaacgtgaaatccattaactggaataattgagtttctttatttttacaataaattcactgagtaaataagttggagctggaattctgagctttgtgtttggactgtctggtctgtagctaaaggaaaaagttaggaggggaatatttatttaaatctatcagttcattgcctggtcaggtctctggcctataaacatgcaaaaaaactaattcatgttaaagtccttccagatcctaatttctaaagcaatcaggagagaaagcttttagaatggcacatcatatctcattgatgccaacatggttttgtccatggttctgactttctgtgaaggcaccagcttgcaatatgccatcccatttcaccttgcatgtgagacagcaaacaaaatccacaaatggtgtgaactaatatgctggctgctaccttgcataaattaatgatttgatcacacgggttcttcgtggggttacatctgtgaatagcctgttttccacatgtaaatttgtgccttacaccttgagttgtgtacacttgtaaactctttatgatcaactgttcccccttttgaaataagtgcagatatttatttaaccctcccttccccaccctctgccccacttccagccctctgaaagattggagtcaagcagatggaagaatgcagtggtgatagttgtcatgcgacagcctgagaacgctgggcagcaccacaccctccaattcacactgccttctagttgtgccaactggaaccaccctttggctgtgctgcgaagcatggaccccagtgttgttgtgggtgtgtcaaatcccctttcatcctcaagagctccctgcttcccttagattatttcaatacggtgatatccttatttgctagcagaaaagggactaacgtcccattcctcttttctgctgcgtccactggctagagagcaggcggtgcgcggttgggcagacacctgggaggagtctccaagccatgtgcacagcacacacgtgcagtgcacacaaagaaatgacatggaaatagatgcaggcaggctggtccctgctgtgattaacgagtaactccaagtacaaggccgaccacaatggatgctgcaaaaacgttgactggggcaaaggattttttattttattttttattttgttaattatgtttttaggggatgggaggtggtgtgtgtttttctcctcttggttttcatttgctcaagcacacaaaagggacttttgtttactctatcatgaacaaaggaactgtccacatactgtaaaccatgagcagtgttgttgttgtttttttaaacagtatatttggtggtctctttgtctgcttttatttccagttcgatcttctgggtttagttttgtctttaaaaagaattcaaaaaaagactgacaatgacagttttgagttggatagtgaaaaagtggagcctccataatcagtgtggttgccttcagacctgagtacttagctgagggtgggtgagagccctttgttccaaaagtccattagttttgctgttgtttaggagtaggtggttgttgttgtttttactttttttttttttggcttttgtaatggaatccatgttcacatcctgtgaactctgtctcctgaaaccctgaagtatttcctagaacctgaaatattgttttcttccttgaattttctctagaaatgcagaaattaggaaggtgatgggtctgtatccccctgcccccttctttcccatgcttgactcccgagagtactggcagtgcagcacccatcattgacgtaagcggctgtcttgtccagtgtttgtaggcatcactgcctcagctgttaaggagacctgtgtcaaaacttacatccacattcctacacccccacaacccatcacttctggtgttaaccctaaaatacccacatgtattgagctggtcttctgcatttaagtatttctccccagtttttttccccactgtgtgtggggggagggtccataaacccgagtgtgcctttgctttccacccttgctagacactggtagatgcaacaaactcagatttatatttgttgtaaagttgtaaaaatattgtgatgtcaccaattttccttccatctccacatcccctaacatctgattcacgacttaatgtatgttgtaagaaaagaaaaaagaaaagaaaaaaagggaaaaaagaaaagcaaggaaaaggctctttattacttaaaagtaataaaacctgactgttctatatta

SEQ ID NO: 180 - DNA, 5790 bp, Homo sapiens
agccgctgcgcccgagctggcctgcgagttcagggctcctgtcgctctccaggagcaacctctactccggacgcacaggcattccccgcgcccctccagccctcgccgccctcgccaccgctcccggccgccgcgctccggtacacacaggatccctgctgggcaccaacagctccaccatggggctggcctggggactaggcgtcctgttcctgatgcatgtgtgtggcaccaaccgcattccagagtctggcggagacaacagcgtgtttgacatctttgaactcaccggggccgcccgcaaggggtctgggcgccgactggtgaagggccccgacccttccagcccagctttccgcatcgaggatgccaacctgatcccccctgtgcctgatgacaagttccaagacctggtggatgctgtgcgggcagaaaagggtttcctccttctggcatccctgaggcagatgaagaagacccggggcacgctgctggccctggagcggaaagaccactctggccaggtcttcagcgtggtgtccaatggcaaggcgggcaccctggacctcagcctgaccgtccaaggaaagcagcacgtggtgtctgtggaagaagctctcctggcaaccggccagtggaagagcatcaccctgtttgtgcaggaagacagggcccagctgtacatcgactgtgaaaagatggagaatgctgagttggacgtccccatccaaagcgtcttcaccagagacctggccagcatcgccagactccgcatcgcaaaggggggcgtcaatgacaatttccagggggtgctgcagaatgtgaggtttgtctttggaaccacaccagaagacatcctcaggaacaaaggctgctccagctctaccagtgtcctcctcacccttgacaacaacgtggtgaatggttccagccctgccatccgcactaactacattggccacaagacaaaggacttgcaagccatctgcggcatctcctgtgatgagctgtccagcatggtcctggaactcaggggcctgcgcaccattgtgaccacgctgcaggacagcatccgcaaagtgactgaagagaacaaagagttggccaatgagctgaggcggcctcccctatgctatcacaacggagttcagtacagaaataacgaggaatggactgttgatagctgcactgagtgtcactgtcagaactcagttaccatctgcaaaaaggtgtcctgccccatcatgccctgctccaatgccacagttcctgatggagaatgctgtcctcgctgttggcccagcgactctgcggacgatggctggtctccatggtccgagtggacctcctgttctacgagctgtggcaatggaattcagcagcgcggccgctcctgcgatagcctcaacaaccgatgtgagggctcctcggtccagacacggacctgccacattcaggagtgtgacaagagatttaaacaggatggtggctggagccactggtccccgtggtcatcttgttctgtgacatgtggtgatggtgtgatcacaaggatccggctctgcaactctcccagcccccagatgaacgggaaaccctgtgaaggcgaagcgcgggagaccaaagcctgcaagaaagacgcctgccccatcaatggaggctggggtccttggtcaccatgggacatctgttctgtcacctgtggaggaggggtacagaaacgtagtcgtctctgcaacaaccccacaccccagtttggaggcaaggactgcgttggtgatgtaacagaaaaccagatctgcaacaagcaggactgtccaattgatggatgcctgtccaatccctgctttgccggcgtgaagtgtactagctaccctgatggcagctggaaatgtggtgcttgtccccctggttacagtggaaatggcatccagtgcacagatgttgatgagtgcaaagaagtgcctgatgcctgcttcaaccacaatggagagcaccggtgtgagaacacggaccccggctacaactgcctgccctgccccccacgcttcaccggctcacagcccttcggccagggtgtcgaacatgccacggccaacaaacaggtgtgcaagccccgtaacccctgcacggatgggacccacgactgcaacaagaacgccaagtgcaactacctgggccactatagcgaccccatgtaccgctgcgagtgcaagcctggctacgctggcaatggcatcatctgcggggaggacacagacctggatggctggcccaatgagaacctggtgtgcgtggccaatgcgacttaccactgcaaaaaggataattgccccaaccttcccaactcagggcaggaagactatgacaaggatggaattggtgatgcctgtgatgatgacgatgacaatgataaaattccagatgacagggacaactgtccattccattacaacccagctcagtatgactatgacagagatgatgtgggagaccgctgtgacaactgtccctacaaccacaacccagatcaggcagacacagacaacaatggggaaggagacgcctgtgctgcagacattgatggagacggtatcctcaatgaacgggacaactgccagtacgtctacaatgtggaccagagagacactgatatggatggggttggagatcagtgtgacaattgccccttggaacacaatccggatcagctggactctgactcagaccgcattggagatacctgtgacaacaatcaggatattgatgaagatggccaccagaacaatctggacaactgtccctatgtgcccaatgccaaccaggctgaccatgacaaagatggcaagggagatgcctgtgaccacgatgatgacaacgatggcattcctgatgacaaggacaactgcagactcgtgcccaatcccgaccagaaggactctgacggcgatggtcgaggtgatgcctgcaaagatgattttgaccatgacagtgtgccagacatcgatgacatctgtcctgagaatgttgacatcagtgagaccgatttccgccgattccagatgattcctctggaccccaaagggacatcccaaaatgaccctaactgggttgtacgccatcagggtaaagaactcgtccagactgtcaactgtgatcctggactcgctgtaggttatgatgagtttaatgctgtggacttcagtggcaccttcttcatcaacaccgaaagggacgatgactatgctggatttgtctttggctaccagtccagcagccgcttttatgttgtgatgtggaagcaagtcacccagtcctactgggacaccaaccccacgagggctcagggatactcgggcctttctgtgaaagttgtaaactccaccacagggcctggcgagcacctgcggaacgccctgtggcacacaggaaacacccctggccaggtgcgcaccctgtggcatgaccctcgtcacataggctggaaagatttcaccgcctacagatggcgtctcagccacaggccaaagacgggtttcattagagtggtgatgtatgaagggaagaaaatcatggctgactcaggacccatctatgataaaacctatgctggtggtagactagggttgtttgtcttctctcaagaaatggtgttcttctctgacctgaaatacgaatgtagagatccctaatcatcaaattgttgattgaaagactgatcataaaccaatgctggtattgcaccttctggaactatgggcttgagaaaacccccaggatcacttctccttggcttccttcttttctgtgcttgcatcagtgtggactcctagaacgtgcgacctgcctcaagaaaatgcagttttcaaaaacagactcagcattcagcctccaatgaataagacatcttccaagcatataaacaattgctttggtttccttttgaaaaagcatctacttgcttcagttgggaaggtgcccattccactctgcctttgtcacagagcagggtgctattgtgaggccatctctgagcagtggactcaaaagcattttcaggcatgtcagagaagggaggactcactagaattagcaaacaaaaccaccctgacatcctccttcaggaacacggggagcagaggccaaagcactaaggggagggcgcatacccgagacgattgtatgaagaaaatatggaggaactgttacatgttcggtactaagtcattttcaggggattgaaagactattgctggatttcatgatgctgactggcgttagctgattaacccatgtaaataggcacttaaatagaagcaggaaagggagacaaagactggcttctggacttcctccctgatccccacccttactcatcacctgcagtggccagaattagggaatcagaatcaaaccagtgtaaggcagtgctggctgccattgcctggtcacattgaaattggtggcttcattctagatgtagcttgtgcagatgtagcaggaaaataggaaaacctaccatctcagtgagcaccagctgcctcccaaaggaggggcagccgtgcttatatttttatggttacaatggcacaaaattattatcaacctaactaaaacattccttttctcttttttcctgaattatcatggagttttctaattctctcttttggaatgtagattttttttaaatgctttacgatgtaaaatatttattttttacttattctggaagatctggctgaaggattattcatggaacaggaagaagcgtaaagactatccatgtcatctttgttgagagtcttcgtgactgtaagattgtaaatacagattatttattaactctgttctgcctggaaatttaggcttcatacggaaagtgtttgagagcaagtagttgacatttatcagcaaatctcttgcaagaacagcacaaggaaaatcagtctaataagctgctctgccccttgtgctcagagtggatgttatgggattctttttttctctgttttatcttttcaagtggaattagttggttatccatttgcaaatgttttaaattgcaaagaaagccatgaggtcttcaatactgttttaccccatcccttgtgcatatttccagggagaaggaaagcatatacacttttttctttcatttttccaaaagagaaaaaaatgacaaaaggtgaaacttacatacaaatattacctcatttgttgtgtgactgagtaaagaatttttggatcaagcggaaagagtttaagtgtctaacaaacttaaagctactgtagtacctaaaaagtcagtgttgtacatagcataaaaactctgcagagaagtattcccaataaggaaatagcattgaaatgttaaatacaatttctgaaagttatgttttttttctatcatctggtataccattgctttatttttataaattattttctcattgccattggaatagatatctcagattgtgtagatatgctatttaaataatttatcaggaaatactgcctgtagagttagtatttctatttttatataatgtttgcacactgaattgaagaattgttggttttttcttttttttgttttgtttttttttttttttttttttgcttttgacctcccatttttactatttgccaatacctttttctaggaatgtgcttttttttgtacacatttttatccattttacattctaaagcagtgtaagttgtatattactgtttcttatgtacaaggaacaacaataaatcatatggaaatttatatttata

SEQ ID NO: 181 - DNA, 3847 bp, Homo sapiens
ggccgaggagcagatgccgcgggggccgctcgcagccgccgctgacttgtgaatgggaccgggactggggccgggactgacaccgcagcgcttgccctgcgccagggactggcggctcggaggttgcgtccaccctcaagggccccagaaatcactgtgttttcagctcagcggccctgtgacattccttcgtgttgtcatttgttgagtgaccaatcagatgggtggagtgtgttacagaaattggcagcaagtatccaatgggtgaagaagagaagctaactggggacgtgggcagccctgacgtgatgagctcaaccagcagagacattccatcccaagagaggtctgcgtgacgcgtccgggaggccaccctcagcaagaccaccgtacagttggtggaaggggtgacagctgcattctcctgtgcctaccacgtaaccaaaaatgaaggagaactactgtttacaagccgccctggtgtgcctgggcatgctgtgccacagccatgcctttgccccagagcggcgggggcacctgcggccctccttccatgggcaccatgagaagggcaaggaggggcaggtgctacagcgctccaagcgtggctgggtctggaaccagttcttcgtgatagaggagtacaccgggcctgaccccgtgcttgtgggcaggcttcattcagatattgactctggtgatgggaacattaaatacattctctcaggggaaggagctggaaccatttttgtgattgatgacaaatcagggaacattcatgccaccaagacgttggatcgagaagagagagcccagtacacgttgatggctcaggcggtggacagggacaccaatcggccactggagccaccgtcggaattcattgtcaaggtccaggacattaatgacaaccctccggagttcctgcacgagacctatcatgccaacgtgcctgagaggtccaatgtgggaacgtcagtaatccaggtgacagcttcagatgcagatgaccccacttatggaaatagcgccaagttagtgtacagtatcctcgaaggacaaccctatttttcggtggaagcacagacaggtatcatcagaacagccctacccaacatggacagggaggccaaggaggagtaccacgtggtgatccaggccaaggacatgggtggacatatgggcggactctcagggacaaccaaagtgacgatcacactgaccgatgtcaatgacaacccaccaaagtttccgcagaggcgtataccagatgtctgtgtcagaagcagccgtccctggggaggaagtaggaagagtgaaagctaaagatccagacattggagaaaatggcttagtcacatacaatattgttgatggagatggtatggaatcgtttgaaatcacaacggactatgaaacacaggagggggtgataaagctgaaaaagcctgtagattttgaaaccaaaagagcctatagcttgaaggtagaggcagccaacgtgcacatcgacccgaagtttatcagcaatggccctttcaaggacactgtgaccgtcaagatctcagtagaagatgctgatgagccccctatgttcttggccccaagttacatccacgaagtccaagaaaatgcagctgctggcaccgtggttgggagagtgcatgccaaagaccctgatgctgccaacagcccgataaggtattccatcgatcgtcacactgacctcgacagatttttcactattaatccagaggatggttttattaaaactacaaaacctctggatagagaggaaacagcctggctcaacatcactgtctttgcagcagaaatccacaatcggcatcaggaagccaaagtcccagtggccattagggtccttgatgtcaacgataatgctcccaagtttgctgccccttatgaaggtttcatctgtgagagtgatcagaccaagccactttccaaccagccaattgttacaattagtgcagatgacaaggatgacacggccaatggaccaagatttatcttcagcctaccccctgaaatcattcacaatccaaatttcacagtcagagacaaccgagataacacagcaggcgtgtacgcccggcgtggagggttcagtcggcagaagcaggacttgtaccttctgcccatagtgatcagcgatggcggcatcccgcccatgagtagcaccaacaccctcaccatcaaagtctgcgggtgcgacgtgaacggggcactgctctcctgcaacgcagaggcctacattctgaacgccggcctgagcacaggcgccctgatcgccatcctcgcctgcatcgtcattctcctgggttgcccaagcttaatggaacccccctctcccagggaagacatgagattgctttatctgggcttccagctgatgctattttcctatgttaaagtaaacagaagattttgtcttctgggggtctttataaaacttcctttcctctatgtggtggctacagagagtccaaccacacttacgtcattgtagtattgtttgtgaccctgagaaggcaaaagaaagaaccactcattgtctttgaggaagaagatgtccgtgagaacatcattacttatgatgatgaagggggtggggaagaagacacagaagcctttgatattgccaccctccagaatcctgatggtatcaatggatttatcccccgcaaagacatcaaacctgagtatcagtacatgcctagacctgggctccggccagcgcccaacagcgtggatgtcgatgacttcatcaacacgagaatacaggaggcagacaatgaccccacggctcctccttatgactccattcaaatctacggttatgaaggcaggggctcagtggccgggtccctgagctccctagagtcggccaccacagattcagacttggactatgattatctacagaactggggacctcgttttaagaaactagcagatttgtatggttccaaagacacttttgatgacgattcttaacaataacgatacaaatttggccttaagaactgtgtctggcgttctcaagaatctagaagatgtgtaaacaggtatttttttaaatcaaggaaaggctcatttaaaacaggcaaagttttacagagaggatacatttaataaaactgcgaggacatcaaagtggtaaatactgtgaaataccttttctcacaaaaaggcaaatattgaagttgtttatcaacttcgctagaaaaaaaaaacacttggcatacaaaatatttaagtgaaggagaagtctaacgctgaactgacaatgaagggaaattgtttatgtgttatgaacatccaagtctttcttcttttttaagttgtcaaagaagcttccacaaaattagaaaggacaacagttctgagctgtaatttcgccttaaactctggacactctatatgtagtgcatttttaaacttgaaatatataatattcagccagcttaaacccatacaatgtatgtacaatacaatgtacaattatgtctcttgagcatcaatcttgttactgctgattcttgtaaatctttttgcttctactttcatcttaaactaatacgtgccagatataactgtcttgtttcagtgagagacgccctatttctatgtcatttttaatgtatctatttgtacaattttaaagttcttattttagtatacgtataaatatcagtattctgacatgtaagaaaatgttacggcatcacacttatattttatgaacattgtactgttgctttaatatgagcttcaatataagaagcaatctttgaaataaaaaaagatttttttttaaaaaaaa

SEQ ID NO: 182 - DNA, 3024 bp, Homo sapiens
atggaagttttcccctttctcttggttttgtccgtctggtggtctcgaacctgggactcggcgaatgcggattcgatcattcacatcggagcaatttttgatgaatctgccaaaaaggatgatgaggtatttcgcactgcggttggtgaccttaaccagaatgaggagatcttacagactgagaaaatcacattttcagtgacgtttgttgatggcaacaaccctttccaagcagttcaagaagcctgtgaacttatgaatcaaggcatcttggccctggtcagctccattggctgcacgtcagcaggatccctccagtctttggcagacgccatgcatatcccccacctcttcattcagcgctcaacagctgggaccccaaggagtggctgtggactcacccggagcaacaggaatgatgactacactctctcagttcgcccacctgtctacttgcatgatgttatcctaagagtggtcacagagtatgcctggcagaaattcattatattctatgatagtgaatacgatatccgtggaatacaggagttcttggacaaagtctctcagcagggaatggatgttgcacttcagaaggtagaaaacaacatcaataaaatgattaccactctctttgacaccatgagaatagaagaactgaatcgctatcgagacactcttaggcgagcgatccttgttatgaatcctgctacagccaaatccttcattactgaggttgtggagactaatttggttgcttttgactgtcactggatcattataaatgaggaaataaacgatgtggacgtacaggaacttgtaagaaggtcaattggaaggttaacgattattcggcagacatttccagttccccagaacataagtcagcggtgtttccgtggcaaccatcgaatatcttcaacattgtgtgatccaaaggatccatttgctcagaatatggagatttccaacctttacatatatgacacggtgcttctgcttgctaatgcttttcataagaagctggaggaccgaaagtggcacagcatggcaagtctgtcatgtatcagaaagaactcaaagccctggcagggtgggcgctccatgttggagaccatcaagaagggtggagttagtgggttgactggagagctagaatttggagaaaatggaggcaatcccaatgtccactttgaaatccttggaaccaactatggagaagagcttggcagaggtgttcgaaaacttggttgctggaatcctgtcacaggtctgaatgggtcactgactgacaagaaattggagaataacatgcgtggagtggttctacgtgtagtaactgttctggaagaaccttttgtgatggtctctgaaaatgtcttgggtaagccgaagaaataccagggcttctccattgatgttttggatgccttatctaactacctgggttttaactacgaaatttacgtagcaccggatcacaaatacggaagcccacaagaagatgggacatggaatggcttggtaggagaacttgtctttaagagagccgacatagggatttctgctttaaccatcactccagatcgtgaaaatgtggtggactttacgacacgttacatggactactcagtgggggtactacttcgaagggctgaaaagacagtggatatgtttgcctgtcttgcaccatttgatctctctctatgggcttgcattgctggcacagtccttctggtgggtctactggtctacctcttgaactggcttaatcccccacgattacaaatgggatcaatgacgtctactactctctacaactccatgtggtttgtgtatggatcttttgtacaacaaggcggggaagtcccgtacacgactctggctacccgaatgatgatgggggcttggtggctatttgctttgattgttatctcatcttacacggcaaacctcgctgctttcctcactattacacgcattgaaagttccatccagtctctccaggacctttccaagcaaacagaaatcccttatggcacagtcctagactctgcggtatatgagcatgtccgcatgaaaggactgaatccttttgagagggacagcatgtattcccaaatgtggcggatgatcaaccgaagcaatggatcggagaacaatgttctggagtcccaggcaggcattcaaaaggtaaaatatggaaattatgctttcgtatgggatgcagctgtattggaatatgtggctatcaatgacccagattgttccttttacaccattggaaatactgttgctgatcggggatatggaattgcattacaacatggcagtccttaccgagatgttttttcacaaaggatcctggagcttcagcagaatggtgacatggacatcctgaagcacaaatggtggcctaagaatggccagtgtgacctgtactcgtcagtggacacaaagcagaaaggaggcgccctggacataaagagctttgcaggggtcttttgtatcctggctgctggaattgtcctctcctgcttcatagccatgctggagacgtggtggaacaagaggaaaggctcccgggttccatcaaaagaggatgacaaggaaattgacctggagcacctccatagacgtgtaaatagcttgtgcacagatgacgacagcccccataaacagttttccacctcgtcaattgatttgacccctctggacattgacactttgccaacacgacaagcactggagcaaatcagtgatttcaggaacactcatattaccacaacaacctttatcccagagcagatccagactcttagccgcacactgtcagctaaagctgcttctggtttcacttttggcaacgtgcctgagcaccgaactggcccttttaggcacagggcacctaatgggggctttttcaggagtcctataaaaacaatgtcatctattccttatcaaccaactcctaccctggggctcaatctgggtaatgatccagaccgaggcacctccatatga

SEQ ID NO: 183 - DNA, 9651 bp, Homo sapiens
ggtttgtaatgatagggcggcagcagcagcagcagcagcagtggtggaacgaggaggtggagaattgagagcacgatgcatacacaggtgtttctgagtagtaattagatcgctgtgaaggaaaaagcacacctttgagttttcacctgtgaacactatagcgctgagagagacagtctgaaagcagaggaagacatcgatcagtaacaccaagagacaccaaagttgaaagttttgttttctttccctctgttttatttttcccccgtgtgtccctactatggtcagaaagcctgttgtgtccaccatctccaaaggaggttacctgcagggaaatgttaacgggaggctgccttccctgggcaacaaggagccacctgggcaggagaaagtgcagctgaagaggaaagtcactttactgaggggagtctccattatcattggcaccatcattggagcaggaatcttcatctctcctaagggcgtgctccagaacacgggcagcgtgggcatgtctctgaccatctggacggtgtgtggggtcctgtcactatttggagctttgtcttatgctgaattgggaacaactataaagaaatctggaggtcattacacatatattttggaagtctttggtccattaccagcttttgtacgagtctgggtggaactcctcataatacgccctgcagctactgctgtgatatccctggcatttggacgctacattctggaaccattttttattcaatgtgaaatccctgaacttgcgatcaagctcattacagctgtgggcataactgtagtgatggtcctaaatagcatgagtgtcagctggagcgcccggatccagattttcttaaccttttgcaagctcacagcaattctgataattatagtccctggagttatgcagctaattaaaggtcaaacgcagaactttaaagacgccttttcaggaagagattcaagtattacgcggttgccactggctttttattatggaatgtatgcatatgctggctggttttacctcaactttgttactgaagaagtagaaaaccctgaaaaaaccattccccttgcaatatgtatatccatggccattgtcaccattggctatgtgctgacaaatgtggcctactttacgaccattaatgctgaggagctgctgctttcaaatgcagtggcagtgaccttttctgagcggctactgggaaatttctcattagcagttccgatctttgttgccctctcctgctttggctccatgaacggtggtgtgtttgctgtctccaggttattctatgttgcgtctcgagagggtcaccttccagaaatcctctccatgattcatgtccgcaagcacactcctctaccagctgttattgttttgcaccctttgacaatgataatgctcttctctggagacctcgacagtcttttgaatttcctcagttttgccaggtggctttttattgggctggcagttgctgggctgatttatcttcgatacaaatgcccagatatgcatcgtcctttcaaggtgccactgttcatcccagctttgttttccttcacatgcctcttcatggttgccctttccctctattcggacccatttagtacagggattggcttcgtcatcactctgactggagtccctgcgtattatctctttattatatgggacaagaaacccaggtggtttagaataatgtcggagagaaaataaccagaacattacaaataatactggaagttgtaccagaagaagataagttatgaactaatggacttgagatcttggcaatctgcccaaggggagacacaaaatagggatttttacttcattttctgaaagtctagagaattacaactttggtgataaacaaaaggagtcagttatttttattcatatattttagcatattcgaactaatttctaagaaatttagttataactctatgtagttatagaaagtgaatatgcagttattctatgagtcgcacaattcttgagtctctgatacctacctattggggttaggagaaaagactagacaattactatgtggtcattctctacaacatatgttagcacggcaaagaaccttcaaattgaagactgagatttttctgtatatatgggttttgtaaagatggttttacacactatagatgtctatactgtgaaaagtgttttcaattctgaaaaaaagcatacatcatgattatggcaaagaggagagaaagaaatttattttacattgacattgcattgcttccccttagataccaatttagataacaaacactcatgctttaatggattatacccagagcactttgaacaaaggtcagtggggattgttgaatacattaaagaagagtttctaggggctactgtttatgagacacatccaggagttatgtttaagtaaaaatccttgagaatttattatgtcagatgttttttcattcattatcaggaagttttagttatctgtcatttttttttttcacatcagtttgatcaggaaagtgtataacacatcttagagcaagagttagtttggtattaaatcctcattagaacaaccacctgtttcactaataacttacccctgatgagtctatctaaacatatgcattttaagccttcaaattacattatcaacatgagagaaatcaccaacaaagaagatgttcaaaataatagtcccatatctgtaatcatatctacatgcaatgttagtaattctgaagttttttaaatttatggctatttttacacgatgatgaattttgacagtttgtgcattttctttatacattttatattcttctgttaaaatatctcttcagatgaaactgtccagattaattaggaaaaggcatatattaacataaaaattgcaaaagaaatgtcgctgtaaataagatttacaactgatgtttctagaaaatttccacttctatatctaggctttgtcagtaatttccacaccttaattatcattcaacttgcaaaagagacaactgataagaagaaaattgaaatgagaatctgtggataagtgtttgtgttcagaagatgttgttttgccagtattagaaaatactgtgagccgggcatggtggcttacatctgtaatcccagcactttgggaggctgagggggtggatcacctgaggtcgggagttctagaccagcctgaccaacatggagaaaccccatctctactaaaaatacaaaattagctgggcatggtggcacatgctggtaatctcagctattgaggaggctgaggcaggagaattgcttgaacccgggaggcggaggttgcagtgagccaagattgcaccactgtactccagcctgggtgacaaagtcagactccatctccaaaaaaaaaagattatatatatatatatatgtgtgtgtatgtgtgtgtgtgtgtgtgtgtgtatatatatatatatatatatacacacacacacacacactttttatatatatatatatatatatatagtggaacttacaaatgagagtaatataatgatgaaattttgaactgttatttataaacatctaaggtaaaatggttagtcatggccagagtatgtttcatcctttaatttttgtccatttgaaaataaggatttttgaaagaattataccaattaaaattattaaaggcaaacatagaattcataaaaaattgtccaaagtagaaatgatgacctataatttggagcatttccaattcagtaatttcaattttgctcttgaaaacatttaatatatatccaagactgacatttctttagctgaacctaacgtttgggtctctgagtgaatttataataactccttccttccttagcatagggttttcaaaatttgatttataattcctatttccagtaaatattgttcatttgtccacatctctccctatgatatgttgctggaggtaagaatttctttcatattcctattttttttttccccatagactaggctcatagaatttaaacaagcaaattttcctgagctttttcttgccaaatgaaagaagactggtaaattctcatagagaggtttgtgtagttcttggctcttcctggggttaatgtgcttatattcacagtggcaaattggtctcagactttaatttatttatttttgatttgaatttctctttaaaagtatcaatttaaaaggtaactagaattattctttctcattttcaaaagtgatttttgcattattaaatttccctgccattgtaatgccatttcacgcagaaaaaaagtcagccagtaattaagaaaaaaagtgatggagattaagtagtattttggcttatttttaggactcatcatgagaagacacagttcctttaatcaggaaattaatatccataattttcactcaaaattgcagtatgtaaagcagattctcaaaaactctcctgaacacttatttatatatatgtttttatataagtaaaatttttctcatatttttatacgatatgcacacacacacatacatgcacatactacttactacatgttctgtacttgtactttgtaccatgcatattcaaatgtttatatacataagtttattataacataaacagtaaaagtaatgaatactgtttaaaataactaatatagtattttttaatttttgtggggatggattctcaaatacttgtgattttaaaagattctaaagctaaaacacaacttgattttaaaaagaatgattctccttacacaattataaatatttgcagtaaatattttccttataatactgttttgaccccatttaaaaagtattagattatattcctttgatccaatgaaaactgaaccttataaatggttagctgaaagtagaccttattcttgtccttctttagaagagtaaagatttgtcctagggaagatggctgacttcggttcccaacatgcgtatgcatttagactgtagctcctcagccctgtggacacaaaatttggacagcttattaggttacgttagcaatgcatgacggtttctccaacactaagatattcacgttgaaacagatttcctgttcgtcttatgtgtctggtaaaattgtttccccaattacaatttgacatatcaatagagggttaacaagagtataattacataacagaattcctcatgaactgtaatcagtctacaggaaaatcattattttatcttgatttgcagatgaatatactgctaagaaagggagcaactctgacctttgttaaagttgatcttttgtaattgaggtataaggtatgaaaagataaaaaaccgaaggccagagaatcaggaaatgaaagatagtatggactgaaggtaacaatattttaatgttatgcaatatagtcagagaaatattaaaaattagttgtttgctgtgcataggtggatctcgcaggaagctaatgaaacctaagcttcagtgcctctcacttagacatgttccattcgaggtcctgaacctaactttgtattaggaattctgtactaattttgttgaagaagaccagcaaagttgtgtacacttctacccccacaaaatctgcattgtccatgtgagtaaagtaaaataattcctgttatttttttctgttagaaataagtatggaggatatgtttttaaaaatttatgagttaattgaaatatccatatataacaagtgactttctcacaatatatatgatgtgatatatagggagatagtttcactttcatcatattttatacgttgattctgaactatagaaaaataataaatgggattttaattatagctcttagttgggaaagaaatatagagagatgtgggatttgaatgcccatgaaagacattttattttacttgaatatattcttgcttcactttaccctccataatatgttgtacattagtgctgatcaagtttacagagttacattttgctttcctaaccattcagtcaggaattaaaatatggcattgtataacaactgggaagaagctcatagtggatataaattagagtagataatgggtcaccttgatagcctctgtttacattacttgtatatgggcaaaataattattacctatacgtgtatttaagcttaattttcatataaacagtatttttaatctatgttaaaatagataatatctaaaagtgtgatctctaggtagtccttagtttattagtactgtacttcaaaaagatttttaaataggtccggcacggtggctcatgcctgtaatcccagcactttgggaggctgaggcgggcgaatcacctgaggtcaggagttcgagatcagcctggccaacatggtgaaaccctgtctcaactaaaaatataaaaattagccgggcgtggtggcaggcgcctgtaatcccagctactcgggaggctgaggcaggagaatcacttgaacccaaggggcagaagctgcagttagccaagatcgcatcattgcactccagcctaggggacaagagcgcgagacttcatctcaaaaaaaaaaaaaaaaaaaaaaaaagatttttaaataatagctaaaggtatgctctctaggtcatccttagtttattagtactgtacttaaaaattattttttaatagtcaattttgggagataattatttctttccttatattttccaattagttggtgtctaaaaataaatgttttgtctaattttagatcaggtatacattcacaaaagcataaatcatagtctcacaggaaattcaccaattttccatatgtcgtgagataactgtcctttctacaacctcataacaatgaatttatataattacctagattttcttagtgtgaatctacccattagttttattttcttggtagttatttttttccctcctctctgttactattggccttaaaatacacagaggacggttacagtgtcctaatagctgttacatgtgtgtgtttcagcgtacttgaatcaagtgtacatttatagtaccaataaccgcctttacagctttacagttaacaattctctcacaaaactgtagagcattaggcatctgagagccatagagggccaactttgttccagagtgaacatgctttttttcctcaacatatacactactgattttttttaaaagtatgactttcaagtgaattaatgtattggttaggagaactgcttgctaagtccttattacctcttgttaaagcctcagaaggccgtgctgaaagccagaggggaaaaaaagagtaatgcacaggtatctcttttgcagtggtgactgtattttgagtaccttgtgtgacagggtattattacagcatcttgtgggaaaacctattaggcctttgcatgttaaagctgtataatttgttgggttgtgagtggtctgacttaaatgtgtattataaaatttagacatcaaattttcctactaactaactttattagatgcatacttggaagcacagtcatatcacactgggaggcaatgcaatgtggttacctggtcctaggtttgaactgtcttatttcaaaagatttctgaattaatttttccctagaatttctccttcattccaaagtacaaacatactttgaagaatgaaacagattgttcccatgaatgtatgctcatactcgactagaaacgatctatgttaaatgactgtgtatatgaattatttcaagtactaccccaaataactttcttattgctctgaaagaagaaaagcaatgtaaatcactatgattattgcacaaacaaccagaattctccaacaattttaagtaatctgatcctcttcttggagaaaattgttacctaatagtttttccttatgaatgttattactactggtataaatcaaatttctataaatttcctacttaagtcttaagaactgggttcttcctttgatgttattcatgttcagaaaggaaacaacactttactcttttaggacaattcctagaatctatagtagtatcaggatatattttgctttaaaatatattttggttattttgaatacagacattggctccaaattttcatctttgcacaatagtatgacttttcactagaacttctcaacatttgggaactttgcaaatatgagcatcatatgtgttaaggctgtatcatttaatgctatgagatacattgttttctccctatgccaaacaggtgaacaaacgtagttgttttttactgatactaaatgttggctacctgtgattttatagtatgcacatgtcagaaaaaggcaagacaaatggcctcttgtactgaatacttcggcaaacttattgggtcttcattttctgacagacaggatttgactcaatatttgtagagcttgcgtagaatggattacatggtagtgatgcactggtagaaatggtttttagttattgactcagaattcatctcaggatgaatcttttatgtctttttattgtaagcatatctgaatttactttataaagatggttttagaaagctttgtctaaaaatttggcctaggaatggtaacttcattttcagttgccaaggggtagaaaaataatatgtgtgttgttatgtttatgttaacatattattaggtactatctatgaatgtatttaaatatttttcatattctgtgacaagcatttataatttgcaacaagtggagtccatttagcccagtgggaaagtcttggaactcaggttacccttgaaggatatgctggcagccatctctttgatctgtgcttaaactgtaatttatagaccagctaaatccctaacttggatctggaatgcattagttatgaccttgtaccattcccagaatttcaggggcatcgtgggtttggtctagtgattgaaaacacaagaacagagagatccagctgaaaaagagtgatcctcaatatcctaactaactggtcctcaactcaagcagagtttcttcactctggcactgtgatcatgaaacttagtagaggggattgtgtgtattttatacaaatttaatacaatgtcttacattgataaaattcttaaagagcaaaactgcattttatttctgcatccacattccaatcatattagaactaagatatttatctatgaagatataaatggtgcagagagactttcatctgtggattgcgttgtttcttagggttcctagcactgatgcctgcacaagcatgtgatatgtgaaataaaatggattcttctatagctaaatgagttccctctggggagagttctggtactgcaatcacaatgccagatggtgtttatgggctatttgtgtaagtaagtggtaagatgctatgaagtaagtgtgtttgttttcatcttatggaaactcttgatgcatgtgcttttgtatggaataaattttggtgcaatatgatgtcattcaactttgcattgaattgaattttggttgtatttatatgtattatacctgtcacgcttctagttgcttcaaccattttataaccatttttgtacatattttacttgaaaatattttaaatggaaatttaaataaacatttgatagtttacataataaa

SEQ ID NO: 184 - DNA, 4884 bp, Homo sapiens
agtggcgtcggaactgcaaagcacctgtgagcttgcggaagtcagttcagactccagcccgctccagcccggcccgacccgaccgcacccggcgcctgccctcgctcggcgtccccggccagccatgggcccttggagccgcagcctctcggcgctgctgctgctgctgcagaggtctcctcttggctctgccaggagccggagccctgccaccctggctttgacgccgagagctacacgttcacggtgccccggcgccacctggagagaggccgcgtcctgggcagagtgaattttgaagattgcaccggtcgacaaaggacagcctatttttccctcgacacccgattcaaagtgggcacagatggtgtgattacagtcaaaaggcctctacggtttcataacccacagatccatttcttggtctacgcctgggactccacctacagaaagttttccaccaaagtcacgctgaatacagtggggcaccaccaccgccccccgccccatcaggcctccgtttctggaatccaagcagaattgctcacatttcccaactcctctcctggcctcagaagacagaagagagactgggttattcctcccatcagctgcccagaaaatgaaaaaggcccatttcctaaaaacctggttcagatcaaatccaacaaagacaaagaaggcaaggttttctacagcatcactggccaaggagctgacacaccccctgttggtgtctttattattgaaagagaaacaggatggctgaaggtgacagagcctctggatagagaacgcattgccacatacactctcttctctcacgctgtgtcatccaacgggaatgcagttgaggatccaatggagattttgatcacggtaaccgatcagaatgacaacaagcccgaattcacccaggaggtctttaaggggtctgtcatggaaggtgctcttccaggaacctctgtgatggaggtcacagccacagacgcggacgatgatgtgaacacctacaatgccgccatcgcttacaccatcctcagccaagatcctgagctccctgacaaaaatatgttcaccattaacaggaacacaggagtcatcagtgtggtcaccactgggctggaccgagagagtttccctacgtataccctggtggttcaagctgctgaccttcaaggtgaggggttaagcacaacagcaacagctgtgatcacagtcactgacaccaacgataatcctccgatcttcaatcccaccacgtacaagggtcaggtgcctgagaacgaggctaacgtcgtaatcaccacactgaaagtgactgatgctgatgcccccaataccccagcgtgggaggctgtatacaccatattgaatgatgatggtggacaatttgtcgtcaccacaaatccagtgaacaacgatggcattttgaaaacagcaaaggtttgtatggtacctggcaagatgcagaaactggcatcctcacagctgttcatacccttgtcccctgggcttggattttgaggccaagcagcagtacattctacacgtagcagtgacgaatgtggtaccttttgaggtctctctcaccacctccacagccaccgtcaccgtggatgtgctggatgtgaatgaagcccccatctttgtgcctcctgaaaagagagtggaagtgtccgaggactttggcgtgggccaggaaatcacatcctacactgcccaggagccagacacatttatggaacagaaaataacatatcggatttggagagacactgccaactggctggagattaatccggacactggtgccatttccactcgggctgagctggacagggaggattttgagcacgtgaagaacagcacgtacacagccctaatcatagctacagacaatggttctccagttgctactggaacagggacacttctgctgatcctgtctgatgtgaatgacaacgcccccataccagaacctcgaactatattcttctgtgagaggaatccaaagcctcaggtcataaacatcattgatgcagaccttcctcccaatacatctcccttcacagcagaactaacacacggggcgagtgccaactggaccattcagtacaacgacccaacccaagaatctatcattttgaagccaaagatggccttagaggtgggtgactacaaaatcaatctcaagctcatggataaccagaataaagaccaagtgaccaccttagaggtcagcgtgtgtgactgtgaaggggccgctggcgtctgtaggaaggcacagcctgtcgaagcaggattgcaaattcctgccattctggggattcttggaggaattcttgctttgctaattctgattctgctgctcttgctgtttcttcggaggagagcggtggtcaaagagcccttactgcccccagaggatgacacccgggacaacgtttattactatgatgaagaaggaggcggagaagaggaccaggactttgacttgagccagctgcacaggggcctggacgctcggcctgaagtgactcgtaacgacgttgcaccaaccctcatgagtgtcccccggtatcttccccgccctgccaatcccgatgaaattggaaattttattgatgaaaatctgaaagcggctgatactgaccccacagccccgccttatgattctctgctcgtgtttgactatgaaggaagcggttccgaagctgctagtctgagctccctgaactcctcagagtcagacaaagaccaggactatgactacttgaacgaatggggcaatcgcttcaagaagctggctgacatgtacggaggcggcgaggacgactaggggactcgagagaggcgggccccagacccatgtgctgggaaatgcagaaatcacgttgctggtggtttttcagctcccttcccttgagatgagtttctggggaaaaaaaagagactggttagtgatgcagttagtatagctttatactctctccactttatagctctaataagtttgtgttagaaaagtttcgacttatttcttaaagcttttttttttttcccatcactctttacatggtggtgatgtccaaaagatacccaaattttaatattccagaagaacaactttagcatcagaaggttcacccagcaccttgcagattttcttaaggaattttgtctcacttttaaaaagaaggggagaagtcagctactctagttctgttgttttgtgtatataattttttaaaaaaaatttgtgtgcttctgctcattactacactggtgtgtccctctgccttttttttttttttaagacagggtctcattctatcggccaggctggagtgcagtggtgcaatcacagctcactgcagccttgtcctcccaggctcaagctatccttgcacctcagcctcccaagtagctgggaccacaggcatgcaccactacgcatgactaattttttaaatatttgagacggggtctccctgtgttacccaggctggtctcaaactcctgggctcaagtgatcctcccatcttggcctcccagagtattgggattacagacatgagccactgcacctgcccagctccccaactccctgccattttttaagagacagtttcgctccatcgcccaggcctgggatgcagtgatgtgatcatagctcactgtaacctcaaactctggggctcaagcagttctcccaccagcctcctttttatttttttgtacagatggggtcttgctatgttgcccaagctggtcttaaactcctggcctcaagcaatccttctgccttggccccccaaagtgctgggattgtgggcatgagctgctgtgcccagcctccatgttttaatatcaactctcactcctgaattcagttgctttgcccaagataggagttctctgatgcagaaattattgggctcttttagggtaagaagtttgtgtctttgtctggccacatcttgactaggtattgtctactctgaagacctttaatggcttccctctttcatctcctgagtatgtaacttgcaatgggcagctatccagtgacttgttctgagtaagtgtgttcattaatgtttatttagctctgaagcaagagtgatatactccaggacttagaatagtgcctaaagtgctgcagccaaagacagagcggaactatgaaaagtgggcttggagatggcaggagagcttgtcattgagcctggcaatttagcaaactgatgctgaggatgattgaggtgggtctacctcatctctgaaaattctggaaggaatggaggagtctcaacatgtgtttctgacacaagatccgtggtttgtactcaaagcccagaatccccaagtgcctgcttttgatgatgtctacagaaaatgctggctgagctgaacacatttgcccaattccaggtgtgcacagaaaaccgagaatattcaaaattccaaatttttttcttaggagcaagaagaaaatgtggccctaaagggggttagttgaggggtagggggtagtgaggatcttgatttggatctctttttatttaaatgtgaatttcaacttttgacaatcaaagaaaagacttttgttgaaatagctttactgtttctcaagtgttttggagaaaaaaatcaaccctgcaatcactttttggaattgtcttgatttttcggcagttcaagctatatcgaatatagttctgtgtagagaatgtcactgtagttttgagtgtatacatgtgtgggtgctgataattgtgtattttctttgggggtggaaaaggaaaacaattcaagctgagaaaagtattctcaaagatgcatttttataaattttattaaacaattttgttaaaccat

SEQ ID NO: 185 - DNA, 3720 bp, Homo sapiens
atttgactgtcttttatccaactgcccagaagcaaatgtgttaactcggcgatgccccttcatgcccgggttcttgcagagctctgaggacgcccagacccattttcctggctggatttggagcggctgctgggctgtggacccaggtgtgtggatcgctttacccagaagcttggaaagcgccaatattaacctgcttccaggtacatcacaaggtcaagagagtgtcttgcagccctcttgtttccgtgtatctacaccttcttctcttggccagaaggatatttacgttttggttcacagcatttgaagccaaaagttcagcccttcgaactggtttgctatacaaaacaaaacaaaacaaataaggtaatgaggattgcttattaaactgcttaacaaaatccccgactcttcctcagccctttctcggctccctcctccccaccaaaatgtcaccagctcttgaattacgtggattcgggttggaggagaacttgaaggaaacgtgattaaagggctatgcgagaacgctctctttgctgcccgcggtccggtgggcttcgaagccaatcgtgagaaggaccggttccctccgtgctgcttcctccccgtgcagtgctgggtgtgcgtgtgcgagtgtgagtgcaagtgcgcgcgcgcccgggtgcgagtgtgtgtgagtgtgagcgtgtgtctgtgtgtgcgtgcgcggccgccctgcctctgcccgctccccgggcgcggagccgcgggtttcatggggcgattgcagcgattcccccacccagagcgacctgcgggcagcggcggcagtggcaggagccgcctttccgattccctacgatgcgggtgctgagctatggcaaagggcagcgaagtgacgagcgagacccgcgtacgactgtgaaagccacctggagccaccttgccgggattgtacctgcaggcagaaagtcttcctacgaccgtcttttcccttagaggcaccagaatccctgtaaccattcatccaggtgttgagaagatatgtagcagccgagcacccatcttttgacaccgtcctctgaaatcagctttggagatgctttcactctgtccgtcttctgcagcagccaggcagagtgccgactccttcacagccgtgaggaactcttcaggctccagaagctcttaaacctgatctacaatggaaaaaattcttttttatctgtttctcattggcatagcagtgaaagctcagatctgtccaaagcgttgtgtctgtcagattttgtctcctaatcttgcaaccctttgtgccaagaaagggcttttatttgttccaccaaacattgacagaagaactgtggaactgcggttggcagacaattttgttacaaatattaaaaggaaagattttgccaatatgaccagcttggtggacctgactctatccaggaatacaataagttttattacacctcatgctttcgctgacctacgaaatttgagggctttgcatttgaatagcaacagattgactaaaattacaaatgatatgttcagtggtctttccaatcttcatcatttgatactgaacaacaatcagctgactttaatttcctctacagcgtttgatgatgtcttcgcccttgaggagctggatctgtcctataataatctagaaaccattccttgggatgctgttgagaagatggttagcttgcatacccttagtttggatcacaatatgattgataacattcctaaggggaccttctcccatttgcacaagatgactcggttagatgtgacatcaaataaattgcagaagctaccacctgaccctctctttcagcgagctcaggtactagcaacctcaggaatcataagcccatctacttttgcattaagttttggtggaaaccccttgcattgcaattgtgaattgttgtggttgaggcgtctgtccagagaagatgacttagagacctgtgcttctcctccacttttaactggccgctacttttggtcaattcctgaagaagagtttttgtgtgagcctcctctcattactcgtcatacacatgagatgagagtcctggagggacaaagggcaacactgaggtgcaaagccaggggagaccctgagcctgcaattcactggatttctcctgaagggaagcttatttcaaatgcaacaagatctctggtgtatgataacggaacacttgacattcttatcacaactgtaaaggatacaggtgcttttacctgcattgcttccaatcctgctggggaagcaacacaaatagtggatcttcatataattaagctccctcacttactaaatagtacaaaccatatccatgagcctgatcctggttcttcagatatctcaacttctaccaagtcaggttctaatacaagcagtagtaatggtgatactaaattgagtcaagataaaattgtggtggcagaagctacatcatcaacggcactacttaaatttaattttcaaagaaatatccctggaatacgtatgtttcaaatccagtacaatggtacttatgatgacacccttgtttacagaatgatacctcctacgagcaaaacttttctggtcaataatctggctgctggaactatgtatgacttgtgtgtcttggccatatatgatgatggcatcacttccctcactgccacaagagtcgtgggttgcatccagtttactacggaacaggattatgtgcgttgccatttcatgcagtctcagtttttgggaggcaccatgattattattattggtggaatcattgtagcatctgtgctggtattcatcattattctgatgatccggtataaggtttgcaacaataatgggcaacacaaggtcaccaaggttagcaatgtttattcccaaactaacggggctcaaatacaaggctgtagtgtaacgctgccccagtccgtgtccaaacaagctgtgggacacgaagagaatgcccagtgttgtaaagctaccagtgacaatgtgattcaatcttcagaaacttgttcgagtcaggactcctctaccactacctctgctttgcctccttcctggacttcaagcacttctgtgtcccaaaagcagaaaagaaagactggcacaaagccaagtacagaaccacagaatgaagccgtcacaaatgttgaatcccaaaacactaacaggaacaactcaactgccttgcagttagctagccgtcctcccgattctgtcacagaggggcccacgtctaaaagagcacatataaagccaaatgctttgctgactaatgttgaccagattgtccaggaaacacagaggctggagttaatctgaagagcaccacttctcctctctctcctgaaaaaatttgccactgatatttttactggataaaattcaaaaatgtttcaattcacaaaggctaattgttgaactggtgtcgtagaagaaattgtctacaggagccaaggtgaaagtctctgatgacggcggaactggctccattagaccatggttcatcctcttttaaaaccaaatttttttttcttctggcctacaagtattttttttttaaaaaagaaaaaaagcctacattggcatcaagttctgtatcaatccatcttacattgccatccatgatttaacagactgtagaatcttgaataatctatatcactttaacaaataaatgttttactatgaca

SEQ ID NO: 186 - DNA, 4840 bp, Homo sapiens
acattccggtgggggactctggccagcccgagcaacgtggatcctgagagcactcccaggtaggcatttgccccggtgggacgccttgccagagcagtgtgtggcaggcccccgtggaggatcaacacagtggctgaacactgggaaggaactggtacttggagtctggacatctgaaacttgaaacagccttttgggacctgtccccggacgaggactgcccccctccctcgggcaactactactgatgctgtccaggcatcgcccaaggggaaaggttgcagcggggtcggaaggcgcgggaggagtctggcggtgattgatgggaagggatgaatgaataaaagtacttgtctgatggcagcagagaccccgagcaaacggtggaggctacactgtctggcattctcgcagcgtttcgtcagagccggacccgcctgcagctcaagggaggcgtgctcctctcccagagcaggctggaacccagctgggttccgcctcccgggaaggtggtctccattcgtcgctctgcatctggtttgtcagatccgagagatcaggaaggagtttcgacccgcgctggcgagtcatgagcgccaagtttcccactggcgcgcaaacttgagttacttttgagcgtggatactggcgaagaggctgcgggcggtattagcgtttgcagcgacttggctcgggcagctgacccaagtgtcctgtcttccttcctctgcttgtctctaggctctgaaactgcggagcggccaccggacgccttctggagcaggtagcagcatgcagccgcctccaagtctgtgcggacgcgccctggttgcgctggttcttgcctgcggcctgtcgcggatctggggagaggagagaggcttcccgcctgacagggccactccgcttttgcaaaccgcagagataatgacgccacccactaagaccttatggcccaagggttccaacgccagtctggcgcggtcgttggcacctgcggaggtgcctaaaggagacaggacggcaggatctccgccacgcaccatctcccctcccccgtgccaaggacccatcgagatcaaggagactttcaaatacatcaacacggttgtgtcctgccttgtgttcgtgctggggatcatcgggaactccacacttctgagaattatctacaagaacaagtgcatgcgaaacggtcccaatatcttgatcgccagcttggctctgggagacctgctgcacatcgtcattgacatccctatcaatgtctacaagctgctggcagaggactggccatttggagctgagatgtgtaagctggtgcctttcatacagaaagcctctgtgggaatcactgtgctgagtctatgtgctctgagtattgacagatatcgagctgttgcttcttggagtagaattaaaggaattggggttccaaaatggacagcagtagaaattgttttgatttgggtggtctctgtggttctggctgtccctgaagccataggttttgatataattacgatggactacaaaggaagttatctgcgaatctgcttgcttcatcccgttcagaagacagctttcatgcagttttacaagacagcaaaagattggtggctattcagtttctatttctgcttgccattggccatcactgcatttttttatacactaatgacctgtgaaatgttgagaaagaaaagtggcatgcagattgctttaaatgatcacctaaagcagagacgggaagtggccaaaaccgtcttttgcctggtccttgtctttgccctctgctggcttccccttcacctcagcaggattctgaagctcactctttataatcagaatgatcccaatagatgtgaacttttgagctttctgttggtattggactatattggtatcaacatggcttcactgaattcctgcattaacccaattgctctgtatttggtgagcaaaagattcaaaaactgctttaagtcatgcttatgctgctggtgccagtcatttgaagaaaaacagtccttggaggaaaagcagtcgtgcttaaagttcaaagctaatgatcacggatatgacaacttccgttccagtaataaatacagctcatcttgaaagaagaactattcactgtatttcattttctttatattggaccgaagtcattaaaacaaaatgaaacatttgccaaaacaaaacaaaaaactatgtatttgcacagcacactattaaaatattaagtgtaattattttaacactcacagctacatatgacattttatgagctgtttacggcatggaaagaaaatcagtgggaattaagaaagcctcgtcgtgaaagcacttaattttttacagttagcacttcaacatagctcttaacaacttccaggatattcacacaacacttaggcttaaaaatgagctcactcagaatttctattctttctaaaaagagatttatttttaaatcaatgggactctgatataaaggaagaataagtcactgtaaaacagaacttttaaatgaagcttaaattactcaatttaaaattttaaaatcctttaaaacaacttttcaattaatattatcacactattatcagattgtaattagatgcaaatgagagagcagtttagttgttgcatttttcggacactggaaacatttaaatgatcaggagggagtaacagaaagagcaaggctgtttttgaaaatcattacactttcactagaagcccaaacctcagcattctgcaatatgtaaccaacatgtcacaaacaagcagcatgtaacagactggcacatgtgccagctgaatttaaaatataatacttttaaaaagaaaattattacatcctttacattcagttaagatcaaacctcacaaagagaaatagaatgtttgaaaggctatcccaaaagacttttttgaatctgtcattcacataccctgtgaagacaatactatctacaattttttcaggattattaaaatcttcttctttcactatcgtagcttaaactctgtttggttttgtcatctgtaaatacttacctacatacactgcatgtagatgattaaatgagggcaggccctgtgctcatagctttacgatggagagatgccagtgacctcataataaagactgtgaactgcctggtgcagtgtccacatgacaaaggggcaggtagcaccctctctcacccatgctgtggttaaaatggtttctagcatatgtataatgctatagttaaaatactatttttcaaaatcatacagattagtacatttaacagctacctgtaaagcttattactaatttttgtattatttttgtaaatagccaatagaaaagtttgcttgacatggtgcttttctttcatctagaggcaaaactgctttttgagaccgtaagaacctcttagctttgtgcgttcctgcctaatttttatatcttctaagcaaagtgccttaggatagcttgggatgagatgtgtgtgaaagtatgtacaagagaaaacggaagagagaggaaatgaggtggggttggaggaaacccatggggacagattcccattcttagcctaacgttcgtcattgcctcgtcacatcaatgcaaaaggtcctgattttgttccagcaaaacacagtgcaatgttctcagagtgactttcgaaataaattgggcccaagagctttaactcggtcttaaaatatgcccaaatttttactttgtttttcttttaataggctgggccacatgttggaaataagctagtaatgttgttttctgtcaatattgaatgtgatggtacagtaaaccaaaacccaacaatgtggccagaaagaaagagcaataataattaattcacacaccatatggattctatttataaatcacccacaaacttgttctttaatttcatcccaatcactttttcagaggcctgttatcatagaagtcattttagactctcaattttaaattaattttgaatcactaatattttcacagtttattaatatatttaatttctatttaaattttagattatttttattaccatgtactgaatttttacatcctgataccttttccttctccatgtcagtatcatgttctctaattatcttgccaaattttgaaactacacacaaaaagcatacttgcattatttataataaaattgcattcagtggctttttaaaaaaatgtttgattcaaaactttaacatactgataagtaagaaacaattataatttctttacatactcaaaaccaagatagaaaaaggtgctatcgttcaacttcaaaacatgtttcctagtattaaggactttaatatagcaacagacaaaattattgttaacatggatgttacagctcaaaagatttataaaagattttaacctattttctcccttattatccactgctaatgtggatgtatgttcaaacaccttttagtattgatagcttacatatggccaaaggaatacagtttatagcaaaacatgggtatgctgtagctaactttataaaagtgtaatataacaatgtaaaaaattatatatctgggaggattttttggttgcctaaagtggctatagttactgattttttattatgtaagcaaaaccaataaaaatttaagtttttttaacaactaccttatttttcactgtacagacactaattcattaaatactaattgattgtttaaaagaaatataaatgtgacaagtggacattatttatgttaaatatacaattatcaagcaagtatgaagttattcaattaaaatgccacatttctggtctctggg

SEQ ID NO: 187 - DNA, 2758 bp, Homo sapiens
actaggcagggatgagcaagaggaatggctcacccttgagagctggggtccatagcccaggtcagttctccagctctcccacttaccagccaagacaggaggtgaggattgagatgggatgaacccagcaggcggccatgggttaaaggtcgccatgaatgtaatgtgcccagcacagtgcctgctaaaaggcaacactcccttcctggtctgaagaccaaacaagcagactgtactcaggaaagccagaagaaccttccagctgtctggaccagaaggtgccagcccaggggctgaagaagacgtaatgcccagagcaaaaagcgcctgcagccccctgaagggctgggtgctctggaatagatgagggggcgaaatggggctggggaccagggacggacagggtgggtccagcacctgcctcgcttccgaagggctgctccaacactgaaaaacacccaaccagcttcctttcagaaagactggaatattccaaaacttctcactggaggctccggaggaggtgggctccagctgaaaaggaaatgtggaggcgtgggcgctcccggcctgcatcctgcacctcttacactttggttttcccacagactcctgaagaataggtcagaagaaagggttaaagccttaaaaggggaacaaccattgcggggctcagggaggaggataatgttctttgggctgccgcaccctgatccccggggtcccgaaccctcccgtccctggccaggcctgccagccacagggtgagggcccccttccgccgcaacctgccactctcacaccaatgcgggaccgccttctcttccttccccaccccccaccccaccctgccgtcctttctcccccaatctccgcctctgattggctgagcccccggctccccgctccccctctcctccatccccggtgaaaactgcgggctccgagctgggtgcagcaaccggaggcggcggcgcgtctggaggaggctgcagcagcggaagaccccagtccagatccaggactgagatcccagaaccatgaacctggccatcagcatcgctctcctgctaacagtcttgcaggtctcccgagggcagaaggtgaccagcctaacggcctgcctagtggaccagagccttcgtctggactgccgccatgagaataccagcagttcacccatccagtacgagttcagcctgacccgtgagacaaagaagcacgtgctctttggcactgtgggggtgcctgagcacacataccgctcccgaaccaacttcaccagcaaatacaacatgaaggtcctctacttatccgccttcactagcaaggacgagggcacctacacgtgtgcactccaccactctggccattccccacccatctcctcccagaacgtcacagtgctcagagacaaactggtcaagtgtgagggcatcagcctgctggctcagaacacctcgtggctgctgctgctcctgctctccctctccctcctccaggccacggatttcatgtccctgtgactggtggggcccatggaggagacaggaagcctcaagttccagtgcagagatcctacttctctgagtcagctgaccccctccccccaatccctcaaaccttgaggagaagtggggaccccacccctcatcaggagttccagtgctgcatgcgattatctacccacgtccacgcggccacctcaccctctccgcacacctctggctgtctttttgtactttttgttccagagctgcttctgtctggtttatttaggttttatccttccttttctttgagagttcgtgaagagggaagccaggattggggacctgatggagagtgagagcatgtgaggggtagtgggatggtggggtaccagccactggaggggtcatccttgcccatcgggaccagaaacctgggagagacttggatgaggagtggttgggctgtgcctgggcctagcacggacatggtctgtcctgacagcactcctcggcaggcatggctggtgcctgaagaccccagatgtgagggcaccaccaagaatttgtggcctaccttgtgagggagagaactgagcatctccagcattctcagccacaaccaaaaaaaaataaaaagggcagccctccttaccactgtggaagtccctcagaggccttggggcatgacccagtgaagatgcaggtttgaccaggaaagcagcgctagtggagggttggagaaggaggtaaaggatgagggttcatcatccctccctgcctaaggaagctaaaagcatggccctgctgcccctccctgcctccacccacagtggagagggctacaaaggaggacaagaccctctcaggctgtcccaagctcccaagagcttccagagctctgacccacagcctccaagtcaggtggggtggagtcccagagctgcacagggtttggcccaagtttctaagggaggcacttcctcccctcgcccatcagtgccagcccctgctggctggtgcctgagcccctcagacagccccctgccccgcaggcctgccttctcagggacttctgcggggcctgaggcaagccatggagtgagacccaggagccggacacttctcaggaaatggcttttcccaacccccagcccccacccggtggttcttcctgttctgtgactgtgtatagtgccaccacagcttatggcatctcattgaggacaaagaaaactgcacaataaaaccaagcctctggaatctgt

SEQ ID NO: 188 - DNA, 4378 bp, Homo sapiens
gggtgtgatgcgagcgtcacggtggggatgctgctggctgcgcggcgctgagggccagcgagagcgagagcccgcccggggcggaggacggactcatccggatctggctgcagcgtgggctcggagctcccccttcctctcggtctccctctcggcccccctttatttccttcttgctttgcgtctttaacacctctcgaccctgtcctccccccgccactggaagtcttcccgtctctaaatggaattagtggagcccggagcctctggtgtaacgcacagacatgatccatgggcgcagcgtgcttcacaacagccacactgcagtatgtcaggaacagtcatggagctgttctcattgtttgcctctccttttcctcctttttaccttctggcccctctcttcattcagagatgctggcagagccattccctaaggttgtagcaagtttaatcatcctccatttgtctggggcaaccaagaaaggaacagaaaagcaaaccacctcagaaacacagaagtcagtgcagtgtggaacttggacaaaacatgcagagggaggtatctttacctctcccaactatcccagcaagtatccccctgaccgggaatgcatctacatcatagaagccgctccaagacagtgcattgaactttactttgatgaaaagtactctattgaaccgtcttgggagtgcaaatttgatcatattgaagttcgagatggaccttttggcttttctccaataattggacgtttctgtggacaacaaaatccacctgtcataaaatccagtggaagatttctatggattaaattttttgctgatggagagctggaatctatgggattttcagctcgatacaatttcacacctgaataaaaggcaaactccttagcaggatctacagagtgtttcgtgatctctccttctccatcatctcatctctggatgctgtggtgcccagaacgttgatctaacaccatcttgaagcacacatgctgatctccaggtgcaccacgatttgtgcccttgaaaatgctgtttgctcaatctttctggagaaagtttgccacatattcggacttagtaaattagaactcctaccttgaaacccagatgaaggttcaattttccccaggattcctttcctcaccattctcctatgtgagggacttcttgtattataatcttttaatataatattatattttatgtaatattgtgttaaattatattgttttatgtaatatattattttaaatgttattttatatatgatattaaaagattataattatataatctttttcgataatttattcttgtattacaatctttttattataatagtctccactctccccaaaatattgtgaattcttcagctgaggagttttgctttagtttcttatcgccatggactgggaattaacatgtatttaacacattttgctcaaacaatcaaacagtaaaagctgaagagagcgtattattattcgcccattccgagagaaagttgaagatgactgaagaactaaaaatacataaatgaattaagtaattataaacataaatttcctgtagctccaacatgactttgatctgagtaatagtgttgtgaaatagattactacatgattttcattgcttttatattatatatagtaattaatattcagaatagttgattaactttcttaagtgtcacataatttaaaaatgaaattgctgtttgccccagatatgtttttctgtgttctttttaaatttcagtgaaattttcttatactcccttcattaaatctattatctggtttctaaacctttacctatttaatgtctcttttcctttctttctaaaaagtaactggttaaactacagttttgtcatttatgaaattttttctgttattattgtagggatagtcaatattatcattttaaggatagttaaaacttattttgcaattaatacgtattttacagtacactaatatgcatatatgttgtattttattaaaatattaaaatgttttttaaacaaaaatattgtccgaagctctaaataccagagtattgattttaaagtctgccaagacaataatacaagtaacacaactaagcctttctttaaataataaaacgagtatctaaaatcctgactttaaggaccttggagctttgaaaccattaccagcgtgtgagtttgagatgggcggttccgaaggaattgtggagtctatacaaattatgaaggaaggcaaagctactgctagcgaggctgttgattgcaagtggtacatccgagcacctccacggtccaagatttacttacgattcttggactatgagatgcagaattcaaatgagtgcaagaggaattttgtggctgtgtatgatggaagcagttccgtggaggatttgaaagctaagttctgtagcactgtggctaatgatgtcatgctacgcacgggtcttggggtgatccgcatgtgggcagatgagggcagtcgaaacagccgatttcagatgctcttcacatcctttcaagaacctccttgtgaaggcaacacattcttctgccatagtaacatgtgtattaataatactttggtctgcaatggactccagaactgtgtgtatccttgggatgaaaatcactgtaaagagaagaggaaaaccagcctgctggaccagctgaccaacaccagtgggactgtcattggcgtgacttcctgcatcgtgatcatcctcattatcatctctgtcatcgtacagatcaaacagcctcgtaaaaagtatgtccaaaggaaatcagactttgaccagacagttttccaggaggtatttgaacctcctcattatgagttatgcactctcagagggacaggagctacagctgactttgcagatgtggcagatgactttgaaaattaccataaactgcggaggtcatcttccaaatgcattcatgaccatcactgtggatcacagctgtccagcactaaaggcagccgcagtaacctcagcacaagagatgcttctatcttgacagagatgcccacacagccaggaaaacccctcatcccacccatgaacagaagaaatatccttgtcatgaaacacagctactcgcaagatgctgcagatgcctgtgacatagatgaaatcgaagaggtgccgaccaccagtcacaggctgtccagacacgataaagccgtccagcggttctgcctcattgggtctctaagcaaacatgaatctgaatacaacacaactagggtctagaaagaaaattcaagagaagaactatttatacaaacatggggactgtgaaaagaaaattctatagtgaattgtgaaaagtggacatatttctaaattcattccactgcctttatccaaacttaagaattacagacatttgttattccttcggcaagacatccccgctgcacactgatatgttcatttcgtaatttggttgctggccaccaagtgctccttagtttttaaatacattttgagattaactggaaacttgaagaagaaattagttcccgattaagactatcccaactttatttttattgtcagtttcacttttgtttctatgttgttttatgtctttgttatataattgtacattgtgtgatatgtgaaaaaaaaacacgaatttggatgaaccttgtgttacatgtacattgttttcattatatagacagcttgagaatagtgcgttcctgaatgattttgaacatgctacagtgaaaagtgacagtgtggaccatggaatcaccagctagaggttatggactatacacacctattattatattctgattaaatacaggaaaaagtaacaagtaaaattactagattgcaataaaaaaattcattttttggtctttcctgatgaggaaactgaagagttttagtaacttttttaagattacacaataaacaatgatgaatcaagctttgaagccaacctcaccaaccacaagatcaaccaacactcttcaccaatgtgtaatataaccacgttaatattcaacatagtacgtactgctgaaagaagttgatacttattcatattaaccccgtagttttgtgtttcctcatctgtaaaagtatgtattataacaccttctctccaccttacagcgtgtgaggttcaaatgaccattcattggaagatattttttatatcctataatgcattataaaaataaatcatttttcctaaatcatgtgtagacttcattttatgatcgacatggaacaaaagtatcatctataaagagtaacaatgtagagtaacccccctcagaacttgtccaccataaaatatatgactttccaaatccaa

SEQ ID NO: 189 - DNA, 5341 bp, Homo sapiens
cggctgctcgcgagctgctttctctcctcttccctttccgggtgcacggcgaggagaaagtctctatgcaactaagccccggcgcgcacttggccaggtatgtaccgcgggagcggcgcgttctgcgcggaagcagatgctgctgccgccacggcggcggcggctgccagctcctgagctctgtaactgtcacactgcacctgagctgaacttgaaaagagagtgaaggggcgattgggcgaacgcttttggcagacacagagggtgtttgtagacgtgggggaggagaatctctattaacgccccccaccgtaaccactgcacatcacctccatctctgcaaatacagcccgaggagtagaggcagcagcagctggacccccaaagagagacgtggggcagcggctgtgaccgcatctcctgagctacaacaacaggtcgcctttttgagactcctttggcgggaagggctacttggaaaggaaggtttgaaagagtgagaagggtaggtgtaagggttccctaattcgtcgaaagaattctattgggtgactctcgttcgtcttctctatcctacactccacatactgaccctatattatccagactgtgccggggagaaatcaaaaacacctgtttgaagaaacggctgcacctgtgtgcttatttgtgccagagggtggcctagcccacctgcaggaagagatttggctgggttctgttgagggtgattgttaggacgttgtattttgttgccattattccaaatacctgtcttggagggaaagttgcccttctgagaactgtgactttaccaggagccctatcttggaataagagttacacctctggaccacgtttctcactagtactttgcttgactggaggaagtgggtgacttttggctgcttcggtgacccattgtagacgcctcgttacccttcttccttccgcttcaagtaatcatggcggcgggggtggcagcgtggctgccttttgcaagggcagcggctatcgggtggatgcctgtggcctcggggcctatgccggctcccccgaggcaggagaggaaaaggacccaagatgctctcattgtgctgaatgtgagtggcacccgcttccagacgtggcaggacaccctggaacgttacccagacactctactgggcagttctgagagggactttttctaccacccagaaactcagcagtatttctttgaccgtgacccagacatcttccgccacatcctgaatttctaccgcactgggaagctccactatcctcgccacgagtgcatctctgcttacgatgaagaactggccttctttggcctcatcccggaaatcatcggcgactgctgttatgaggagtacaaggatcgcaggcgagagaacgccgagcgcctgcaggacgacgcggataccgacaccgctggggagagcgccttgcccaccatgactgcaaggcagagggtctggagggccttcgagaacccccacaccagcacgatggccctggtgttctactatgtcacggggtttttcattgccgtctctgtcatcgcgaatgtggtggaaacagtgccgtgcggatcaagcccaggtcacattaaagaactgccctgtggagagcggtatgctgtggccttcttctgcttggacacggcctgcgtcatgatcttcacagttgagtatttgcttcgcctggctgcagcgcctagtcgttaccgttttgtgcgtagtgtcatgagtatcatcgacgtggtggccatcctgccttattacattgggctggtgatgacagacaatgaggacgtcagcggagcctttgtcacactccgagtcttccgggtcttcaggatctttaagttttcccgccactctcaaggcctgcgcatcctggggtacacactgaagagttgtgcctcagaattgggcttcttgcttttctcgctcaccatggctatcatcatcttcgctacagttatgttctacgcagagaaggggtcttcggctagcaagttcaccagcatccctgcagccttctggtataccatcgtcaccatgacaacactagggtatggtgacatggtgccaaaaaccatagcagggaagatttttggttctatctgttcgctgagtggggtcttggtcattgctctacctgttccggtgattgtatccaacttcagtcgcatctaccaccagaatcaacgagcagacaaacgaagggcacaaaagagaaagctagactggccaggatccgggcagccaaaagcggaagcgcaaatgcttacatgcagagcaaacggaatggtttactcagtaatcagctgcagcagtcctcagaggatgagcaggcttttgttagcaaatccggctccagctttgaaacccagcaccaccacctgcttcactgcctggaaaaaaccacgaatcacgagtttgtggacgaacaagtctttgaagaaagctgcatggaagttgcaactgttaatcgtccttcaagtcacagtccttcactgtcttcacaacaaggagtcaccagcacctgctgttcacgacgacacaaaaaaacttttcgcatcccaaatgccaatgtatcaggaagccatcaaggtagtatacaagaactcagcacgattcagatcagatgtgtggagagaacacctctgtctaacagcagccgatccagtttaaatgccaaaatggaagagtgtgttaaactaaactgtgaacaaccttatgtgactacagcaataataagcatcccaacacctccagtaaccacaccagaaggagacgataggccagaatcccctgagtactcaggaggaaatattgtcagagtttctgctttgtaagacaattggaataaggtctaagagaattcgagccctggctgtgaaaagaatctcaacatagaagaaagaagaaacaataaatattctgcagattaatgcagcaaagaaagaaggttggtagtgaaacacaaagcttccaatcttaaggatgtgaataaaaccaccaaatggcatttctagacagtttgacctgttatacagagtaatattctgtggccctttgactttgtgaatgagcacaatgaaatgccgcctactgatgcttcttatgatcagaactcttttttaataaaataaataacataaatcgttgaacataatgttccagttgaatgcaaaacaaaaaaaatatggaaaacattttgataaaattttttcctgttaaaaccatgaacattggctatgatgaagattattacatatgaaaaaaaaactcacacaacatatttgtattgactgaaggaaaccatcataatgcatgctagaattctttgaagcagtgatctcagtttccttatgttgtcttcagaataggcatgataaactataattgtagaaaggggtaatttctgtgcacttacaacaagctgagtgttcatgttccatggtgggctgtgcaaataaactccttttagacctgcagtatttctcatggggatgctcattagtaaatctaaagtgttcagatagttcagtattcattatcgtttaactttgcacctagatactgttacaactgcaataatttgttgtacaactgttgtatcaggaatcaggatttttttgttgttgtactttccagatccttatagatacggtaagagccacattcgtagaaaaacttctggtgtggccaggttttaggtaactttttaatccaaaactattgtgccataaatgtttttcagtaatattttttggtccactgtattcctgtgacacagtgcattatctgttcttgtatttctatagcacctctctattgggtttatcatcatcaacaagactactgtttactgtagttcaagtgactttcctacttttgtatttccaaaaaaaattatcttgtaagtagcttgtcatcaatccccttgtcgaaaactagaaaaaaaggagttgacccatataaattatctctaacgtctttgttgtttatggaaaagcccagatactggatatatcactatgtattttatgaacagaattgactgggactaatatcacaggatcaatcatctcagaatcttacttgatgcattatttattttgctttagatcttgaatacattttgagaataactaatgtggattgaaatgtagagatacactggagtgctttatttagcaatatttgatgaaagcatgctttctacgccattcaggaaggcagcacaaatttatctcagaaaggttcctgtgtattgcaaggtacaattttctccaataaatcaggagaacaggagtttgatgatgcaaagttgatctctgtacatttaagtgaaaagtctttataacttttcacccttaaaatatttcagcagacatgtctgcacatgacagtgtaaaaaagtttaatgtcaaatgcaaagtttttattcattccaagccaccactgtaaggaataaagcttagcttctgtacatggaaagagctaataattatccctctgtcagagatgagatttttaaatgcttatgatatttaatcataaaaagggattaatccaaccattttctagtaaagccagaaattcttgcttcccatttctagaatagtttctagaacagtgctatgcacatattagatcttaataaacatttgctgagtgaaagtaagataaactcaactatctcttgggaagaactggcttcattcctagtacatcttttaaaaagttactaattttccagcagtacaaatattaacaattatattaacacctgcctcatgtcagtttatgcttctagagcaatgtctagtgaaacttatctgatggcatttattgaaaaccttctaaaaagtagactaaggaaaccataatcagaattactatgtcttttgattcccaatgagaagttctattttcatgttcttaatattacatacaagaaaatgcagttaggttatttcaattgacaattctgcctcctcttttgatttatcacttacccaaaattattaattttattaggcttttggaaaagaaaaaaaactttttgatgttttaggtgatttaaaaatataccgtgttggtggtgaatgactattgatgactgtgttaagtgcatctgtattgtaagtgaaatgtaattatttctgtgtaccatatggagtaactaaggtcattgtttttgacaattttgtttgaaattcatatatcttatttcaaaggatagcataatatctgcattatgctggaaaaaaatagacctttggagaatacttaaataaaacatgtgcatgcttgaacaggac

SEQ ID NO: 190 - DNA, 2103 bp, Homo sapiens
ccttcacaggactcttcattgctggttggcaatgatgtatcggccagatgtggtgagggctaggaaaagagtttgttgggaaccctgggttatcggcctcgtcatcttcatatccctgattgtcctggcagtgtgcattggactcactgttcattatgtgagatataatcaaaagaagacctacaattactatagcacattgtcatttacaactgacaaactatatgctgagtttggcagagaggcttctaacaattttacagaaatgagccagagacttgaatcaatggtgaaaaatgcattttataaatctccattaagggaagaatttgtcaagtctcaggttatcaagttcagtcaacagaagcatggagtgttggctcatatgctgttgatttgtagatttcactctactgaggatcctgaaactgtagataaaattgttcaacttgttttacatgaaaagctgcaagatgctgtaggaccccctaaagtagatcctcagtcagttaaaattaaaaaaatcaacaagacagaaacagacagctatctaaaccattgctgcggaacacgaagaagtaaaactctaggtcagagtctcaggatcgttggtgggacagaagtagaagagggtgaatggccctggcaggctagcctgcagtgggatgggagtcatcgctgtggagcaaccttaattaatgccacatggcttgtgagtgctgctcactgttttacaacatataagaaccctgccagatggactgcttcctttggagtaacaataaaaccttcgaaaatgaaacggggtctccggagaataattgtccatgaaaaatacaaacacccatcacatgactatgatatttctcttgcagagctttctagccctgttccctacacaaatgcagtacatagagtttgtctccctgatgcatcctatgagtttcaaccaggtgatgtgatgtttgtgacaggatttggagcactgaaaaatgatggttacagtcaaaatcatcttcgacaagcacaggtgactctcatagacgctacaacttgcaatgaacctcaagcttacaatgacgccataactcctagaatgttatgtgctggctccttagaaggaaaaacagatgcatgccagggtgactctggaggaccactggttagttcagatgctagagatatctggtaccttgctggaatagtgagctggggagatgaatgtgcgaaacccaacaagcctggtgtttatactagagttacggccttgcgggactggattacttcaaaaactggtatctaagagagaaaagcctcatggaacagataacatttttttttgttttttgggtgtggaggccatttttagagatacagaattggagaagacttgcaaaacagctagatttgactgatctcaataaactgtttgcttgatgcatgtattttcttcccagctctgttccgcacataagcatcctgcttctgccagatcaactctgtcatctgtgagcaatagttgaaactttatgtacatagagaaatagataatacaatattacattacagcctgtattcatttgttctctagaagttttgtcagaattttgacttgttgacataaatttgtaatgcatatatacaatttgaagcactccttttcttcagttcctcagctcctctcatttcagcaaatatccattttcaaggtgcagaacaaggagtgaaagaaaatataagaagaaaaaaatcccctacattttattggcacagaaaagtattaggtgtttttcttagtggaatattagaaatgatcatattcattatgaaaggtcaagcaaagacagcagaataccaatcacttcatcatttaggaagtatgggaactaagttaaggaaatccagaaagaagccaagatatatccttattttcatttccaaacaactactatgataaatgtgaagaagattctgtttttttgtgacctataataattatacaaacttcatgcaatgtacttgttctaagcaaattaaagcaaatatttatttaacattgttactgaggatgtcaacatataacaataaaatataaatcaccca

SEQ ID NO: 191 - DNA, 2122 bp, Homo sapiens
acttggatgtagacctcgaccttcacaggactcttcattgctggttggcaatgatgtatcggccagatgtggtgagggctaggaaaagagtttgttgggaaccctgggttatcggcctcgtcatcttcatatccctgattgtcctggcagtgtgcattggactcactgttcattatgtgagatataatcaaaagaagacctacaattactatagcacattgtcatttacaactgacaaactatatgctgagtttggcagagaggcttctaacaattttacagaaatgagccagagacttgaatcaatggtgaaaaatgcattttataaatctccattaagggaagaatttgtcaagtctcaggttatcaagttcagtcaacagaagcatggagtgttggctcatatgctgttgatttgtagatttcactctactgaggatcctgaaactgtagataaaattgttcaacttgttttacatgaaaagctgcaagatgctgtaggaccccctaaagtagatcctcactcagttaaaattaaaaaaatcaacaagacagaaacagacagctatctaaaccattgctgcggaacacgaagaagtaaaactctaggtcagagtctcaggatcgttggtgggacagaagtagaagagggtgaatggccctggcaggctagcctgcagtgggatgggagtcatcgctgtggagcaaccttaattaatgccacatggcttgtgagtgctgctcactgttttacaacatataagaaccctgccagatggactgcttcctttggagtaacaataaaaccttcgaaaatgaaacggggtctccggagaataattgtccatgaaaaatacaaacacccatcacatgactatgatatttctcttgcagagctttctagccctgttccctacacaaatgcagtacatagagtttgtctccctgatgcatcctatgagtttcaaccaggtgatgtgatgtttgtgacaggatttggagcactgaaaaatgatggttacagtcaaaatcatcttcgacaagcacaggtgactctcatagacgctacaacttgcaatgaacctcaagcttacaatgacgccataactcctagaatgttatgtgctggctccttagaaggaaaaacagatgcatgccagggtgactctggaggaccactggttagttcagatgctagagatatctggtaccttgctggaatagtgagctggggagatgaatgtgcgaaacccaacaagcctggtgtttatactagagttacggccttgcgggactggattacttcaaaaactggtatctaagagagaaaagcctcatggaacagataacatttttttttgttttttgggtgtggaggccatttttagagatacagaattggagaagacttgcaaaacagctagatttgactgatctcaataaactgtttgcttgatgcatgtattttcttcccagctctgttccgcacataagcatcctgcttctgccagatcaactctgtcatctgtgagcaatagttgaaactttatgtacatagagaaatagataatacaatattacattacagcctgtattcatttgttctctagaagttttgtcagaattttgacttgttgacataaatttgtaatgcatatatacaatttgaagcactccttttcttcagttcctcagctcctctcatttcagcaaatatccattttcaaggtgcagaacaaggagtgaaagaaaatataagaagaaaaaaatcccctacattttattggcacagaaaagtattaggtgtttttcttagtggaatattagaaatgatcatattcattatgaaaggtcaagcaaagacagcagaataccaatcacttcatcatttaggaagtatgggaactaagttaaggaaatccagaaagaagccaagatatatccttattttcatttccaaacaactactatgataaatgtgaagaagattctgtttttttgtgacctataataattatacaaacttcatgcaatgtacttgttctaagcaaattaaagcaaatatttatttaacattgttactgaggatgtcaacatataacaataaaatataaatcaccca

SEQ ID NO: 192 - DNA, 5752 bp, Homo sapiens
gagaagaaagccagtgcgtctctgggcgcaggggccagtggggctcggaggcacaggcaccccgcgacactccaggttccccgacccacgtccctggcagccccgattatttacagcctcagcagagcacggggcgggggcagaggggcccgcccgggagggctgctacttcttaaaacctctgcgggctgcttagtcacagccccccttgcttgggtgtgtccttcgctcgctccctccctccgtcttaggtcactgttttcaacctcgaataaaaactgcagccaacttccgaggcagcctcattgcccagcggaccccagcctctgccaggttcggtccgccatcctcgtcccgtcctccgccggcccctgccccgcgcccagggatcctccagctcctttcgcccgcgccctccgttcgctccggacaccatggacaagttttggtggcacgcagcctggggactctgcctcgtgccgctgagcctggcgcagatcggtgaaaagagaagaaagtttatttgaatataacctgccgctttgcaggtgtattccacgtggagaaaaatggtcgctacagcatctctcggacggaggccgctgacctctgcaaggctttcaatagcaccttgcccacaatggcccagatggagaaagctctgagcatcggatttgagacctgcaggtatgggttcatagaagggcacgtggtgattccccggatccaccccaactccatctgtgcagcaaacaacacaggggtgtacatcctcacatccaacacctcccagtatgacacatattgcttcaatgcttcagctccacctgaagaagattgtacatcagtcacagacctgcccaatgcctttgatggaccaattaccataactattgttaaccgtgatggcacccgctatgtccagaaaggagaatacagaacgaatcctgaagacatctaccccagcaaccctactgatgatgacgtgagcagcggctcctccagtgaaaggagcagcacttcaggaggttacatcttttacaccttttctactgtacaccccatcccagacgaagacagtccctggatcaccgacagcacagacagaatccctgctaccactttgatgagcactagtgctacagcaactgagacagcaaccaagaggcaagaaacctgggattggttttcatggttgtttctaccatcagagtcaaagaatcatcttcacacaacaacacaaatggctggtacgtcttcaaataccatctcagcaggctgggagccaaatgaagaaaatgaagatgaaagagacagacacctcagtttttctggatcaggcattgatgatgatgaagattttatctccagcaccatttcaaccacaccacgggcttttgaccacacaaaacagaaccaggactggacccagtggaacccaagccattcaaatccggaagtgctacttcagacaaccacaaggatgactgatgtagacagaaatggcaccactgcttatgaaggaaactggaacccagaagcacaccctcccctcattcaccatgagcatcatgaggaagaagagaccccacattctacaagcacaatccaggcaactcctagtagtacaacggaagaaacagctacccagaaggaacagtggtttggcaacagatggcatgagggatatcgccaaacacccaaagaagactcccattcgacaacagggacagctgcagcctcagctcataccagccatccaatgcaaggaaggacaacaccaagcccagaggacagttcctggactgatttcttcaacccaatctcacaccccatgggacgaggtcatcaagcaggaagaaggatggatatggactccagtcatagtataacgcttcagcctactgcaaatccaaacacaggtttggtggaagatttggacaggacaggacctctttcaatgacaacgcagcagagtaattctcagagcttctctacatcacatgaaggcttggaagaagataaagaccatccaacaacttctactctgacatcaagcaataggaatgatgtcacaggtggaagaagagacccaaatcattctgaaggctcaactactttactggaaggttatacctctcattacccacacacgaaggaaagcaggaccttcatcccagtgacctcagctaagactgggtcctttggagttactgcagttactgttggagattccaactctaatgtcaatcgttccttatcaggagaccaagacacattccaccccagtggggggtcccataccactcatggatctgaatcagatggacactcacatgggagtcaagaaggtggagcaaacacaacctctggtcctataaggacaccccaaattccagaatggctgatcatcttggcatccctcttggccttggctttgattcttgcagtttgcattgcagtcaacagtcgaagaaggtgtgggcagaagaaaaagctagtgatcaacagtggcaatggagctgtggaggacagaaagccaagtggactcaacggagaggccagcaagtctcaggaaatggtgcatttggtgaacaaggagtcgtcagaaactccagaccagtttatgacagctgatgagacaaggaacctgcagaatgtggacatgaagattggggtgtaacacctacaccattatcttggaaagaaacaaccgttggaaacataaccattacagggagctgggacacttaacagatgcaatgtgctactgattgtttcattgcgaatcttttttagcataaaattttctactctttttgttttttgtgttttgttctttaaagtcaggtccaatttgtaaaaacagcattgctttctgaaattagggcccaattaataatcagcaagaatttgatcgttccagttcccacttggaggcctttcatccctcgggtgtgctatggatggcttctaacaaaaactacacatatgtattcctgatcgccaacctttcccccaccagctaaggacatttcccagggttaatagggcctggtccctgggaggaaatttgaatgggtccattttgcccttccatagcctaatccctgggcattgctttccactgaggttgggggttggggtgtactagttacacatcttcaacagaccccctctagaaatttttcagatgcttctgggagacacccaaagggtgaagctatttatctgtagtaaactatttatctgtgtttttgaaatattaaaccctggatcagtcctttgatcagtataattttttaaagttactttgtcagaggcacaaaagggtttaaactgattcataataaatatctgtacttcttcgatcttcaccttttgtgctgtgattcttcagtttctaaaccagcactgtctgggtccctacaatgtatcaggaagagctgagaatggtaaggagactcttctaagtcttcatctcagagaccctgagttcccactcagacccactcagccaaatctcatggaagaccaaggagggcagcactgtttttgttttttgttttttgttttttttttttgacactgtccaaaggttttccatcctgtcctggaatcagagttggaagctgaggagcttcagcctcttttatggtttaatggccacctgttctctcctgtgaaaggctttgcaaagtcacattaagtttgcatgacctgttatccctggggccctatttcatagaggctggccctattagtgatttccaaaaacaatatggaagtgccttttgatgtcttacaataagagaagaagccaatggaaatgaaagagattggcaaaggggaaggatgatgccatgtagatcctgtttgacatttttatggctgtatttgtaaacttaaacacaccagtgtctgttcttgatgcagttgctatttaggatgagttaagtgcctggggagtccctcaaaaggttaaagggattcccatcattggaatcttatcaccagataggcaagtttatgaccaaacaagagagtactggctttatcctctaacctcatattttctcccacttggcaagtcctttgtggcatttattcatcagtcagggtgtccgattggtcctagaacttccaaaggctgcttgtcatagaagccattgcatctataaagcaacggctcctgttaaatggtatctcctttctgaggctcctactaaaagtcatttgttacctaaacttatgtgcttaacaggcaatgcttctcagaccacaaagcagaaagaagaagaaaagctcctgactaaatcagggctgggcttagacagagttgatctgtagaatatctttaaaggagagatgtcaactttctgcactattcccagcctctgctcctccctgtctaccctctcccctccctctctccctccacttcaccccacaatcttgaaaaacttcctttctcttctgtgaacatcattggccagatccattttcagtggtctggatttctttttattttcttttcaacttgaaagaaactggacattaggccactatgtgttgttactgccactagtgttcaagtgcctcttgttttcccagagatttcctgggtctgccagaggcccagacaggctcactcaagctctttaactgaaaagcaacaagccactccaggacaaggttcaaaatggttacaacagcctctacctgtcgccccagggagaaaggggtagtgatacaagtctcatagccagagatggttttccactccttctagatattcccaaaaagaggctgagacaggaggttattttcaattttattttggaattaaatacttttttccctttattactgttgtagtccctcacttggatatacctctgttttcacgatagaaataagggaggtctagagcttctattccttggccattgtcaacggagagctggccaagtcttcacaaacccttgcaacattgcctgaagtttatggaataagatgtattctcactcccttgatctcaagggcgtaactctggaagcacagcttgactacacgtcatttttaccaatgattttcaggtgacctgggctaagtcatttaaactgggtctttataaaagtaaaaggccaacatttaattattttgcaaagcaacctaagagctaaagatgtaatttttcttgcaattgtaaatcttttgtgtctcctgaagacttcccttaaaattagctctgagtgaaaaatcaaaagagacaaaagacatcttcgaatccatatttcaagcctggtagaattggcttttctagcagaacctttccaaaagttttatattgagattcataacaacaccaagaattgattttgtagccaacattcattcaatactgttatatcagaggagtaggagagaggaaacatttgacttatctggaaaagcaaaatgtacttaagaataagaataacatggtccattcacctttatgttatagatatgtctttgtgtaaatcatttgttttgagttttcaaagaatagcccattgttcattcttgtgctgtacaatgaccactgttattgttactttgacttttcagagcacacccttcctctggtttttgtatatttattgatggatcaataataatgaggaaagcatgatatgtatattgctgagttgaaagcacttattggaaaatattaaaaggctaacattaaaagactaaaggaaacaga

SEQ ID NO: 193 - DNA, 4064 bp, Homo sapiens
gggcgggcctagcgcgcccggacggagaccaccttgcggccgaccccgctcccccgcctcctcgggagagataaatgctgactccgctcggaaagttctcaactgcaaagtttgctgtccggctgcctagggtctgggaagctcgggcaccctccctctccggggctcctgctcccacccctccggcccccccaccgtcgcgctcctccaggctgggcctgtggccgcggtgctttttaattttcccccagctcagaatcttgctgctcggcccccaggagagcaacaactcaacgggaacgatgtggaaggtgtcagctctgctcttcgttttgggaagcgcgtcgctctgggtcctggcagaaggaggacaatgtgcaaatgacaccgttttgtgctcaccagggcaaagcaagggagcgccctcacttcagcatctcagccctgctaaagaaaaagctgctgggtaacatcctttgtttttgcccagggaagctttagctgtgattcccttcagccggctcctgaatgtcaaagccagcacaggccagccagaagatgacactgagactacaggtttggaaggcggcgttgccatgccaggtgccgaagatgatgtggtgactccaggaaccagcgaagaccgctataagtctggcttgacaactctggtggcaacaagtgtcaacagtgtaacaggcattcgcatcgaggatctgccaacttcagaaagcacagtccacgcgcaagaacaaagtccaagcgccacagcctcaaacgtggccaccagtcactccacggagaaagtggatggagacacacagacaacagttgagaaagtttttttaaagagagaaaagggaatttcttgtatttgaaactaagcaaacctcagatgagtctattcccttaatgtcagatatggggaatggtgtcatatcacagttcatcattactaaggatgaaaataggggccaacttaatagtcatacgtaaacactacccaaaaattaacacttaagccaatgtgaatgttacgttgatagatcctcagacccagaaatcttcccatttgtaaaataggattagactagcccaaattttctccttttggaagaaatgctccatgctcaaacaacatagagcaatatttgctatgtgcagtagggcagtggctttgtttatatgttacatattttatcaccgatgtattttttcctctggggctcatgctttttttctctctcttgttcagatggtttgtcaacagtgaccctggttggaatcatagttggggtcttactagccatcggcttcattggtgcaatcatcgttgtggttatgcgaaaaatgtcgggaaggtactcgtaagtaaatagcttacacccatgtgataggcaaatgaaagccatcgtgtctagaactcaaatctttgaactaatagaaatctctgatataagctgggtgtggtggctcgtgcctgtagtctcagctgctgggcacctgcagaccagcctgggcaacatagtaagaccctgtctcaaaaaaataatctctggtacaatggtcatgttccaaagttccttacttgggcctcttgagtgcagtggctcacacctggaatcccagtgctttgagaggctgaggcaggaggttcacttgtgcccaggaatttgaggctgcagtgagctatgattgtgccactgcactccagcctgggtgacagagcaagactgtgtctcttaaaaataagaaagagcctcttcatcttcaaaaggactacatctgaagtttccccagaaggacaaatgtctacttagaccttataaatttccaaaataagagagtcagagccagaggtggcttgtaagttgacttctgttgagatctgaccacatttgatctcttgttttaattttccaactaactgaacttggaagaaaacccaaaccaagttttaatctgatgcctaatcagcccgtctccaaccatcagagaaaaggcttctagagccctaaagagctgaagggttacgccctgctgccaacgtgcttaaaaaaagaccgtttctgactctgtgccctgtccctgagctcgtgggagaagatgacccgtggaacacttgcctggcccactcagaatccacggtgacctctccgcttgccaaaataaccgaaggaaagaccgttcaccagacttggctcctctaaacatttgctgttcaaacatgtttttgaatatacattctataaaagattatttgaaagacaaaattcatagaaaatggagcaaaactgtataaactgatttgtaactaacactggaccattggatcgatattatatgctgtaaccatgtgtctccgtctgaccattcttgttattgttaaaatgcagaggaatctggaaatatttatatccacggagtccttggatccagtgctacgtcagtaaatagcaccagcattttgcaattgctgatctgctgaaatgtacacattctggtctagtttggtctatcttttaaagcctgatctggtgtgaataatcaactaggaaatctaaacttggataacacgtggtgaacaactgcctttagctggtccagattaatcatttcaaagacatccattttagatcacaagcaggaagtcgatagtctcaaaggcactttgtttctcccaagtaggccaccaggcagcctctagagttgctttacccaaatccttctccagccatgacttggtgactctaagcttgctcccacctgccccctccacttccctcagatgatgaggagccagggctaagggggcagccttctctcttcccagtgatgcacatccttcacattggctgctttgttctggaatatggatatctcagcctggatgccgaggaagctgctggatgcttaatggtgctagaggctcaagtgtgtttgaaaccaagagccagttgtcccccatgcagaaagaaatcctgtgtgagcctctggtatgagaaataaaatctgccagttttataacattcactttctgcctctgaggaaagatacagggaacaaaaatcaatttgtacagtcttaatattaaaagcagcttgactaaatacctgatttaaaaatagaagacatccccagtcctcatgacataccgcaaatatctgtggggtcctgttgaaaagaacaaaataaaggagcccaaggggtcattctgtctcagcaccatccagcctggcacttctcttcccatatatccattggatttttttttttttttcctaaacaaagtttttacactgagcagatgctctgtcatgatggcggttgtgcaattctggtatcctctaaatttgtaagcattcataaaacaggaaaaagtaaactatcattcggaagcacagcccattcctcccattttttgcaatgatgtctggatgttattttaaacagtgtgtctgtgtgttcccaaatccagctggccccaccagctcagattccattttttttgtgtgtgtgtgtgaaacgtagtctgcaactctgcctcccggcaattatacatgtgtcaggatgtcaaaaagcaattctcctgcctcagcctcctgagtagctgggactacaggttcctaccaccacacccggccaatttttgtatttttagtagagatggggtttcaccgtatcggcgaggatgatctctatctcttgacctcgtgatctgcccgcctcggcctcccaaagtgctgggattacaggcgtgtgccactgcgctcggcctcagattccatatttgaacaccagctgattgagagaaggggaatgagaagagctggatgagtttaaataactcattgttcagattcctgaacaggagttgggataatggccatcttttctttcctatcctttcttcccccctcactgtgaaaaataacagtccaccccaagtcatacactggacccagtgcctgcggggacaggactgtgggtttcttggtcacacctgtgttggtgctcaatgcagtgtagacatgttttcaaataaaacaaatgattgtgtacaa

SEQ ID NO: 194 - DNA, 7521 bp, Homo sapiens
gcggccgcgggctcccgctaaccgcagcctccactcctctccccgcgcgccgcgcccccgccccgccccgccccgcccggtctcgccggccgagcgtccgttggtccttgagcgcgtccgacagtctgtctgttcgcgatcctgccggagccccgccgccgccggcttgggattctgaaaccttccttgtatccctcctgagacatctttgctgcaagatcgaggctgtcctctggtgagaaggtggtgaggcttcccgtcatattccagctctgaacagcaacatggggtgcaaagtcctgctcaacattgggcagcagatgctgcggcggaaggtggtggactgtagccgggaggagacgcggctgtctcgctgcctgaacacttttgatctggtggccctcggggtgggcagcacactgggtgctggtgtctacgtcctggctggagctgtggcccgtgagaatgcaggccctgccattgtcatctccttcctgatcgctgcgctggcctcagtgctggctggcctgtgctatggcgagtttggtgctcgggtccccaagacgggctcagcttacctctacagctatgtcaccgttggagagctctgggccttcatcaccggctggaacttaatcctctcctacatcatcggtacttcaagcgtagcgagggcctggagcgccaccttcgacgagctgataggcagacccatcggggagttctcacggacacacatgactctgaacgcccccggcgtgctggctgaaaaccccgacatattcgcagtgatcataattctcatcttgacaggacttttaactcttggtgtgaaagagtcggccatggtcaacaaaatattcacttgtattaacgtcctggtcctgggcttcataatggtgtcaggatttgtgaaaggatcggttaaaaactggcagctcacggaggaggattttgggaacacatcaggccgtctctgtttgaacaatgacacaaaagaagggaagcccggtgttggtggattcatgcccttcgggttctctggtgtcctgtcgggggcagcgacttgcttctatgccttcgtgggctttgactgcatcgccaccacaggtgaagaggtgaagaacccacagaaggccatccccgtggggatcgtggcgtccctcttgatctgcttcatcgcctactttggggtgtcggctgccctcacgctcatgatgccctacttctgcctggacaataacagccccctgcccgacgcctttaagcacgtgggctgggaaggtgccaagtacgcagtggccgtgggctccctctgcgctctttccgccagtcttctaggttccatgtttcccatgcctcgggttatctatgccatggctgaggatggactgctatttaaattcttagccaacgtcaatgataggaccaaaacaccaataatcgccacattagcctcgggtgccgttgctgctgtgatggccttcctctttgacctgaaggacttggtggacctcatgtccattggcactctcctggcttactcgttggtggctgcctgtgtgttggtcttacggtaccagccagagcagcctaacctggtataccagatggccagtacttccgacgagttagatccagcagaccaaaatgaattggcaagcaccaatgattcccagctgggctttttaccagaggcagagatgttctctttgaaaaccatactctcacccaaaaacatggagccttccaaaatctctgggctaattgtgaacatttcaaccagcctcatagctgttctcatcatcaccttctgcattgtgaccgtgcttggaagggaggctctcaccaaaggggcgctgtgggcagtctttctgctcgcagggtctgccctcctctgtgccgtggtcacgggcgtcatctggaggcagcccgagagcaagaccaagctctcatttaaggtgagcagctcggcctagggaaggaaccctggtacacagaccctggccctcctgatgcctggccagccctgcgtgggctcagccgggcctgggtgctcccgaggaaggtttttgctagccagcttcaggtaagatggggcaggggtcctgaaggcacagagaggaccagaccctggaaggaggcagcagcccttctcccctggacgtttccctgagtagtcaagggcaggctgacaccttcctgcatgacacaggccaagagagacctcgccagtccgttcccttcctgccagtgctccccatcctgagcatcttcgtgaacgtctatctcatgatgcagctggaccagggcacctgggtccggtttgctgtgtggatgctgataggcttcatcatctactttggctatggcctgtggcacagcgaggaggcgtccctggatgccgaccaagcaaggactcctgacggcaacttggaccagtgcaagtgacgcacagccccgccccccggaggtggcagcagccccgagggacgcccccagaggaccgggaggcaccccaccctccccaccagtgcaacagaaaccacctgcgtccacaccctcactgcagccaaaggtgcaattacttgacctgcagccccagcccaccctcggctctgcagccggttctccgggccctggtcacctccagacagctgcctggccggggccactaggctgcggctggccactgtgtctcctcacttctctgaacaaagcagttcctcccctaccagctcagccccgagctgccgcagcctcaggcagaacggaggtcaccttctctccttatcttgggaaccaggccttcctcccggggactgttctgggattgaaattgtgcatactccaaactttcgcagccatcttcccgctcagccccagacacccagcaatcaagccagatgagtaccacaaaacagtgtgtccccagcagctccccaccccagagccaaatgacagtagtgcacttaaaaaggaaaatcaggcctgttgtccttctccggttgcattcagatgggtcattagggccggaccctgcctgccccttggcttctcagggctttgctctgacaccatgacagctgcccggggctgagggcagctggctccactcaaatgaggaagaagggatcactcccattagggcctgctttgcttatgcatgtgtgtgcacatgcatgtaaaccagggaccttcagctcacggcctccaggcctgggccagttcttgctgctcctgccgtctcccccgactggctgtgtcctgagtaactggaacatgagacagtatctgcaggactggccccatggtggccgagtcagaagtctgtttcctgtgagtcgccaccgttcactcagtcttgccctcccatgctttggagccagtctggtggctcctgtaaggttctcaaggctggtggcagctcagtctggggtcaggacatgtcggggtcatgcgtttctggccctgacataagctgtctggcctctctgtgacatgatgaaattgaaatcaatccacagtccatgaaattgtgacactccaccagattaagttagggcataacattaacttggaaatggccatgtcatcacccctgcggctgtcctatagctgagatgcgtgggtcgcaggggaggtgatttctaggcatattgctgtcccttttgtgtatctgtcatccggatgcttcggaccccacgcctctgcaagtgggagagacccgagcatcctccccacccccatagctccagtgcacgccacccccgtcttgcctgggtcggggcctgcggccagcaccatttcacacacactccttgtagatgggagccagaggaaacctgaacgtgggtggagcgttccactgagtctacttcaggagacagaaggcccatgctgatgggggaggaggagggatgtgggcattttggacaccaggggaaatggaaatgctgctttcaaaacttagtttcctttccatttcttcctagtctggcctttgacacaaatctggtagaaagaagcctgataaattgagggcacttgtaccctccctgtgcccccagaaggttcttggagagaagtgcaagaatttgtgaacacggcggtggagggcgggtggatggccatgggctgagcctccgtatcaggcctgctcaccttgctgggagctttattctgatctcattttgaatgttccagagggagcatcataagagcccagagctccgatttccaaagagtgatattgacatttatggagattggtgttgtaacatattttgataaatactaacttattttgttggggttttggttgtctcttgtcttaggacctggtagttatttgcttgatttttttttccgttattttctacataggcaaagagaattcgagggatagacagtctccaagaaaagtgaagtggtgggagagaattgcttttttcttttttttcttttctctagtttttctttctggctgagatttccgtgcaagacagcacccaatagactatttagagttgacatttgacattttaatgggcgccatggctcattttgtagattgagaaggtgcgtctcccctgctccaagtctcatcatgacagcgtgctgacagctgggagtctgtggccttcctcacgcagaggccttaaagctggacacagaagcacgcctaggctgggcagggatgggacccatgccccctccttagaggacgggcttcctggttaggaaaggacacgtgggggtgccttgcataatagttcactggtcaccgtgcttttatgagtagtgtttttgtgcacttgccaggggttttctctctgtgtgagaggggagtgatttaagcaatggtgtctggagtaagccttacaattttaatagactttttcttatcatatccctcatttctttccctgaaataaaaatacacacaagcaaaaaaaaaatgatagtttcacatctcttagttcccttgcccaaacaagaatattcttagttccactggccaggattttcctacatagtcagaacttacacattactagaggcacacccaccaaggagtattgtgtctacttttatctgtgcaccagccacaaatacccacattggaaagacccatttgtgatgggtaaacatcccttcctgtctcccacaacccctgtgactgccctgcatgtgttcatgacctccgaaggcccaaattcatgaagcagcaaacccagcagatctccacccccctgcctcaggacctctgctgaagagggggatgaagtgggtctccagggaggcagtgggggccttgttggcagctggctcgggagccggcttacaggagggcagctctgcagttgggaggggcaccgtccggaggagaccaggcctctacacaccccccactctacttatcatccctgctcacacacccttgtccaaggctttatgcatcggatttatttttccaaatcaagaggacagtgatagatgcattttccccaggctgtctcagaaaggtcgctaaatgtatactgttgtcagaattgctgagatctccccccacttttggtttttgcagcagtaaaaactctttccactgtgacttattttctctctcaggcagccagccacctggtcccttgtgctgactctagcacagtggccaggatccaatacgagtccaggggtgaccgcaggatggtgggggcagcgggcttctccacctaccccagccaccaaggccctgacgcactgcctcctgcaccttcagcacatccctgtgcacagctggaagggtgcatggcccgctcacctttgttcagatgggtggaaacgctgatgataccagctcctccctgccgtgcccctgccacggagcaggcattgtgaactggctggtgtttgcagtcccacgtggcatggcctccagcccaacccacagtggagactggagacagggcaatgagtctggtggggggcacgtggacatgccccataggggccccacccagacttaacaggcaaggtcctgggcattgcgcgacgcaggactcaatgctaaagcaagcctgcctggctctgtgccagggcccctcttctgattcacacatcccatttttacacagacccttccttcttaataaaggctgacagttctgttggcagccaagaacccacaccatgaagacagggagtgaggggcctttgtgcccaactccagcacagctgcgttctggggtgtgtgagaggcatgttcgtgtctgtgcgctggtggtctcgtgagacagttccgaggacggggaaattgcagggtggtgggggcgtgaggcttatatgtggaactgatgcagagttcgcctgcagacggatctggatatacactatgtataattgttacgtgtaatttaaaatatatctgtttgccatcgtcatgagaagattatatgtaaggctctgaagggagagggagatgtacattctgccaggctcctggggaccttatccgagtcatgaaattgattactgttgatccagtggtgcaagaagctacactccatgtgtcatcacgcttatgactcctaatgtatttttaaggcaaaaaatgtcagccgactccatcttcacccctcgattcctcgagtccagcctttctgtgccagtgcttcactgagccacaacgctctcgccatcgggacccggctgggcctggagtctcggggcacagttgccatggagccctcctgggtcattctacaaatgtgctgagtgccagctgaaaaccccacaggagatggagtaccttggccaagcttaaagagaagattttctcagggtatttattagtgtgtccagcagggtcaggaagcaggatggaaagatgcactcagactgttaatttattaacaaggcaaatgattttgtgtttcttgatgacagactattaagtttgggacttattttcccatttgagaagttataatatatatttaagatgataagtttcctgcttaagttgtgcctttcagcttcaatgagtttaaggagcactaagggtaatgataccaatgagggttggtttattatcaaacctgaatagctgtggtttctccagtaaatattttcttctactgaacatggagccattattaagagttgtgtgttttttattatgtacatttgtatatttttttgcttgtttgatgttctatttttctaatagttttcttttagtttcttaaagttgtgatactagatttagattctgatgctaactgcaaatcaggttggtctctgctgggtctctcctgcttttattttactttaaggacaagtgtagttgtcgtccaccacctttcaaaaaatgtgaaactgccctgcctcccctttttgctgacaacactgtgtacattgaccacttcctaccatactttatgttgtaaaatcaaactcttttgtggtacattatctcatgcttctgcaaattcgaataaattctatggcttccatgtg

SEQ ID NO: 195 - DNA, 6314 bp, Homo sapiens
gtcggcgaggagggtccggccggagttgaaggattgaactttccggctcagtcgcggcgtctgcctggtcctcagcagtgcagccccggcgcggagcagggagcctcggcccgcgcccggcgccctcgccctcgccctcgacccgcagccatggtgcccggggtgcccggcgcggtcctgaccctctgcctctggctggcggcctccagcggctgcctggcggccggccccggcgcggctgctgcgcggcggctggacgagtcgctgtctgccgggagcgtccagcgcgctcgctgcgcctccaggtgcctgagcctgcagatcactcgcatctccgccttcttccagcacttccagaacaatggttccctggtttggtgccagaatcacaagcaatgttctaagtgcctggagccctgcaaggaatcaggggacctgaggaaacaccagtgccaaagcttttgtgagcctctcttccccaagaagagctacgaatgcttgaccagctgtgagttcctcaaatacatcctgttggtgaagcagggggactgtccggctcctgagaaagccagtggatttgcggccgcctgtgttgaaagctgcgaagttgacaatgagtgctctggggtgaagaaatgttgttcgaatgggtgtggacacacctgtcaagtacccaagactctgtacaaaggtgtccccctgaagcccagaaaagagttacgatttacagaactgcagtctggacagctggaggttaagtggtcctcgaaattcaatatttctattgagcctgtgatctatgtggtacaaagaagatggaattatggaatccatcctagcgaagatgacgccactcactggcagacagtggcccagaccacagacgagcgagttcaactgactgacataagacccagccgatggtaccagtttcgagtggctgctgtgaatgtgcatggaactcgaggcttcactgcccccagcaaacacttccgttcttccaaagatccatctgccccaccagcaccggctaacctccggctggccaactccaccgtcaacagtgatgggagtgtgaccgtcactatagtttgggatctccccgaggagccggacatccctgtgcatcattacaaggtcttttggagctggatggtcagcagtaagtctcttgtcccaacaaagaagaagcggagaaagactacggatgggtttcaaaattctgtgatcctggagaaactccagccagactgtgactatgttgtggaattgcaagccataacgtactggggacagacacggctgaagagtgcaaaggtgtcccttcacttcacatcgacacatgcaaccaacaacaaagaacagcttgtgaaaactagaaaaggtggaattcaaacacaactcccttttcaaagacgacgacccactcgcccgctggaagtcggagctcccttctatcaggatggccaactgcaagttaaagtctactggaagaagacagaagatcccactgtcaaccgatatcatgtgcggtggtttcctgaagcgtgtgcccacaacagaacaaccggatcagaggcatcatctggcatgacccacgaaaattacataattcttcaagatctgtcattttcctgcaagtataaggtgactgtccaaccaatacggccaaaaagtcactccaaggcagaagctgttttcttcactactccaccatgctctgctcttaaggggaagagccacaagcctgttggctgcctgggcgaagcaggtcatgttctttctaaggtgctagctaagcctgagaacctttctgcttcattcatcgtccaggatgtgaacatcaccggtcacttttcttggaagatggccaaggccaatctctatcagcccatgactgggtttcaagtgacttgggctgaggtcactacggaaagcagacagaacagcctacccaacagcattatttcacagtcccagatcctgccttccgatcattatgtcctaacagtgcccaatctgagaccatctactctttaccgactggaagtgcaagtgctgaccccaggaggggaggggccggccaccatcaagacgttccggacgccggagctcccaccctcttcagcacacagatctcatcttaagcatcgtcatccacatcattacaagccttctccagaaagatactaaactgttcaaaaagattttgtgaaattgcacagatgtgtaagcttgttgaacttcggccacgagacatgcacacttccagaggcagtgggaactgctcagaggcccggactctcctatgtgactttagtgcaggaagaacttctgtcaatcatggacgcatctggagacaagtgagaaacagtagattggtgaagacagacaccagttccctacaagcatggagaaaatgaagaataggcctgtttaatgctaaattttgttttcatgtatggtgtcgctcatttctattgaattacaacagaactcagttttccctgaatttggagcaccaaactccgccccaaaaaggagagtaacaaatacacaattcacacataacactaagcgtaaatctaatcaataaaatatatttttgactaaattattgattcgatatgaaaaatcaactaagattacacagctttgtttttttgaatctttcctaagatcatttttatcctaggtgatttttaaatgaaaatgtgtaatctaaaatataccagcgaatttaaatctaaaaatgctcctactttaagtaccttgtgctgctctttatgcaaaggtaaatcaaagttccctctataaattatgatttacaaaagacacccaagccagaggaactcaatgaaataagctgctaatcagattttaccttggagaaatgaaaattatttcttggggatgccttttaatatttgatcctattatgtgagagattttcctgatatgttatcttatttatattttcccttattttcctcaatgcagataatagcttttggtgcacttttgtttcaccatctgaaaattcacaaaacttcttgcttcaaatgaaaaaatcccaactattgagcatgtttaaatctttgcagagatttgccttttcttaatcaaagaaaggtctttgtgtgctagaatattattggtaatgttttaaaaattcctttgattgatagagaaggacagttatttgcatttaattcacccatatgctttcaaatctagtatatcttactttttggaaatgttttatgctacaaattagtgccttgtagcatgaacttaagtcaaaacgtgttatcaatatagagtgttgcagtgtatattgtaacaacctaaaacgcagagaagtttaatttaatactgttttttttcttgaaggaatactcacatacatggtttgaaatgtgcatagatatgcatgtctatataattataaatgcatgtgtatatatatgcaaatatatgtacatatacatgtatatacacacagacacatgcatatacatgaatataccttgagcatgaatccctggagaaatcgttttcgtagctcaccaatggtgagtaaagatacagctcttttaaaggtcataaggataatatattttccccatcaatgctgattctgagaaaagagcaatttatcaaaattaaacactgtaaaagaaaggtgtccatatgtctttacctacctaagtaaaacaggaagaaaatcagtaacattatccttaggttttgacaatggtacttgcttcttgttgttttattgtttcctgaattcatgcagatgcctggccattcctgggaagagtggataactcagaagtcactgtactccacagagcctcactgcagtgtctaaaggtagatgcaaattaaaatgcagggaaaataacttttctgatgttgatgcatgtctttgggaaacacatttataaacatggatacctgataatagatattgaaacccatttcctgtgtgttaaaatatttaaaaagtggatattccaggaatgttttgcagctttgtacaagtaacataaattggacacctcagaatgaaagttcatgttggttctgaatggttcactgcagctcctgtcacaagctgggatggatttatcacattgagttatgaaattacctggttctaagaatttttgagtggcaaaaatagaaaacaatcttcatttgaaaacatccctaagcttgaataaatggataccatagatagcttctcttttttattctggtgtcattaccagcatctgaatttcaagttcttaaaatttcaaaaattaaaatttttcattattagctatccatttatcttttacatgaacttgtcatgaacaaattcaaatgtttatgccagcaaatttttgtactgttgcatagttaaaaatgctgggagtctctgcatagatacaaaatattattaaattattacataaatttaattttataaaatttaatcatgcttcttttgtctgggtaatagacattggacagatatttttagttcagatggtgattctgaagcttacatctcccttaaaaaaatctaaagcagctcttatgggcttctaattttaatataaataaataatttaaattttattggtgttattggaagaaaaatgctattaatgggctaataaaaaacatgtgtttctcttatggattttaataagctccagtattattcaaatgatcaaaaatatagttataattttttgaattttaaaaatgtgattgctctaataaagaataaaatctatgctttttaacaaacatagttttggtgcctaattctgtaatatgttttattgaaattagattcatttctctaatgtgagaaaaatatatccagtaatagtattgactgtttaaaaaattgagctcatcaaaaatattgtcatcaaatacaggtggttaatctgacatacattgcagttacatgcattatttttatttacaacatttgctccttaatgatgaatttatctgtgttaccctgtttttctacctggaactccatagaatgatgtttgcaaaccaacatgtgctcttttcagtcattcactgttttaatatgacatggtagagaagataaggtttatggcaggtaattttttgtaatgtgtattaaacgaagttcaaagattagaaatacatctgtgtcctgaaaaccttagatacatagccgactgtatacagaggttcatctcaacctcaacactattgacttttggggctggatagttctctgttgtgggggtttgtcttgtgcactgtaggtttttagtagcatccacactttctcctcaccagatgccagttgcaccctcccccaagttgagacaaccaaaaatgtctccagatattgccagctaccccttgagggatggtacctctggttgagaaccattgctagagaatgatctttactgaatttgccctttataagaaacccagtgaatttctagagcaagtcccaaaaactaagggacagctaagaagttattatggttgacttcaaaggcctaaactgtgttttttatgtccactaaacaacttgattaaaagacggaattttgactcgtgtctgtatcatacaagtacaaatactaattttgccctatgtatccgtaaatgtcatttgtgattttgacttatttatttaatgccctttcttatgccgtgggttttcaagtttactcatttctatggttgcaaataactctaaaacttattatataaactttcatattataggcagaacacaatggctaaatatctgttgcatgtactttaaagtttattataaaatataaacagatatataaagatgttgactcttacctgtgattttgcatggtcagactcggtgtcaggtacggagaggattctcatgactgtcttacctctactgaatattctagtgagttatatgatttacggagtgattaacagaggtctatataaagttacttttcccctttacttaattatattgtagtgtgcagataacaaaactgctaccttctcatccaagtggtctgtagaattcatgtcccttacagtggtcatttaaagtcaatatttatttatgtatgtaataaaaaaagttggatttttgtgtatgtctgtcacattatttagagagaagtaatcttgtaaaaatgttttgtaaaaaacaaaaaagtattgtaaatagtcttgatattctgtgactcattattttcatgttagagtttgtacatactggttcaataataaagtatccttaaaccaga

SEQ ID NO: 196 - DNA, 3824 bp, Homo sapiens
gcggcgcggagggaggtgagcggcgcgcgcggagccggcgggcgaggaggaggactgcacagaggccccgcccccgccgccgcgagccggctcttcgccgcctccgaacccgctcactttgcctctcgcctctggacggcggcggggcggccgccggattcgcggccgcagggagcgccggagacggggagctattccgccccggcggctccattcggcgcccgcagccctcagggggtcggccccgcggcttgggagagggcaccgcggcctcggtgtgcgcagccctcgggcgcgagggtcggcggcgcggacacagccgcgttcccagccggtggggctcagcgctggcgccggcgaggactccccggccacccgcaggtaccgccgggcggagggcgcgctactagcagcgccggagatactcgagcccagggacccccgggccagcggagggcaggagcggagccccgagggagcgcgggccccgacggcgcgctcccccgtcagccacgggcaggcaggccccgcgtggcggcttggggtggggggctgcagcggggccctcgggccgaaagtcccccgggcggccagccatgaccttcgggcgcagcggggcggcctcggtggtgctgaacgtgggcggcgcccggtattcgctgtcccgggagctgctgaaggacttcccgctgcgccgcgtgagccggctgcacggctgccgctccgagcgcgacgtgctcgaggtgtgcgacgactacgaccgcgagcgcaacgagtacttcttcgaccggcactcggaggccttcggcttcatcctgctctacgtgcgcggccacggcaagctgcgcttcgcgccgcggatgtgcgagctctccttctacaacgagatgatctactggggcctggagggcgcgcacctcgagtactgctgccagcgccgcctcgacgaccgcatgtccgacacctacaccttctactcggccgacgagccgggcgtgctgggccgcgacgaggcgcgccccggcggggccgaggcggctccctccaggcgctggctggagcgcatgcggcggaccttcgaggagcccacgtcgtcgctggccgcgcagatcctggctagcgtgtcggtggtgttcgtgatcgtgtccatggtggtgctgtgcgccagcacgttgcccgactggcgcaacgcagccgccgacaaccgcagcctggatgaccggagcaggtactccgccggccctgggagggagccctccgggataattgaagctatctgcataggttggttcactgccgagtgcatcgtgaggttcattgtctccaaaaacaagtgtgagtttgtcaagagacccctgaacatcattgatttactggcaatcacgccgtattacatctctgtgttgatgacagtgtttacaggcgagaactctcaactccagagggctggagtcaccttgagggtacttagaatgatgaggattttttgggtgattaagcttgcccgtcacttcattggtcttcagacactcggtttgactctcaaacgttgctaccgagagatggttatgttacttgtcttcatttgtgttgccatggcaatctttagtgcactttctcagcttcttgaacatgggctggacctggaaacatccaacaaggactttaccagcattcctgctgcctgctggtgggtgattatctctatgactacagttggctatggagatatgtatcctatcacagtgcctggaagaattcttggaggagtttgtgttgtcagtggaattgttctattggcattacctatcacttttatctaccatagctttgtgcagtgttatcatgagctcaagtttagatctgctaggtatagtaggagcctctccactgaattcctgaattaatgcattgcaaatcaattcttgcatacacttcatagaaagactttgatgctgcttcatatttatgtgtttcttgctgggtgagcactgcagtggcattgtcatcatcttggtagggtaaaaattatccttcccagccgaagggataaaacagtttacttgttatggagtaaatagaattgagactgcaaaggaagaataatgactcctagagtaaactttaggacccggttttatttagacttgttttcccgtttccttgaatgattacacatttttaaaaaatacattatttgaacattttaaaacagaaaggtactattttccaaatgtttttccatcttatgaattcagaagaagcttggaacttatagtgttttttgtttgagagtaacattttcatttctaaatgttttataatttctcatatcaatgtcagaagtatcctggaaacatatgtcacatgcgggaactgtttaacaaatactttaaaaatttggccaaaatttaaactgtataatggagctagatacaagcaagaatagtatttgaaagacttttccagcatacttctcaattctttgctttatttttgtgccaattattcaccttatcgtgccgcttcatggaagcttgagtatgttctcccttttccattttggatttatctctttactgtaatgactcaaaaggtatttaagaattgacgagagcttgtgttgtttagcatcttactggataatatttgaattcattgctgttcctaggtgataactgtcctaatatttagatgtccaaacaagaatacttccaacataaaaattataataggaataatttgagatgactcaatattacaacctcttcttctcttaacctcctcccccaaacactagaggtttaataagacttatcagatgaaaggatatttatatagccttttagtagcaaagtcatacttacgtgttgtcactggattatcataaaagggagaaattaaatattactgtactcttagttgctgtgtagctaagtcaattttaagccagtaaaagcgatggatacataatgatttgatctgatctttaactattgtgaatcacagctacaccaaaactcttcttgtaagaatactgactaatatgccatgttaatctggctagattattaggactagataatgtaaaagtgatgattgtttagtaactaaattttagcaacagaaattagaattttgctttttcaaccagttaccataaagaagttagtgtatatataaacacaaataattagtgacagattcataaaaaattgaatgttgtacacagtaattttgtcagaggtagagaagacagggattgggaagtggtgggtgatggaggacctggatatatttatcaaataaagggttaccagaagtgttcattaaaggaattttagccatcatctagttcaaacctcaactattacaggtagaaaatcagggcaggagagaatataattgtgaaggagtcagggctaacacctggatctccagaaacctagcccagcaggttaatcttcacacatctctgggttctgagaaaagcctggaaaaatcacacttctttgtcattgtcatgctgaggtaataatagcaaaactgttttctttcccttaatttcctttcctaagcttatgtaatagtttggccattaaatatcttgccctattttccctattactgctagtatgctacttcttacatacccaaaagaaattcagttatttattgtatatttattgtattctaatataattgaaataaatggcatggatttattttttcttaactatttggattaaagctttgtggttcatgcaaacaatgtgcagatgatagcacctccatattactaataaaaatatgataaccatcaa

SEQ ID NO: 197 - DNA, 4244 bp, Homo sapiens
cagtgcaggcggagccgcgccgcgctcccaccccggccgggagctaggagccagcggccagccccgcgcagcgcagcgcagcccgcagaagcccggtcagcgcacgtgcccgcgagacctgcaaacttgtgccaccggctctgcccgtccccggggagcccgaacgccccgcagccctcacccctcccgccagtctccagccatggggctagaagaaatgaggtggggagaaagagagagagagagagagatcgagattgagatcttaagaaagagagcaaggaggaagagcccggtggggagcaggtccttctcccccacccccctacccccaactcccactggagccgcattgagactgtaggcaccaccgggcgccgaatggctgttttctaactgggatcctcggtgacgtatggctgcctgccccttggcagctgtctttatggaccagtaggcagagcgaaattgacgctgacaagacttttgcatcttggaagggactgtaatctactgtagtgaagaacagagcctctcaatcagacgggtgtaaataagagacggaggggagtccaaaagaaaaggaagaggaggaaaaacaagtgtgtgttggggggaacagggggaaaagcatttttggtggatggtatgaagccagccatggaaactgcagccgaggaaaatactgaacaaagccaagagagaaaagtgaacagcagagctgaaatggaaattggcaggtaccactggatgtacccaggctcaaagaaccaccagtaccatcccgtgccaaccctgggggacagggctagccccttgagcagtccaggctgctttgaatgctgcatcaagtgtctgggaggagtcccctacgcctccctggtggccaccatcctctgcttctccggggtggccttattctgcggctgtgggcatgtggctctcgcaggcaccgtggcgattcttgagcaacacttctccaccaacgccagtgaccatgccttgctgagcgaggtgatacaactgatgcagtatgtcatctatggaattgcgtcctttttcttcttgtatgggatcattctgttggcagaaggcttttacaccacaagtgcagtgaaagaactgcacggtgagtttaaaacaaccgcttgtggccgatgcatcagtggaatgttcgttttcctcacctatgtgcttggagtggcctggctgggtgtgtttggtttctcagcggtgcccgtgtttatgttctacaacatatggtcaacttgtgaagtcatcaagtcaccgcagaccaacgggaccacgggtgtggagcagatctgtgtggatatccgacaatacggtatcattccttggaatgctttccccggaaaaatatgtggctctgccctggagaacatctgcaacacaaacgagttctacatgtcctatcacctgttcattgtggcctgtgcaggagctggtgccaccgtcattgccctgctgatctacatgatggctactacatataactatgcggttttgaagtttaagagtcgggaagattgctgcactaaattctaaattgcataaggagttttagagagctatgctctgtagcatgaaatatcactgacactccagactaaagcagagtctaggtttctgcaattttgttacagtaatttgtaaatagctttagtaaactcaccttgcatggtagattaataagatgacttactgtacatgaattacacaataatgagatctggtggctatttccacattttgaaaaggattcagttatttactgacagtggtgagcatcctttttaaaataatgttctcatacttaaacattagagagcagtatctttaaatgaattattaacactttggaatacttacattttctgttatttttgattgcctgataaccagtttcaatgatgaaaatgaaaacaagtgctgaagatgaaatggaagagaaccgttttaatctggattttgttttgtcacacctggaaaatactttgcaaatatgttctaaattgaaaacaatttttttatgatcacatggttcactaccaaatgaccctcaaataagccagatgaaaatttgaagaaaaaggtcacccagttctctggaaaaaaaaaaaaaaaaaaaaaaaaaaatccacttcctcatgatactgtcttctaactgggcttacttaaaggatgcgagcaaaatgcaggcttaccaggatatcaaagcaaaggaagaacaggaactgcaagatatccagtctcggtcaaaagaacaactcaattcttacacataaatgtttgccagagtgtttcggccgacgtatttacagctctgacaaatcatcagacagctgctctgcagtacagatgtgtatcccaccaaactaatgtagatgtacaaacacttcactgtctgtctcaagctgctgggatgtatctctaggaaaaccttccagtgggtaaatctttttctttagaacaaatattggaggtttcatgttagccattttaaaaggcaacactttgacaaaatgatcgttcatactttgggaatttgtggcatgttcacatttattgctagggcaattctaccaagacactcaatggaatatgtcacactccttaatagggacctgtgactccttaataaggacctgtgacatgcccagcatcaagggataagaccgtaaattcacatatatgccatctgtcctcaagtgttatctacataggaaataaaatggaattgatgtaaagttccatttctgacagctgacatttattaaactttggatcaaagataatgtgattcttatgattgatttctcaaactagcttttccctcccaagtccaggacccattaatttcctgagccaatcagaaatatatttttcaataatgctaaaattagctacaattctgctgaccctactattaaagaatctggatgctggactcactgacaagctttccagaagcaattttataacagatttcattttaacaaaatactgatccaattttcattattcttgagaaatgtcagctttgccttaatgagtatttgctttaaatttctaagaatttatatcataactagagacccaaatatctttcacagaattttgttccataaatgtttttcttaattattaagaagtgttaccttattaaaatgaccaccattctaaaccatttttcagtggtctggatacgaagtttacagtttcataccaactatctaaaacctaattgcaaattgaccacagacctctaacctcctacttttatagacttgaatacttaagtaatttaaattagggttggtatttcatttttttcttatctaaatcttagtttcctggaataataaagtttgatgttcagcaagagaactgcttgagtttaagccattttcaaaagaaacttgccttttacattattgtgttccagaacattaagtgactgtaggtactgggtattagtgatggtaaactttgtgttgctctttatgaaatgatccatataactgttgggtgcatcagtgcttttcaaaggggctgcttactatagggttaactatgtatattcattgttaagagttaacttgtggtttggctgtttcctggattttataacatacatgtgcagaaatgtattcaaatgaaaggaagcatacctttatcaagatgctattaaaattgaacatcaagtataatatttcatttggattctcttttttggttaatgcctaaaaatgcctatttgggatttttttttttttttaaattaagagaagctctcttctgtgtagaacagttgttccaaaatagcttagtgttttgttttcctgttgcatgacagatttaactattctttccagcagtggaggtgctgtcagagtccagtgttctagaagaggcagtgtctaaagcctaattttacttttctaattctggtagctattaccaggaatttttgaaagttttgtttaagtagtctaatattttttatgtaaagagcattaaattttgctatgtataaatttttgtaacctaacagtgaatcaatattttctatcagtgccaagggcttcctgtagttctattcaagtgttacaataaatatttgtagataatagtcaatacttgtgtatgcttattttaaagatctatttaggtggaaatagttgtggatgtactaagagtaatgaaataaaattatagcttca

SEQ ID NO: 198 - DNA, 1753 bp, Homo sapiens
ctggccacaccctccgcctggacgcagcagccaccgccgcgtccctctctccacgaggctgccggcttaggacccccagctccgacgtaagtccctctcgtgcgccacctccatccgctgcccctctgcccacgggccgggctcaggtgggtaggggtttgaccccttccgctcctctccgccccccatccacgcccacatctctctgcctcctctcctgggctacagtgggccgctctgcctcgctcccgcccgcctgcctcagtctccccagctctctgccacccccctcggaccagtgcctcttaggtctctccagcgcgccatccctgcaaggcggcccctgacaccaactcactttttcctctgagcgcgggaggcgttactcactcttcctccttcccctcctcgccgactcccgggctctgggcccctgggggagggaagaggcctcctatctactcctctgccccagtcccctccttgcgtcagtcccagtgagggataagcgcctggcggaaggcgcagggaggtgtttctctgcttcaggagtgcccgccggcccttgcagctgctggaagacccatttatctcatgcttcttgttttctttggggacctgcaggggaaggaagcagggtgacggtttggtatccccacctaagaccctcccctttcccctgaggccagccgtcagcccctggcagggggtcttggaagccagaggtttttgctcagggcagggaaagggctgcaggatccccgggggctgccggaggtcggtctcactgacatcatggctgaccccagcatcgcctggtcccacagatgtcgccctctggtcgcctgtgtcttctcaccatcgttggcctgattctccccaccagaggacagacgttgaaagataccacgtccagttcttcagcagactcaactatcatggacattcaggtcccgacacgagccccagatgcagtctacacagaactccagcccacctctccaaccccaacctggcctgctgatgaaacaccacaaccccagacccagacccagcaactggaaggaacggatgggcctctagtgacagatccagagacacacaagagcaccaaagcagtgcacaccagctgtgtagatgtgggagaggggtttcttccagatgcagactctcagtaatatcccttgtttctgcctccatggctcactcctgccctccactgatctggccactctctcagctcatcccactgatgacaccacgacgctctctgagagaccatccccaagcacagacgtccagacagacccccagaccctcaagccatctggttttcatgaggatgaccccttcttctatgatgaacacaccctccggaaacgggggctgttggtcgcagctgtgctgttcatcacaggcatcatcatcctcaccagtggcaagtgcaggcagctgtcccggttatgccggaatcgttgcaggtgagtccatcagaaacaggagctgacaacctgctgggcacccgaagaccaagccccctgccagctcaccgtgcccagcctcctgcatcccctcgaagagcctggccagagagggaagacacagatgatgaagctggagccagggctgccggtccgagtctcctacctcccccaaccctgcccgcccctgaaggctacctggcgccttgggggctgtccctcaagttatctcctctgctaagacaaaaagtaaagcactgtggtctttgccc

SEQ ID NO: 199 - DNA, 5143 bp, Homo sapiens
gcaatcacgggtgtttagtctgcagccgagcagctaaagggagaaagaatcgctcaggaaagacacactgcagactccaccggcaccctgcaatagatggattccgactacacaagggagaaaacgcggaggtgacactctcctgcctggaaagaggacgaacgaccaaacaaacgcaaggactggactccatgccgaaggtatctggaagtcgtgacacggtgtgtataaaacaaaagtttgcgagctgttaattgctgtgctgtgttattaagagacgctttcaagtttcaagtaccaaatgtagctttacgttgccaaaggaagttgaggcaattgctttgctgttttaacttgctctgtgagggaaatctcataaactgaccaatgcaccaaatgaatgctaaaatgcactttaggtttgtttttgcacttctgatagtatctttcaaccacgatgtactgggcaagaatttgaaatacaggatttatgaggaacagagggttggatcagtaattgcaagactatcagaggatgtggctgatgttttattgaagcttcctaatccttctactgttcgatttcgagccatgcagaggggaaattctcctctacttgtagtaaacgaggataatggggaaatcagcataggggctacaattgaccgtgaacaactgtgccagaaaaacttgaactgttccatagagtttgatgtgatcactctacccacagagcatctgcagcttttccatattgaagttgaagtgctggatattaatgacaattctccccagttttcaagatctctcatacctattgagatatctgagagtgcagcagttgggactcgcattcccctggacagtgcatttgatccagatgttggggaaaattccctccacacatactcgctctctgccaatgatttttttaatatcgaggttcggaccaggactgatggagccaagtatgcagaactcatagtggtcagagagttagatcgggagctgaagtcaagctacgagcttcagctcactgcctcagacatgggagtacctcagaggtctggctcatccatactaaaaataagcatttcagactccaatgacaacagccctgcttttgagcagcaatcttatataatacaactcttagaaaactccccggttggcactttgctcttagatctgaatgccacggatccagatgagggcgctaatgggaaaattgtatattccttcagcagtcatgtgtctcccaaaattatggagacttttaaaattgattctgaaagaggacatttgactcttttcaagcaagtggattatgaaatcaccaaatcctatgagattgatgttcaggctcaagatttgggtccaaattcaatcccagcccattgcaaaattataattaaggttgtggatgttaatgacaataaacctgaaattaacatcaacctcatgtcccctggaaaagaagaaatatcttatatttttgaaggggatcctattgatacatttgttgctttggtcagagttcaggacaaggattctgggctgaatggagaaatagtttgtaagcttcatggacatggtcactttaaacttcagaagacatatgaaaacaattatttaatcttaactaatgccacactggatagagaaaagagatctgagtatagtttgactgtaatcgctgaggacagggggacacccagtctctctacagtgaaacattttacagttcaaatcaatgatatcaatgacaatccaccccacttccagagaagccgatatgaatttgtaatttcagaaaataactcaccaggggcatatatcaccactgttacagccacagatcctgatcttggagaaaatgggcaagtgacatacaccatcttggagagttttattctaggaagttccataactacatatgtaaccattgacccatctaatggagccatctatgccctcagaatctttgatcatgaagaagtgagtcagatcacttttgtggtagaagcaagagatggaggaagcccgaagcaactggtaagcaataccacagttgtgctcaccatcattgacgaaaatgacaacgttcctgtggttatagggcctgcattgcgtaataatacggcagaaatcaccattcccaaaggggctgaaagtggctttcatgtcacaagaataagggcaattgacagagactctggtgtgaatgctgaactcagctgcgccatagtagcaggtaatgaggagaatatcttcataattgatccacgatcatgtgacatccataccaacgttagcatggattctgttccctacacagaatgggagctgtcagttatcattcaggacaaaggcaatcctcagctacataccaaagtccttctgaagtgcatgatctttgaatatgcagagtcggtgacaagtacagcaatgacttcagtaagccaggcatccttggatgtctccatgataataattatttccttaggagcaatttgtgcagtgttgctggttattatggtgctatttgcaactaggtgtaaccgcgagaagaaagacactagatcctataactgcagggtggccgaatcaacttaccagcaccacccaaaaaggccatcccggcagattcacaaaggggacatcacattggtgcctaccataaatggcactctgcccatcagatctcatcacagatcgtctccatcttcatctcctaccttagaaagagggcagatgggcagccggcagagtcacaacagtcaccagtcactcaacagtttggtgacaatctcatcaaaccacgtgccagagaatttctcattagaactcacccacgccactcctgctgttgagcaggtctctcagcttctttcaatgcttcaccaggggcaatatcagccaagaccaagttttcgaggaaacaaatattccaggagctacagatatgcccttcaagacatggacaaatttagcttgaaagacagtggccgtggtgacagtgaggcaggagacagtgattatgatttggggcgagattctccaatagataggctgttgggtgaaggattcagcgacctgtttctcacagatggaagaattccagcagctatgagactctgcacggaggagtgcagggtcctgggacactctgaccagtgctggatgccaccactgccctcaccgtcttctgattataggagtaacatgttcattccaggggaagaattcccaacgcaaccccagcagcagcatccacatcagagtcttgaggatgacgctcagcctgcagattccggtgaaaagaagaagagtttttccacctttggaaaggactccccaaacgatgaggacactggggataccagcacatcatctctgctctcggaaatgagcagtgtgttccagcgtctcttaccgccttccctggacacctattctgaatgcagtgaggtggatcggtccaactccctggagcgcaggaagggacccttgccagccaaaactgtgggttacccacagggggtagcggcatgggcagccagtacgcattttcaaaatcccaccaccaactgtgggccgccacttggaactcactccagtgtgcagccttcttcaaaatggctgccagccatggaggagatccctgaaaattatgaggaagatgattttgacaatgtgctcaaccacctcaatgatgggaaacacgaactcatggatgccagtgaactggtggcagagattaacaaactgcttcaagatgtccgccagagctaggagattttagcgaagcatttttgtttccatgtatatggaaatagggaacaacaacaacaacaaaaaaccctgaaagaactggcattgccaaatagttgcatttatcataaatgtgtctgtgtatattgaatattaaatactgtattttcgtatgtacacaatgcaagtgtgattattttaatctgtattttaaaaatacatttgtaccttatatttatgtgtaatttaacaaacaaattttatttttttactcccatgacagacatgtttttcctagtcgtgtagaaactagccactgttcaaatctgatacactattcaaccacaaagtgtaaaggcactgcttagattagttttgttggggaagaattattatgttgtatgaacaaccccactgaagcattatacaattcttaattccattaagtgatcccactttttttcaataactttttagaaattaagaatcattaaaattgttaagctattttattgttattttctctactttctactagccccaatagttgaactcttataggaaaatcgaaagataaagtgaaagtttatttcaggactgagaaatatcttgaaggttatttattagatgactatctcaaatgaactttttatagacaatgatgaaaacagaattaaagtcaatgtttcctgactcccaggcccctactattccaggccatcacactggcctgttccggagaatatttctctcacaatattattatctacttataattatggtaaacaataaattttattccatccttgtagtatgaaacatgctccaaggaaatggaatctgtcctttaaatggataacagtatgtgttctaatggcataaaatattactggataaaaacagttgtgtcagtgtctctcctaaggtagtaaatataattgacttattctgaacccattctattttgaatctcccctttcctctcacaatacttgaacattttaatcttttggaatattgtctttctttgttataactattcatttttagcttttgtctccagtgcatgatctcatatttttgcttttatttttagtataagaacatttataaaatcatatttttgttactgcaattgttttatttgttgtgtggcaaatgagaaatcctttatttattgtgctgtgatctctctgtgtggaatgccttggtgagagagatgcttattatgactattatcatttctgaccaagcttctattaatgttatttctaataatacactatcttgattgtactctccagaaaatttttctgtcagtgaaaataaaagaaaaattaaagtaaagctaaggaactgtctataagtc

SEQ ID NO: 200 - DNA, 1773 bp, Homo sapiens
cctgcctgcccttcgggcacctcaggaaggcaccttcctctgtcagaatggccaccatggtaccatccgtgttgtggcccagggcctgctggactctgctggtctgctgtctgctgaccccaggtgtccaggggcaggagttccttttgcgggtggagccccagaaccctgtgctctctgctggagggtccctgtttgtgaactgcagtactgattgtcccagctctgagaaaatcgccttggagacgtccctatcaaaggagctggtggccagtggcatgggctgggcagccttcaatctcagcaacgtgactggcaacagtcggatcctctgctcagtgtactgcaatggctctcagataacaggctcctctaacatcaccgtgtacagggctcccggagcgtgtggagctggcacccctgcctccttggcagccggtgggccagaacttcaccctgcgctgccaagtggaggatgggtcgccccggaccagcctcacggtggtgctgcttcgctgggaggaggagctgagccggcagcccgcagtggaggagccagcggaggtcactgccactgtgctggccagcagagacgaccacggagcccctttctcatgccgcacagaactggacatgcagccccaggggctgggactgttcgtgaacacctcagccccccgccagctccgaacctttgtcctgcccgtgacccccccgcgcctcgtggccccccggttcttggaggtggaaacgtcgtggccggtggactgcaccctagacgggctttttccagcctcagaggcccaggtctacctggcgctgggggaccagatgctgaatgcgacagtcatgaaccacggggacacgctaacggccacagccacagccacggcgcgcgcggatcaggagggtgcccgggagatcgtctgcaacgtgaccctagggggcgagagacgggaggcccgggagaacttgacggtctttagcttcctaggacccattgtgaacctcagcgagcccaccgcccatgaggggtccacagtgaccgtgagttgcatggctggggctcgagtccaggtcacgctggacggagttccggccgcggccccggggcagccagctcaacttcagctaaatgctaccgagagtgacgacggacgcagcttcttctgcagtgccactctcgaggtggacggcgagttcttgcacaggaacagtagcgtccagctgcgagtcctgtatggtcccaaaattgaccgagccacatgcccccagcacttgaaatggaaagataaaacgagacacgtcctgcagtgccaagccaggggcaacccgtaccccgagctgcggtgtttgaaggaaggctccagccgggaggtgccggtggggatcccgttcttcgtcaacgtaacacataatggtacttatcagtgccaagcgtccagctcacgaggcaaatacaccctggtcgtggtgatggacattgaggctgggagctcccactttgtccccgtcttcgtggcggtgttactgaccctgggcgtggtgactatcgtactggccttaatgtacgtcttcagggagcaccaacggagcggcagttaccatgttagggaggagagcacctatctgcccctcacgtctatgcagccgacagaagcaatgggggaagaaccgtccagagctgagtgacgctgggatccgggatcaaagttggcgggggcttggctgtgccctcagattccgcaccaataaagccttcaaactccctaa

SEQ ID NO: 201 - DNA, 3815 bp, Homo sapiens
atggagccccgggctgccgcggcgggcgagccagagccgccggcggcgtcctcctccttccaggcccggctctggaagaacctgcagctgggggtgggcaggagcaagggcggcgggggcgggcgcgctgggggtccagagcgccgcactgcggacaccccgtcgccctccccgccacccccggtgggcacagggaatgcaccggccagggggagtggtgcaggcagcaggtggagcggcttcaagaagcggaagcaagtgctggaccgagtcttctcctcctcgcagcccaacctgtgctgctcgtcgccggagcccctggagcccggcggcgccggcagagccgagcaggggtccacgctacgccgccggatccgcgagcatttgctccccgccgtaaaggggcccgcggcggcctcgggagcagcgggagggacgcctcctggcggacgctcccccgactcagctccttcctcttcctccgcctcatcctccctgtcctcctcgccccagcctcccccgaggggggaccgcgcccgagatgagggtgcacggcgtcagggccccggggcgcacttgtgccaccagaagagctcctctctgccgggcaccgcctgcctggagcagctgctggagccgccgcctcctcccgcagagccggcgcggagtcccgcggagtctcgggccccggagacgggcgaggagcacggcagcagccagattccaagtcgctgctgtgcagagcagcaagtgctccgtgcagggctgttgctatcacttggaggtgaacagcctcttttgccggtattcagtgaagaaagcaagtctaaatatgcagttctctcactggagtgaaagatgttttgttcatttctaatcaactatgctagacagctgcaagctgaaaagtgcctgcaatttgccatttatttgtaataagaaaataataaacactgctggaaccagtaatgcagaagtccccttggctgatcccggaatgtaccagctggacattacattaagaaggggtcaaagtttagctgctcgagatcgaggagggacgagtgatccatatgtgaagtttaaaatcggaggaaaagaagtttttagaagtaagataatacacaagaacctcaaccctgtgtgggaagaaaaagcttgtattctggttgatcatcttagggagccattgtatataaaggtatttgactatgattttggactacaggatgactttatgggctcagcctttctggatctgacacaattggagttaaacaggcccacagatgtgacccttactctgaaagatcctcattatcctgaccatgatcttggaatcattttgctctcagtcatccttacccctaaagaaggagagtccagggatgtgacaatgctaatgaggaagagttggaaaagatcaagtaaggaactttcagaaaatgaagtggttggatcttatttctctgtgaagtctctcttttggaggacgtgcggcaggccagctcttcctgtcctgggcttctgcagagcagagcttcagaatccttattgcaaaaatgtacaatttcagacccaaagtttacgcctatcagacctacacagaaaatcgcatctttggagaggaatagtcagcatcaccttgattgaagggagagacctcaaggccatggattccaacgggttgagcgatccctacgtgaagttccggcttgggcatcagaagtacaagagcaagattatgccaaaaacgttgaatcctcagtggagggaacaatttgattttcacctttatgaagaaagaggaggagtcattgatatcactgcatgggacaaagatgctgggaaaagggatgatttcattggcaggtgccaggtcgacctgtcagccctcagtagggaacagacgcacaagctggagttgcagctggaagagggtgagggacacctggtgctgctggtcactctgacagcatcagccacagtcagcatctctgacctgtctgtcaactccctggaggaccagaaggaacgagaggagatattaaagagatatagcccattgaggatatttcacaacctgaaagatgtgggatttctccaggtgaaagtcatcagagcggaagggttaatggctgccgacgtcactggaaaaagtgacccattttgtgtggtagaactgaacaacgatagactgctaacacatactgtctacaaaaatctcaatcctgagtggaataaagtcttcacgttcaacattaaagatatccattcagttcttgaagtgacagtttatgatgaagatcgggatcgaagtgctgactttctgggcaaagttgctataccattgctgtctattcaaaatggtgaacagaaagcctacgtcttgaaaaacaagcagctgacagggccaacaaagggggtcatctatcttgaaatagatgtgatttttaatgctgtgaaagccagcttacgaacattaatacccaaagaacagaagtacattgaagaggaaaacagactctctaaacagctgctactaagaaactttatcagaatgaaacgttgtgtcatggtgctggtaaatgctgcatactacgttaatagttgctttgattgggattcacccccaaggagtctcgctgcttttgtggccttgtatgggactttcattaatgtctgagcacatggaacaaagagtgtctacgtccctttgtgttgtaagttaccagaaagttaggcagcctgcttcccatagacgtgttgttgtctccctaaagaaagcaattgtcattatcgttaagttttagaaaaaaaatctctctctctctgtctctctcagtattctttttgtagctctttcttataataaatatatggtggtactattaactctttctctttgttgtctggaactttgagctctacatgataccactggttttgttgttactattgacatggaactacttcttgataatatcagggaaagataacaggcaacgtgatacagtagtggaggacatgctagaggacgaggaagaagaagatgacaaagatgacaaggacagtgaaaaaaagggatttataaataaaatctatgccatccaggaggtatgtgtcagtgtccagaacatcctagatgaagtggcttcctttggcgaaaggataaagaatactttcaactggactgtcccattcttaagctggctggccattgtagccctctgtgtgttcacagccatcctgtactgcattccgctgagatacattgtccttgtctggggcatcaataaatttacaaaaaagcttcggagtccatatgcaattgataacaatgaactacttgacttcctttccagagtcccttcagatgtacaagtggtgcaataccaagaactgaaaccagatccttctcatagcccatataaaagaaagaaaaacaatcttggctagccagctcccagcactgaggagaccagcatctgtttgggaagataaaagaaaaagccctcagcctcagcagcatttcctttctttctgctttttatttattttgcctttttatcatgatcgagagaatctgtaaatagtgtacaaaggcatatgtctttgaatatatacttctattgtacagactcaacttgataaaggttttgctactgctgtgtcaaaaccttgttagctgtggataataatataacacactgaaagaacaaatataagaatgataacactggaagatatattcttatctaattactagtggattaaatactcacctgtgctctgattaaatctacatcaattgt

SEQ ID NO: 202 - DNA, 1753 bp, Homo sapiens
attgcagtatctttcagcttccagtcttatctgaagactccggcaccaaagtgaccaggaggcagagaagaacttcagaggagtctcgtcttgggctgcccgtgggtgagtgggagggtccgggactgcagaccggtggcgatggccactctcccagcagcagaaacctggatagacgggggtggaggcgtgggtgcagacgccgtgaacctgaccgcctcgctagctgccggggcggccacgggggcagttgagactgggtggctgcaactgctggaccaagctggcaacctctcctcctccccttccgcgctgggactgcctgtggcttcccccgcgccctcccagccctgggccaacctcaccaaccagttcgtgcagccgtcctggcgcatcgcgctctggtccctggcgtatggtgtggtggtggcagtggcagttttgggaaatctcatcgtcatctggatcatcctggcccacaagcgcatgaggactgtcaccaactacttccttgtgaacctggctttctccgacgcctccatggccgccttcaacacgttggtcaatttcatctacgcgcttcatagcgagtggtactttggcgccaactactgccgcttccagaacttctttcctatcacagctgtgttcgccagcatctactccatgacggccattgcggtggacaggtatatggctattattgatcccttgaaacccagactgtctgctacagcaaccaagattgtcattggaagtatttggattctagcatttctacttgccttccctcagtgtctttattccaaaaccaaagtcatgccaggccgtactctctgctttgtgcaatggccagaaggtcccaaacaacatttcacttaccatattatcgtcattatactggtgtactgtttcccattgctcatcatgggtattacatacaccattgttggaattactctctggggaggagaaatcccaggagatacctgtgacaagtatcatgagcagctaaaggccaaaagaaaggttgtcaaaatgatgattattgttgtcatgacatttgctatctgctggctgccctatcatatttacttcattctcactgcaatctatcaacaactaaatagatggaaatacatccagcaggtctacctggctagcttttggctggcaatgagctcaaccatgtacaatcccatcatctactgctgtctgaataaaagatttcgagctggcttcaagagagcatttcgctggtgtcctttcatcaaagtttccagctatgatgagctagagctcaagaccaccaggtttcatccaaaccggcaaagcagtatgtacaccgtgaccagaatggagtccatgacagtcgtgtttgaccccaacgatgcagacaccaccaggtccagtcggaagaaaagagcaacgccaagagacccaagtttcaatggctgctctcgcaggaattccaaatctgcctccgccacttcaagtttcataagctcaccctatacctctgtggatgaatattcttaattccatttcctgaggtaaaagattagtgtgagaccatcatggtgccagtctaggaccccattctcctatttaccagtcctgtcctatataccctctagaaacagaaagcaatttttaggcagctatggtcaaattgagaaaggtagtgtataaatgtgacaaagacactaataacatgttagcctccacccaaaataaaatgggctttaaattt

SEQ ID NO: 203 - DNA, 2316 bp, Homo sapiens
gggtgtgcgggcggcgcgctcgccctccagctgcagcccgcgccgagcgcgcagggccagcgagcgccggcgcctccagcatggagtgggaactcaacttgctgctctacctggcgctcttcttcttcctgctcttcttacttttcctcctgctcttcgtggtcatcaagcagctgaagaactccgtggccaacacggccggggcgctccagcccgggcgcctctcggtgcaccgcgagccttggggcttctcccgagagcaagcggtgtgacccgagtgcgggcactggcgggagggcaccgagctgcgcgggcgctgggctgggtctccgcctcgattctccgtcctcgcggcctcccagcttccagagccgagctgctgcccttgactggtgctcaggggaccacagctgcaatgacagtttgggcctgcaaaaagaaggctggaacaacgggagatggaagctttctgcaaatgcagcaccactggtatccatgaatttaacctgcccatcattcttcctaaacaagagactattgaaaagtcagggtgttcaaaatggcttcagatcttatcaggacaatcttggctgttgcactaatttccaaacttggcacagctgtagatgcagaactgatgccatctggtgcgattctacagaataagagagaaaatttacccagagtgtgccatgcactggcttttctgggaatggcaaggtgccaggatttgtttttggttcgcttgcaggggtggaaacttggaactaggttccaagatggtccccgcagcaccccacaagaagaaggaggaagcccacagagaaaacggggcatgccagttcaaatccacttccttttaaagagcttcctcagcagcccaataacttttgccttcatctcattggccagaactgtgtcattggctactgctatctgcaagattgtctgagaaatgtagtttttgtagctggatatataactgcctttgacaaaaatccagtttctcttgatgaagaagaagatgatggtggatcttgggaggacaactaacattttatgccctggctacagaatacagttgcagaggagcataaagttcaaaaagatcaaaactctagttccttcacaactgtcaaagctccaagcagcactgctcccctctgacagagtgagcagagtgaaggcatgtcaggtgttctcacaaaactcttgacagggctgacctctctcagtcaatatccttgtcccacatcaggattttctagagggccctgggtacctgtgcacttccttggtggccgtaacctctttgtggagggttggtgtaggataaagaatgttctattacgctgctccctcatctgtatcatttctctcctctctaattttcctgtcagttatattttggtggagtctgggtttgtgtatttgattcctatagaaagaccatcgctttcatgcatggaggaggggaatctacgcaaagaaaggctaccttactcctttctgtgactccaccaccagtctaggaatatcctgggagaagaattgcctctcaaagctgcttctataagcagcctacatcctagctaagcaaagaagaaacacttcccacatctagggctgtctaaaagaactttctgtgatgacagaaatgttctatatctgcagtgtccaatatggtaaccatataggcacatgtggctagtgaacacttgaaatgtggctagtgtgactgaggaaggaaaatttaaattttgtttaattgtaattaatttaaattcagatagccaaatggggctactagctattgtgttagatagcacggtatactttattctctttcttgtgttgtagaaccagctgggagaggtgtgggtcagtcatgggcttggtatcccctggtcttcactattctagcttgccattgaatttgtctcccagaggaaaagaaagaatggtatttggaattaaattcaagatgttaacttgacatctatatattgcacatattcctgtatagtgaatggatgacctcctgggaatagttcctgtgactgattttagtgataattgatcatgaagaaatggcagtactgctccacttcaccttcctagtgactattatgtgttcctagtcagagtgactcagcagagattattttgttctcttgtgcaatttattctgtgtcattttatttttgtaatattgtggcagctaaatgattattctgtgtatgtttttcaaaatattaggtggcttatattttttaaaaggctatgaaataaaaataaactatacgtaacacagtt

SEQ ID NO: 204 - DNA, 6055 bp, Homo sapiens
actgagtcccgggaccccgggagagcggtcaatgtgtggtcgctgcgtttcctctgcctgcgccgggcatcacttgcgcgccgcagaaagtccgtctggcagcctggatatcctctcctaccggcacccgcagacgcccctgcagccgcggtcggcgcccgggctccctagccctgtgcgctcaactgtcctgcgctgcggggtgccgcgagttccacctccgcgcctccttctctagacaggcgctgggagaaagaaccggctcccgagttctgggcatttcgcccggctcgaggtgcaggatgcagagcaaggtgctgctggccgtcgccctgtggctctgcgtggagacccgggccgcctctgtgggtttgcctagtgtttctcttgatctgcccaggctcagcatacaaaaagacatacttacaattaaggctaatacaactcttcaaattacttgcaggggacagagggacttggactggctttggcccaataatcagagtggcagtgagcaaagggtggaggtgactgagtgcagcgatggcctcttctgtaagacactcacaattccaaaagtgatcggaaatgacactggagcctacaagtgcttctaccgggaaactgacttggcctcggtcatttatgtctatgttcaagattacagatctccatttattgcttctgttagtgaccaacatggagtcgtgtacattactgagaacaaaaacaaaactgtggtgattccatgtctcgggtccatttcaaatctcaacgtgtcactttgtgcaagatacccagaaaagagatttgttcctgatggtaacagaatttcctgggacagcaagaagggctttactattcccagctacatgatcagctatgctggcatggtcttctgtgaagcaaaaattaatgatgaaagttaccagtctattatgtacatagttgtcgttgtagggtataggatttatgatgtggttctgagtccgtctcatggaattgaactatctgttggagaaaagcttgtcttaaattgtacagcaagaactgaactaaatgtggggattgacttcaactgggaatacccttcttcgaagcatcagcataagaaacttgtaaaccgagacctaaaaacccagtctgggagtgagatgaagaaatttttgagcaccttaactatagatggtgtaacccggagtgaccaaggattgtacacctgtgcagcatccagtgggctgatgaccaagaagaacagcacatttgtcagggtccatgaaaaaccttttgttgcttttggaagtggcatggaatctctggtggaagccacggtgggggagcgtgtcagaatccctgcgaagtaccttggttacccacccccagaaataaaatggtataaaaatggaataccccttgagtccaatcacacaattaaagcggggcatgtactgacgattatggaagtgagtgaaagagacacaggaaattacactgtcatccttaccaatcccatttcaaaggagaagcagagccatgtggtctctctggttgtgtatgtcccaccccagattggtgagaaatctctaatctctcctgtggattcctaccagtacggcaccactcaaacgctgacatgtacggtctatgccattcctcccccgcatcacatccactggtattggcagttggaggaagagtgcgccaacgagcccagccaagctgtctcagtgacaaacccatacccttgtgaagaatggagaagtgtggaggacttccagggaggaaataaaattgaagttaataaaaatcaatttgctctaattgaaggaaaaaacaaaactgtaagtacccttgttatccaagcggcaaatgtgtcagctttgtacaaatgtgaagcggtcaacaaagtcgggagaggagagagggtgatctccttccacgtgaccaggggtcctgaaattactttgcaacctgacatgcagcccactgagcaggagagcgtgtctttgtggtgcactgcagacagatctacgtttgagaacctcacatggtacaagcttggcccacagcctctgccaatccatgtgggagagttgcccacacctgtttgcaagaacttggatactctttggaaattgaatgccaccatgttctctaatagcacaaatgacattttgatcatggagcttaagaatgcatccttgcaggaccaaggagactatgtctgccttgctcaagacaggaagaccaagaaaagacattgcgtggtcaggcagctcacagtcctagagcgtgtggcacccacgatcacaggaaacctggagaatcagacgacaagtattggggaaagcatcgaagtctcatgcacggcatctgggaatccccctccacagatcatgtggtttaaagataatgagacccttgtagaagactcaggcattgtattgaaggatgggaaccggaacctcactatccgcagagtgaggaaggaggacgaaggcctctacacctgccaggcatgcagtgttcttggctgtgcaaaagtggaggcatttttcataatagaaggtgcccaggaaaagacgaacttggaaatcattattctagtaggcacggcggtgattgccatgttcttctggctacttcttgtcatcatcctacggaccgttaagcgggccaatggaggggaactgaagacaggctacttgtccatcgtcatggatccagatgaactcccattggatgaacattgtgaacgactgccttatgatgccagcaaatgggaattccccagagaccggctgaagctaggtaagcctcttggccgtggtgcctttggccaagtgattgaagcagatgcctttggaattgacaagacagcaacttgcaggacagtagcagtcaaaatgttgaaagaaggagcaacacacagtgagcatcgagctctcatgtctgaactcaagatcctcattcatattggtcaccatctcaatgtggtcaaccttctaggtgcctgtaccaagccaggagggccactcatggtgattgtggaattctgcaaatttggaaacctgtccacttacctgaggagcaagagaaatgaatttgtcccctacaagaccaaaggggcacgattccgtcaagggaaagactacgttggagcaatccctgtggatctgaaacggcgcttggacagcatcaccagtagccagagctcagccagctctggatttgtggaggagaagtccctcagtgatgtagaagaagaggaagctcctgaagatctgtataaggacttcctgaccttggagcatctcatctgttacagcttccaagtggctaagggcatggagttcttggcatcgcgaaagtgtatccacagggacctggcggcacgaaatatcctcttatcggagaagaacgtggttaaaatctgtgactttggcttggcccgggatatttataaagatccagattatgtcagaaaaggagatgctcgcctccctttgaaatggatggccccagaaacaatttttgacagagtgtacacaatccagagtgacgtctggtcttttggtgttttgctgtgggaaatattttccttaggtgcttctccatatcctggggtaaagattgatgaagaattttgtaggcgattgaaagaaggaactagaatgagggcccctgattatactacaccagaaatgtaccagaccatgctggactgctggcacggggagcccagtcagagacccacgttttcagagttggtggaacatttgggaaatctcttgcaagctaatgctcagcaggatggcaaagactacattgttcttccgatatcagagactttgagcatggaagaggattctggactctctctgcctacctcacctgtttcctgtatggaggaggaggaagtatgtgaccccaaattccattatgacaacacagcaggaatcagtcagtatctgcagaacagtaagcgaaagagccggcctgtgagtgtaaaaacatttgaagatatcccgttagaagaaccagaagtaaaagtaatcccagatgacaaccagacggacagtggtatggttcttgcctcagaagagctgaaaactttggaagacagaaccaaattatctccatcttttggtggaatggtgcccagcaaaagcagggagtctgtggcatctgaaggctcaaaccagacaagcggctaccagtccggatatcactccgatgacacagacaccaccgtgtactccagtgaggaagcagaacttttaaagctgatagagattggagtgcaaaccggtagcacagcccagattctccagcctgactcggggaccacactgagctctcctcctgtttaaaaggaagcatccacacccccaactcctggacatcacatgagaggtgctgctcagattttcaagtgttgttctttccaccagcaggaagtagccgcatttgattttcatttcgacaacagaaaaaggacctcggactgcagggagccagtcttctaggcatatcctggaagaggcttgtgacccaagaatgtgtctgtgtcttctcccagtgttgacctgatcctctttttcattcatttaaaaagcatttatcatgccccctgctgcgggtctcaccatgggtttagaacaaagacgttcaagaaatggccccatcctcaaagaagtagcagtacctggggagctgacacttctgtaaaactagaagataaaccaggcaatgtaagtgttcgaggtgttgaagatgggaaggatttgcagggctgagtctatccaagaggctttgtttaggacgtgggtcccaagccaagccttaagtgtggaattcggattgatagaaaggaagactaacgttaccttgctttggagagtactggagcctgcaaatgcattgtgtttgctctggtggaggtgggcatggggtctgttctgaaatgtaaagggttcagacggggtttctggttttagaaggttgcgtgttcttcgagttgggctaaagtagagttcgttgtgctgtttctgactcctaatgagagttccttccagaccgttacgtgtctcctggccaagccccaggaaggaaatgatgcagctctggctccttgtctcccaggctgatcctttattcagaataccacaaagaaaggacattcagctcaaggctccctgccgtgttgaagagttctgactgcacaaaccagcttctggtttcttctggaatgaataccctcatatctgtcctgatgtgatatgtctgagactgaatgcgggaggttcaatgtgaagctgtgtgtggtgtcaaagtttcaggaaggattttacccttttgttcttccccctgtccccaacccactctcaccccgcaacccatcagtattttagttatttggcctctactccagtaaacctgattgggtttgttcactctctgaatgattattagccagacttcaaaattattttatagcccaaattataacatctattgtattatttagacttttaacatatagagctatttctactgatttttgcccttgttctgtcctttttttcaaaaaagaaaatgtgttttttgtttggtaccatagtgtgaaatgctgggaacaatgactataagacatgctatggcacatatatttatagtctgtttatgtagaaacaaatgtaatatattaaagccttatatataatgaactttgtactattcacattttgtatcagtattatgtagcataacaaaggtcataatgctttcagcaattgatgtcattttattaaagaacattgaaaaacttgaaggaatccctttgcaaggttgcattactgtacccatcatttctaaaatggaagagggggtggctgggcacagtggccgacacctaaaaacccagcactttggggggccaaggtgggaggatcgcttgagcccaggagttcaagaccagtctggccaacatggtcagattccatctcaaagaaaaaaggtaaaaataaaataaaatggagaagaaggaatcaga

SEQ ID NO: 205 - DNA, 2925 bp, Homo sapiens
agtgggctctgcggataactcagacgccattaagctggggaatccaaactctaaaagaaggacgcattttaggtaagatctagtggctagatcttcagggtgggcttcgttcttgtggaaatcagtcaagaaagatcggattcgcggttatttatgcaaatcatctgggtggattgtgtacggagttaaactgcgccttctggaccgggtctgaacaatggagactgcgctagcaaaaacgccacagaaaaggcaagttatgtttcttgctatattgttgcttttgtgggaggctggctctgaggcagttaggtattccataccagaagaaacagaaagtggctattctgtggccaacctggcaaaagacctgggtcttggggtgggggaactggccactcggggcgcgcgaatgcattacaaaggaaacaaagagctcttgcagcttgatataaagaccggcaatttgcttctatatgaaaaactagaccgggaggtgatgtgcggggcgacagaaccctgtatattgcatttccagctcttactagaaaatccagtgcagttttttcaaactgatctgcagctcacagatataaatgaccatgccccagagttcccagagaaggaaatgctcctaaaaatcccagagagcacccagccagggactgtgtttcccttaaaaatagcccaggactttgacataggtagcaacactgttcagaactacacaatcagcccaaattcacactttcatgttgctacgcataatcgcggagatggcagaaaatacccagagctggtgctggacaaagcgctggaccgggaggagcggcctgagctcagcttaacactcactgcactggacggtggggctccgcccaggtccgggaccaccacaattcgcattgtcgtcttggataataatgacaacgcccccgaatttttacaatcattctatgaggtacaggtgcccgagaacagcccccttaactccttagttgtcgttgtctccgctcgagatttagatgcaggagcatatgggagtgtagcctatgctctattccaaggcgatgaagttactcaaccatttgtaatagacgagaaaacagcagaaattcgcctgaaaagggcattggatttcgaggcaactccatattataacgtggaaattgtagccacagatggtgggggcctttcaggaaaatgcactgtggctatagaagtggtggatgtgaatgacaacgcccctgaactcaccatgtctacgctctccagccctaccccagaaaatgccccggaaactgtagttgccgttttcagtgtttctgatccagactccggggacaacggtaggatgatttgctccatccagaatgatctcccctttcttttgaagcccacattaaaaaacttttacaccctagtgacacagagaacactggacagagagagccaagccgagtacaacatcaccatcactgtcaccgacatggggacacccaggctgaaaaccgagcacaacataacggtcctggtctccgacgtcaatgacaacgcccccgccttcacccaaacctcctacaccctgttcgtccgagagaacaacagccccgccctgcacatcggcagtgtcagcgccacagacagagactcaggcaccaacgcccaggtcacctactcgctgctgccgccccagaacccacacctgcgcctcgcctccctggtctccatcaacgcggacaacggccacctgtttgccctcaggtcgctggactacgaggccctgcaggcgttcgagttccgcgtgggagccacagaccgcggctccccggcgctgagcagcgaggcgctggtgcgcgtgctggtgctggacgccaacgacaactcgcccttcgtgctgtatccgctgcagaacggctcggcgccttgcaccgagctggtgccccgggcggccgagccgggctacctggtgaccaaggtggtggcggtggacggcgactcgggccagaacgcctggctgtcgtaccagctgctcaaggccacggagcccgggctgttcagcatgtgggcgcacaatggcgaggtgcgcaccgccaggctgctgagcgagcgcgacgcggccaagcacaggctggtggtgctggtcaaggacaatggcgagcctccgcgctcggccaccgccacgctgcacgtgctcctggtggacggcttctcccagccctacctgccgctgccggaggcggccccggcccaggcccaggccgactcgctcactgtctacctggtggtggcattggcctcggtgtcgtcgctcttcctcttttcggtgctcctgttcgtggcagtgcggctgtgcaggaggagcagggcggcctcggtcggtcgctgctcggtgcccgagggcccctttccagggcatctggtggacgtgagcggcaccgggaccctatcccagagctaccactacgaggtgtgtttgaccggagactcaggggccggcgagttcaagttcctgaagccgattattcctaaccttttgccccagggcgctggtgaagaaatagggaaaactgctgccttccggaatagctttggattaaattagagatctcgtgatgacgcgttgttttctgccatttatcccaaactttttcagatctagaattcgagagtgtcatggacaaaaatttcaccttgagattgagcttttatttccctttttaatggatttgtctgttgaacttcatgctgtccaagtgttgaaaagtcaattttatttcattgcatttatttacatagtgtcattccaaatccatgcatgctgttgattttcctgagatttttttctcttcttgttggtatttgttgtgataaaccaccttaataaaatcaagtattaattttaaaaaaaaaaaaaaaaaaaaa

SEQ ID NO: 206 - DNA, 16114 bp, Homo sapiens
atggacttagcaccagacagggctactggccgcccgtggctcccgttgcacactctatcagtatctcagctccttcgagtgttttggctactgtcattgcttccggggcaggcctgggtccacggggccgagccgcgccaggtgttccaagtgctggaagagcaacctccaggcactctggtaggcaccatccagacgcgccccggcttcacctacaggctcagcgaaagccacgccctgtttgccataaacagtagcaccggagccctgtacaccacctccaccatcgaccgcgagagcctgcccagcgacgtgatcaacctggtggtcctttccagcgcgcccacctaccccaccgaagtgcgagtgctggtgcgggacctcaatgacaacgcccccgttttcccggacccctctatcgtggtcactttcaaggaagacagtagcagcggacgccaagtcatcttagacaccgccaccgactcggacatcggctcaaacggtgtggaccaccgctcctaccgcatcatccgcggcaatgaggcggggcgcttccgtctggacatcaccctgaacccgagcggcgagggagcgttcctgcatctggtgtccaagggcggactggaccgtgaggtcactccgcagtaccagctcctggttgaggtggaggacaagggtgagcctaagcggcggggctaccttcaggtaaacgtgactgtgcaagacattaatgacaaccccccggtttttggcagttctcactaccaggcgggggtgcctgaggacgcggttgtgggttccagcgtcctccaggtggcggcggcggacgcggacgagggcaccaacgcggacatccgctatcgcctgcaggacgaggggacccccttccaaatggaccctgagacgggacttatcacggtgcgggagcccctggacttcgaagctcggcgccaatactcgcttacggtgcaggcgatggacagaggcgtgccttccctcactgggcgcgccgaggcgctgattcagctgctggacgtgaatgacaatgacccggtagtgaagttccgctacttcccggccacctcgcgctacgcctcggtagatgagaatgctcaagtgggcaccgtggtggctctgctcaccgtgacggacgcagattctcccgcggccaacgggaacatctccgtgcaaattctcgggggcaatgagcagcgccactttgaagtgcaaagcagcaaagtgccgaacctgagcctaatcaaggtggccagcgccttggaccgcgagcgcatcccttcctacaacctcacagtttccgtctctgataactacggggcgccccctggcgcagcagtccaggcgcgctcttctgtggcaagcctggtgatttttgttaatgacatcaatgaccatcctcctgtcttttcacagcaagtgtacagagtgaacctgagcgaggaggcgcctccgggaagctatgtgagtgggatatctgccactgatggcgactctggtctcaatgctaatctgcgttacagcattgtctctggcaatggactgggatggttccatatcagtgaacatagcggcctcgtgaccactgggtcctctgggggcctggaccgtgaacttgcttcccagattgttctgaatataagtgcccgggaccagggagttcaccccaaggtgtcctatgcccagcttgtagtaactctcctagatgtgaatgatgaaaagccagtatttagccagccagaagggtatgatgtgtctgtggttgagaatgccccaacagggacagaactgttgatgctcagggcaactgacggggacctgggtgacaacggaacagtgcgcttctccttacaagaggcagagactgaccggaggtccttccgtctggatcctgtgtctgggaggttgagtactatttcctccttggacagagaagagcaagccttctactccctgttggttctggccacagatctgggctcccctccccagtcatcaatggctcgcataaatgtgagtcttctggatataaatgataacagccctgtcttctacccggtccaatactttgctcacattaaggagaatgagcctggaggtagctacatcaccactgtgtctgccactgacccagacttgggtaccaatggtactgtcaaatatagcatatctgctggggacaggtctcggtttcaggtcaatgctcagagtggggttatttctacaagaatggccctagacagagaagaaaaaacagcttatcagttgcaaatagtagctactgatggtggcaatttacaatctcccaaccaggcaatagtaaccatcactgtattggacactcaagacaacccacctgtattcagtcaggttgcctacagctttgtggtttttgagaacgtggcgctgggatatcatgtgggtagtgtgtctgcatccaccatggatctcaattccaacatcagttatctcattactactggggatcagaaaggtatgtttgctatcaaccaggtcactgggcagcttaccacagcaaatgtgattgatagagaagagcaatccttttatcagctgaaggtagtggccagtgggggcacagtgactggagacactatggttaacataacagttaaggatttgaatgacaactctccccatttccttcaggcaatagagagtgtaaatgtggtggagaattggcaggcaggtcacagcattttccaggccaaagctgtggaccctgatgaaggtgtcaatggcatggtactctatagtctgaagcaaaaccccaagaacctgtttgctatcaatgaaaagaatggcactattagtctgcttgggcccctggatgttcatgctggctcctaccaaatagagatcttggcatctgacatgggtgtcccacagctctcctctagtgtcatcttaacagtttatgtccatgatgtaaatgacaattcaccagtgtttgaccaactctcttatgaagtcaccctttctgagtcagaacctgtgaattctcgattctttaaagtacaagcttctgataaggattcaggagcaaatggtgaaattgcatacaccattgctgaaggaaatacaggggatgcttttggcatattcccagatggtcaattgtatataaaaagtgaactggaccgtgaacttcaagacagatatgttttaatggttgttgcttctgacagagcagtggaaccccttagtgctactgtgaatgttactgtaattttagaagatgtaaatgataacagacctctttttaacagtaccaattacacattttacttcgaagaagagcagagggctgggtcgtttgtgggcaaagtaagtgctgtagataaagactttgggccaaatggagaagtaaggtattcttttgaaatggtgcagccagattttgagttgcatgccatcagtggggaaattacaaatactcatcagtttgacagggagtctcttatgaggcggagagggactgctgtgtttagctttacagtcatagcaacagatcaggggatccctcagcctctcaaggatcaggccactgtacatgtttacatgaaggatataaatgataatgctcccaaatttttaaaagacttttaccaagctacaatatcagaatcagcagccaatctgacacaagtgttaagagtatctgcctcagatgttgatgaaggtaataatggacttattcactattctataataaaaggaaatgaagaaagacagtttgctatagacagtacctctggtcaggtaacactaattggcaaattagactatgaagcaacacctgcctattcccttgtaattcaagcagtggattcagggacaatccccctcaattcaacgtgtactttaaatattgatattttagatgaaaatgacaataccccttctttccctaaatcaacactctttgttgatgttttggaaaacatgagaattggtgaactcgtgtcctctgttactgcaactgattccgattcaggtgacaatgctgatttatattacagtattactgggactaacaaccacggaacttttagcattagcccaaacactgggagtatttttcttgccaaaaaactggactttgaaacacagtctttgtataaattaaatataacagcaaaagaccaaggaagacctcctcgttcatctacaatgtcagtggttattcacgtgagggactttaatgacaatcctcctagctttcctcctggagatattttcaagtctattgttgagaacattcccatcggtacatctgtcatttcagtgactgcacatgaccctgatgcagacattaatggtcaactatcctacacaatcattcaacagatgccaagaggcaaccactttaccatagatgaagtcaaagggactatatatactaatgctgaaatagatcgggaatttgctaatctctttgagttgactgtaaaagccaatgatcaagctgtgccaatagaaactagacggtatgctttgaagaacgtgaccattttggttacagacctcaatgacaatgtcccaatgtttatatcacaaaacgcccttgctgcagacccatcagctgtgattggttccgttctgacaacaattatggctgctgacccagatgaaggtgctaatggagaaatagagtatgagatcatcaatggggacacagacaccttcattgttgatcgttatagtggagacctgagagtggcttcagcgttggtgccttcacagttgatctacaatctcatagtttcagcaacagaccttgggcctgaaaggaggaaatcgaccactgaattgaccatcattcttcagggccttgatggacctgtttttactcaacccaaatatataactattttgaaggaaggagaacccattggcacaaacgtgatatcaatagaagcagctagccccagaggatctgaggccccagtggagtattatattgtttcagttcgttgtgaagaaaaaactgttggacgcctctttactattggacgacatactggtataattcagaccgcagccattctggaccgggagcaaggagcatgtctttacctggtggatgtttatgccatagaaaaatcaactgcttttcccagaacacagagagcagaggtagaaataacacttcaggatatcaatgacaatccaccagtatttccaacggacatgctggatctcacggtagaggagaacattggagatggctctaagattatgcagctgacagccatggatgctgatgagggtgcaaatgctctcgtcacatacactatcattagtggagctgatgatagttttcgcatcgacccagaatccggagatctgatagcaaccaggcggttggacagggaacgccgctccaaatattcactgctagttcgtgctgatgatggtcttcagtcctcggatatgagaattaatatcactgtcagtgatgtgaatgaccatacacccaaattttccagacccgtgtactcttttgacattcctgaggacacaatccctggttctttggtagcagccattttagccacggatgatgactctggtgtgaatggagaaattacatatattgtgaatgaagatgatgaagatggcatctttttcctgaatcctattactggggtctttaatttgactcgattattagattatgaagtacagcaatattatatcctcactgttcgagcagaagatggtgggggacaatttactaccatcagagtttatttcaatattctagatgtaaatgataatccacctattttcagcttgaattcatacagcacatctttaatggagaatctacctgtgggatctactgttcttgtgtttaatgttactgatgcagatgatggcatcaactctcaattgacttatagcattgcttcaggtgatagccttgggcagtttactgttgacaagaatggtgtactcaaagtcctaaaagctttggatcgggaaagtcagtccttctacaacttggttgttcaagtgcatgacctgccacagattccagcctccagattcacaagcactgctcaagtctccattattttgttggatgtaaatgataacccaccgacatttctttcccctaaattgacatacattccagaaaatacacctattgatactgttgttttcaaagctcaagcaactgacccagatagtggcccaaacagctatattgagtacactctgctgaaccctttgggaaacaagttcagtattgggaccattgatggtgaagtgaggctcactggagaactggacagagaagaagtttctaattatactctaacagtggtggctacagacaaaggtcaaccatctctctcttcatctacagaggttgtagttatggtacttgacatcaatgataacaaccccatctttgcacaagctttgtataaagtggagattaatgaaaacacacttactggaacagatataatacaagtgttcgcagcagatggagatgaaggcacaaatggacaggttcgctatggcattgttaatggtaataccaatcaggaatttcggatagactctgtcacaggtgccatcactgtcgctaaacctttggatagagaaaagacccctacctaccatttaactgttcaggcaacagatcgaggcagcacacccagaactgatacctccacggtcagcattgttctactggatattaatgactttgttcctgtatttgagctatctccatattctgtaaatgtccctgagaatttagggacactacccagaacaattcttcaggtggtggcaagagatgatgatcgaggatctaacagcaaactctcatatgttctgtttggtggtaatgaagacaatgcttttactctctcagccagtggagaacttggagtaacacagagtctggatcgggaaacaaaagagcgctttgtcttaatgattacagctacagattcaggatcccctgccttgactggaactggaacaatcaacgtcatagtagatgatgtcaatgacaatgtccccacatttgccagtaaagcgtatttcacaacaattcctgaggatgcaccaactggaacagatgttttattggtaaatgcctcagatgctgatgcttcaaagaatgcagttataaggatcatcggtggaaactctcagttcacgatcaacccatcgacaggacaaatcatcaccagcgcattgttagatagggaaacaaaagataattatactttggtagtggtctgcagtgatgcgggatccccagagcctctttccagttccaccagtgtgcttgtcactgtgactgatgtcaatgacaatccaccaagatttcagcatcacccatatgtcactcacatcccatctcctactcttccaggttcctttgtctttgcggttacagtcacagatgctgatattggaccaaattctgaactgcattattctctttcgggtagaaattctgaaaaatttcacattgacccactgaggggagccattatggccgccggaccactaaacggagcttcagaagtgacattttctgtgcatgtaaaagatggtggctcatttccaaagacagattctacaacagtgactgttagattcgtgaataaggccgatttccctaaagtgagagccaaagaacaaacgttcatgtttcctgaaaaccaaccagtcagctctcttgtcaccaccatcacaggatcctctttaagaggagaacctatgtcatattatatcgcaagtgggaatcttggcaatactttccagattgatcagttaacagggcaggtgtctattagtcaacctctggattttgaaaagatacaaaaatatgttgtatggatagaggccagagacggtggtttccctcctttctcctcttacgagaaacttgatataacagtattagatgtcaatgataatgccccaatttttaaggaagacccatttatatctgaaatattggaaaacctttcccctcgaaaaatacttactgtttcggcaatggacaaggacagtggacccaatggacagttagattatgaaattgttaatggcaacatggaaaatagtttcagtatcaatcatgctactggtgaaattagaagcgttagacctttggacagggaaaaagtatctcattatgtcctaaccataaaatcatcagacaaagggtccccgtctcagagtacttcagtaaaagtcatgattaacattttagatgaaaatgataatgcccctaggttttctcagatatttagtgcccatgttcctgaaaattcccccttaggatacacagttacccgtgtcacaacttctgatgaagacattgggatcaatgcaattagtagatattctataatggatgcaagtcttccatttacaattaatcccagcacaggggatattgtcataagcagacctttaaatagggaagatacagaccgttacagaattcgagtttccgcacatgattctgggtggactgtaagtacagatgtcacaatatttgtgacagacatcaatgacaatgctccaagatttagcagaacttcctattatttagattgccctgaacttactgagattggctccaaagtaactcaggtatttgcaacagatcctgatgagggatcaaatggacaagtgttttatttcataaaatcccaatcagaatatttcaggattaatgccaccactggagagattttcaataaacagatcttaaaataccaaaatgtcactggcttcagtaatgtgaatatcaacaggcatagttttatagtgacatcttcagatcgaggtaaaccttccttaattagtgagacaacagttaccatcaatatagtggacagtaatgacaatgcacctcaatttcttaaaagtaaatatttcactccagtcaccaaaaatgttaaggttggtacgaagttaatcagagttacagcaatagatgacaaagattttggactgaattcagaagtggagtatttcatttctaatgataaccatttaggaaaatttaagttggacaatgatacggggtggatttcagtagcatcctccctgatttctgacttgaaccaaaacttttttatcacagtcactgcaaaggataagggaaaccctccactttcttcccaagcaactgttcacataactgtcactgaggaaaactaccatacacctgaattctctcaaagccacatgagtgcaaccatccctgagagccatagcattgggtccattgtcagaactgtttctgcaagagatagagatgcagcgatgaatggcttgattaagtacagcatttcttcaggaaatgaagaaggcatttttgcaatcaattcttctacaggtatattaacactagccaaagctcttgattatgagctatgccagaaacacgaaatgacgattagtgctatagatggaggatgggttgcaagaactggttactgcagtgtgaccgtaaatgtgattgatgtgaatgataattctccagtattcctctctgatgactatttccctactgttttggaaaatgccccaagtggaacaacagttatccacctaaatgcaacagatgctgactctggaacaaatgctgtgattgcgtatactgtacagtcatctgacagtgacctctttgtcattgaccctaacacaggagtcataaccactcaaggcttcttggattttgaaaccaagcagagctaccatcttactgtgaaagccttcaatgtccccgatgaggaaaggtgtagctttgccactgttaatatacaattaaaagggacaaatgaatatgtgccccgttttgtttccaaactttactattttgaaatctcagaagcagctcctaaaggtactattgttggagaagtgtttgctagcgaccgtgatttgggcactgatggggaggtacactatttgatttttggtaatagtcgaaagaagggtttccagatcaataagaagactggacagatttatgtttctggaattcttgatcgagaaaaagaagaaagggtgtctttgaaggtattggccaagaactttggcagcattagaggtgcagatatagatgaggtcactgtaaatgtcaccgtgcttgatgcaaatgacccacccatttttactctaaacatctacagtgtgcagatcagtgaaggggtcccaataggaactcatgtgacctttgtcagtgcctttgactcagactccatccccagctggagcaggttttcttacttcatcggatcagggaatgaaaatggtgccttttctattaatccgcagacaggacagatcaccgttactgcagaattagatcgagaaacccttcccatctataatctctcagttttggctgttgattcagggaccccctcagctacaggtagtgcctctttattagtcaccctggaagatataaatgataacgggcccatgctgactgtcagtgaaggagaagtcatggaaaacaaacggccaggcactttggtgatgacccttcagtccactgaccctgatctccctccaaatcaaggtccctttacttattacttgctgagcacaggtcctgccaccagttatttcagtctgagcactgctggagttctgagcacaaccagagagattgacagagagcagattgcagacttctatctgtctgtggttaccaaggattctggtgttcctcaaatgtcttccacaggaactgtgcatatcacagttatagaccaaaatgacaatccttcacagtctcggacggtggagatatttgttaattattatggtaacttgtttcccggtgggattttaggctctgtgaagccacaggatccagatgtgttagacagcttccactgctcccttacttcaggagttaccagcctcttcagtattccagggggtacttgtgatctgaattcccagccaaggtccacagatggcacgtttgatctgactgtccttagcaatgatggagttcacagcacagtcacgagcaacatccgagttttctttgctggattttccaatgccacagtggataacagcatcttacttcgtctcggcgtaccaacagtaaaggacttcttgaccaaccactatcttcattttttacgcattgccagctcacagctgacaggcttagggactgctgtgcaactgtacagtgcatatgaagagaacaatagaacgtttcttttggcagctgtgaagcgaaatcataatcagtatgtgaatcccagtggcgtagccaccttctttgaaagcatcaaagagatccttctccggcagagtggagtaaaggtggaatctgtggatcatgactcctgtgtgcatggcccatgtcagaatggagggagctgtctacgaagattggctgtgagctccgtattaaaaagccgtgagagtcttccagtcatcatcgtggcaaatgaacctctgcagcctttcttatgcaagtgtctgccaggatatgcgggtagctggtgtgaaatagatatagatgaatgtcttccatcaccttgccacagtggtggaacctgtcacaatttagtgggaggattttcatgcagctgcccagatggcttcactggtagggcgtgtgagagagatatcaatgagtgcctgcagagtccttgcaagaatggtgccatctgccagaattttccaggaagcttcaactgtgtttgcaaaactggatacacagggaaaatgtgtgaatcttcagtcaattactgtgaatgcaacccctgctttaatggtggttcctgccaaagtggtgtggattcttattattgtcattgtccatttggtgtctttggaaaacactgcgagttgaacagttatggatttgaggagttatcatacatggaatttccaagcttggaccccaataacaactatatttatgtcaaatttgccacgattaaaagtcatgccttattgctttacaactatgacaaccagacaggcgaccgggctgagtttttggcccttgaaattgccgaagaaagactaagattctcttataatttaggcagtggtacatataagctcaccaccatgaagaaggtgtcagatggacattttcacactgtgattgccaggagagcaggaatggcagcctccttaactgtggactcctgttctgagaaccaagagccaggatattgtactgtcagtaatgtggcagtttcagatgactggactcttgatgttcagccaaatagagttacagttggaggtatcagatctctagaaccaatccttcagagaagaggacacgtggaaagccatgattttgttgggtgtataatggagtttgcagtcaatggaaggcctctggaacccagccaagctttggcagcacaaggcatcctagatcaatgccctaggctggaaggcgcttgtactcgcagcccatgccaacatggtggcacatgtatggattactggtcatggcagcagtgtcattgcaaagagggactcactgggaaatactgtgaaaaatctgttactcctgacactgccttatcattagaaggcaaagggcgcttggactaccacatgagtcagaatgagaagcgggaatatttgttaaggcaaagcttacgaggtgccatgttggagccttttggtgtgaacagtctggaagtaaaatttaggaccagaagcgagaatggcgttttaatccatatccaagaaagcagcaattacactactgtgaagattaagaatggcaaagtatattttacatccgatgcaggaattgctgggaaagtggagagaaatattcctgaagtatatgttgcagacggccactggcacacttttctaattgggaaaaatggaacagcaacagtattgtctgttgacagaatatataacagagatattatccaccctactcaggacttcggtggccttgatgtgcttactatatcacttggaggaattccacccaatcaagcacatcgagatgcccaaacagcaggttttgatggctgcattgcttctatgtggtatggtggagaaagtcttcctttcagcgggaagcatagcttggcctccatctcaaaaacagatccctcagtgaagattggctgccgtggcccgaacatttgtgccagcaacccctgctggggtgatttgctgtgcattaatcagtggtatgcctacaggtgtgtccctcctggggactgtgcctcccacccgtgccagaatggtggcagctgtgagccaggcctgcactccggcttcacctgtagctgcccagactcgcacacgggaaggacctgtgagatggtggtggcctgtcttggcgtcctctgtcctcaggggaaggtgtgcaaagctggaagtcctgcggggcatgtctgtgttctgagtcagggccctgaagagatctctctgcctttgtgggctgtgcctgccatcgtgggcagctgcgcaaccgtcttggccctcctggtccttagcctgatcctgtgtaaccagtgcagggggaagaaggccaaaaatcccaaagaggagaagaaaccgaaggagaagaagaaaaagggaagtgagaacgttgcttttgatgaccctgacaatatccctccctatggggatgacatgactgtgaggaagcagcctgaagggaacccaaaaccagatatcattgaaagggaaaacccctaccttatctatgatgaaactgatattcctcacaactcagaaaccatccccagcgcccctttggcatctccagagcaggagatagagcactatgacattgacaacgccagcagcatcgccccttcggatgcagacatcattcaacactacaagcagttccgcagccacacaccaaaattttcaatccagaggcacagtcccctaggctttgcaaggcaatcccccatgcccttaggagcaagcagtttgacttaccagccttcatatggtcaaggtttgagaaccagctccctaagccactcagcatgcccaactcccaaccctctgtctcgacacagtccagcccctttctccaaatcttctacgttctatagaaacagcccagcaagggaattgcatcttcctataagggatggtaatactttggaaatgcatggtgacacctgccaacctggcattttcaactatgccacaaggctgggaaggagaagcaagagtcctcaggccatggcatcacatggttctagaccagggagtcgcctaaagcagccgattgggcagattccactggaatcttctcctccagtcggactttctattgaagaagtggagaggctcaacacacctcgccctagaaacccaagtatctgcagtgcagaccatgggaggtcttcttcagaggaggactgcagaaggccactgtctagaacaaggaatccagcggatggcattccagctccagaatcctcttctgatagtgactcccatgaatctttcacttgctcagaaatggaatatgacagggagaagccaatggtatatacttccagaatgcccaaattatctcaagtcaatgaatctgatgcagatgatgaagataattatggagccagactgaagcctcgaaggtaccacggtcgcagggccgagggaggacctgtgggcacccaggcagcagcaccaggcactgctgacaacacactgcccatgaagctagggcagcaagcagggactttcaactgggacaaccttttgaactggggccctggctttggccattatgtagatgtttttaaagatttggcatctcttccagaaaaagcagcagcaaatgaagaaggcaaagctgggacaactaaaccagtccccaaagatggggaagcagaacagtatgtgtgaagtttatgtactggcactataaaatataaaaacaagaaataatactcaaaccattgtaaagttgctgactaggttgggtcacatttgaaaaacaggccagtatggactagtggtggagggaaaactttaaaaataataaccacaatgctgctgaaacagactcacaacaactcttaatttaaacatgtgtggttgaatttatttccctgcatgcattgtgttttgtaactagttatgtggcatgcagcatttggaaaatttttcttatttaccagtgtttgatttgtgatttttaaaaattgatacctttaccattgcagaaaagaacttgtgctttcccagtggcgtatgtgtattgtttcaactgtattattataattatattttgcattgcaagattcttgatgttaaaccaatccttgtaaagtgtaaaaaggaaccctcctatcgtggaatgaaagattaagtatattaacacttttcagaatgatagtttctgtatttgatgttgctcagaaatgtctgagtatttgagtaagttttacatgacagtgggtactgaaattaagtcattttgttcagcactttaacgctttcttatagaattgtcttaaaacttctggatccttgagcaaatgattatagtctcctgactttcatgaggcttccattaggaacagaatgattgcatgttgtccccagaacactgccaccttgctatgcgaatgatgttctcagcagcacttctaagaaacactcttaaaagttatttattgaaaatttttcgtatgcttttaatattttaaagaattgacctaaggaaagcttatgattggacttattttccaaccagataacatttactctaagtacccagtttttataatttatatgaaatcagatttcaacacttactttgtcattttgtagatcattttttttaaatactgtgtaaaaactttttttacacctaagctgtgtttttgatactgatattttcctatgctgaatagttttcttactttcagggaaggtaagaaaatactttttttatatttgttacttatgtaacattcatatttttctcattttgatatttgtaacatactgtatgctttctacttgtaaatgtcaacaatagaattaaaatatttatttaaaataaaaa

SEQ ID NO: 207 - DNA, 6499 bp, Homo sapiens
atcgaggtccgcgggaggctcggagcgcgccaggcggacactcctctcggctcctccccggcagcggcggcggctcggagcgggctccggggctcgggtgcagcggccagcgggcgcctggcggcgaggattacccggggaagtggttgtctcctggctggagccgcgagacgggcgctcagggcgcggggccggcggcggcgaacgagaggacggactctggcggccgggtcgttggccgcggggagcgcgggcaccgggcgagcaggccgcgtcgcgctcaccatggtcagctactgggacaccggggtcctgctgtgcgcgctgctcagctgtctgcttctcacaggatctagttcaggttcaaaattaaaagatcctgaactgagtttaaaaggcacccagcacatcatgcaagcaggccagacactgcatctccaatgcaggggggaagcagcccataaatggtctttgcctgaaatggtgagtaaggaaagcgaaaggctgagcataactaaatctgcctgtggaagaaatggcaaacaattctgcagtactttaaccttgaacacagctcaagcaaaccacactggcttctacagctgcaaatatctagctgtacctacttcaaagaagaaggaaacagaatctgcaatctatatatttattagtgatacaggtagacctttcgtagagatgtacagtgaaatccccgaaattatacacatgactgaaggaagggagctcgtcattccctgccgggttacgtcacctaacatcactgttactttaaaaaagtttccacttgacactttgatccctgatggaaaacgcataatctgggacagtagaaagggcttcatcatatcaaatgcaacgtacaaagaaatagggcttctgacctgtgaagcaacagtcaatgggcatttgtataagacaaactatctcacacatcgacaaaccaatacaatcatagatgtccaaataagcacaccacgcccagtcaaattacttagaggccatactcttgtcctcaattgtactgctaccactcccttgaacacgagagttcaaatgacctggagttaccctgatgaaaaaaataagagagcttccgtaaggcgacgaattgaccaaagcaattcccatgccaacatattctacagtgttcttactattgacaaaatgcagaacaaagacaaaggactttatacttgtcgtgtaaggagtggaccatcattcaaatctgttaacacctcagtgcatatatatgataaagcattcatcactgtgaaacatcgaaaacagcaggtgcttgaaaccgtagctggcaagcggtcttaccggctctctatgaaagtgaaggcatttccctcgccggaagttgtatggttaaaagatgggttacctgcgactgagaaatctgctcgctatttgactcgtggctactcgttaattatcaaggacgtaactgaagaggatgcagggaattatacaatcttgctgagcataaaacagtcaaatgtgtttaaaaacctcactgccactctaattgtcaatgtgaaaccccagatttacgaaaaggccgtgtcatcgtttccagacccggctctctacccactgggcagcagacaaatcctgacttgtaccgcatatggtatccctcaacctacaatcaagtggttctggcacccctgtaaccataatcattccgaagcaaggtgtgacttttgttccaataatgaagagtcctttatcctggatgctgacagcaacatgggaaacagaattgagagcatcactcagcgcatggcaataatagaaggaaagaataagatggctagcaccttggttgtggctgactctagaatttctggaatctacatttgcatagcttccaataaagttgggactgtgggaagaaacataagcttttatatcacagatgtgccaaatgggtttcatgttaacttggaaaaaatgccgacggaaggagaggacctgaaactgtcttgcacagttaacaagttcttatacagagacgttacttggattttactgcggacagttaataacagaacaatgcactacagtattagcaagcaaaaaatggccatcactaaggagcactccatcactcttaatcttaccatcatgaatgtttccctgcaagattcaggcacctatgcctgcagagccaggaatgtatacacaggggaagaaatcctccagaagaaagaaattacaatcagaggtgagcactgcaacaaaaaggctgttttctctcggatctccaaatttaaaagcacaaggaatgattgtaccacacaaagtaatgtaaaacattaaaggactcattaaaaagtaacagttgtctcatatcatcttgatttattgtcactgttgctaactttcaggctcggaggagatgctcctcccaaaatgagttcggagatgatagcagtaataatgagacccccgggccccagctctgggccccccattcaggccgagggggctgctccggggggccgacttggtgcacgtttggatttggaggatccctgcactgccttctctgtgtttgttgctcttgctgttttctcctgcctgataaacaacaacttgggatgatcctttccttccattttgatgccaacctctttttatttttaagtgttgaagctgcacaaactgaataatttaaacaaatgctggtttctgccaaagatggacacgaataagttaattttccagctcagaatgagtacagttgaatttgagactctgtcggacttctgcctggttttatttgggactatttcatctgctcttgatttgtaaatagcacctggatagcaagttataatgcttatttatttgaaaatgctttttttttttttacgttaagcacatttatcttgaactggagcttctaaaatgggccccaggggtgcaagatgttggtgtaattcagagatagtaaaggtttatcgcagtgtgaattataagagtccatccaaatcaacgtcccctccctcctctcatgcgatccaggtaattatgcagttagtgccacagtagactagcctagcaaagggtttgctccttgctgtctctgactgcaccacacagctattgatggcagctgaaagaaagtggatcatgccttaattttaaatattcctgtcctctggttattattttaaggaacttcatcatgttaaaatgacagcattcaaaggtgtaccacaatcaatttatcaaggaaataaaggctattgtaaccagagatttaatgcattcttctaaatgtaaatttaaaatttgccctttaaaaaagtccactttccccatatgcaaatgttaataggatttttatggggattaagaagcggcaaaactacagaagcagaattcaaagtaatttaaaaaatacacaccagttttaaatcaagagaagttgtaatctcttgttttaagcttgcgtttgagggaaaatgactttttcaccaatttaatatgcattgttctgttgtttttatttatgattgatcattatatgtgacttgcataaactatttaaaaaaaaaaactataatgaccaaaatagccatggctgagaaacacagtggctgggcagttcaataggaggtgacaatatgacaacttctcaagcttgggaactcaccagactgtttcctcctttaggtaacagattctgtcccacggctaaacttgtctttcacgtgggaattgcttttgtcaaacgtgaaagagtaaacaatagcatttccccagaatgccagttttatggagccccaaatgctctgaaaacaattagtaacctggaagttgtcagcccaaaggaaagaaaaatcaattgtatcttgaaattttacctatggctctttggcctggcttctttgttcattataagttagtgtgttccttcaggaaacaatgccttaataccatagaacatgggggccttaatagttgctaacattaaaaaagcaaacagaatgattgagggatccttatgaaaacaaaatggtgaattggacatgcagaacctaccatttccttcccctgtttgcaatttttgtggggaggggaggatgttagtatttacaaaagatgattttaagaacttccaagagatgagtttaagaattccatagagtattagttgttcactgtgtaattaatccttccggagagtctttttttttttttttaaagaaacttttgggtgggttttgttttttattagttaccctaggggtatgttaccctggggtatgaagggaggtgaagataacggaggggggagaaaaaaaaaaggagaaaaaaggagcctaaaatggggaataattgaaatggaacagggggtgtgaggctggttcctcagtccccattccaaacggaggatagaagctgtgtatttatgtgacctggcagatctctggggccataacactgaaaagtgaaagaacctggtgggcagctatctttggctactgataaccagcagaaatgtctgttaattctgattttctcaatttgaagggatcagctacactgttaaattttggaaagccactacctacttccatcaagtaacttaggtttcgaaatatgggttcaacgcacctcccttattcaaaatgtcaaaatagattattataatgtataaagtaagaattgacaaaatatgattcttgggttgattggtcatttagaaactagccaaaagtgagacttttaatgtagaacatttttcagaaatgggtacaaagaaaaatgcatattactgtatatttcagagtgtttatgtgaaccttgtatttaattgagagtcccatgtacgttctgcagcctttttgctgcttctatcatctgaagtttgtgtagtacaaataaggcctttgggattcttaatgacatttatgttaaaatgttctcttctctttaaacaccgttttccaatccacctgtcagggagtccaaatcgtgtctgtgttgatgatgctatactttgtagctagaaaaacaattttagtgttgtgggctctgtattcagacttcctttttacaagaccgatgggcagtgatagattattttatcatatttaatgcatgggaaatagtgtgctgaggaagctattaaaagtataactcagtgaattgggtctgagttttaaatgagatatttcaaaattggcttgccactgtaaaagcgactaaataataatatgatactgttctttatgatcttgtcatgtttcactgatatgtttggggtcttcactatgtaaaaaatgtcaaaattgtaatgagcaagcatgtacaagtagtcgtaaatcaaaggttttaaacaggactgcattttcaattaggaaaagctgtttggcagatagcatccaatgcaaaaacagaaatatcgtaacgttctgcttagtgggcaagataagataggaaagacatgctcaaagaggcaaaagaatcattgctatcattcattctacactagtttgaagaagtttttgtacatcagagcacttccttcagcacacttttttgccttcagatttcattttttataaaatgagaagactaatgataaactgtagaaatcaaaatttattgagaaatctgtttctcctaacagatagtaaccctgccatgatatactacttcaacaatgttataaaatttatgtgataatatacattttaacctgggatttctaaattgctttaacaaatgctaatcctgagagttgccctgcaggactcaaaagggaaaggttttgggacgtggcagaaccctgcagggacatggaattaaggccattgcaatgtatcatctttgtagcattgtcatcactcctaagctgccttcacagttttagtacactaagatgaggaaatcgaaaatgggcagagaaagctcatactgtataattgaagacagtgacagagaacgtgtcagttatgccaaaactcttttgatttctgttccaggatttccaacaagaggggaaaggaatgacttgggagggtgggaaagacattaggagttgtttttattttttaccttggaagctttagctaccaatccagtaccctcctaactagaatgtatacacatcagcaggactgactgactacttcattagagatatactgtactcattgggggccttgggggtactgctgttcttatgtgggattttaatgttgtaatgtattgcatcttaatgtattgaattcattttgttgtactatattggttggcattttattaaaataaattgtattgtatcatatttgtatgttttaagagaaaataatataaaatacaatatttgtactattatatagtgcaaaaactacaaatctgtgcctctgcctcttgaattaattctttggttgcttgcatttgggaagggaatggagaaaggaaagaaccaataaagctttcaaagttcaag

SEQ ID NO: 208 - DNA, 2072 bp, Homo sapiens
aaacccccctgcatcgtagagagcgggctggattctctgtggtgctgatggaggagggggagcaggttgaaacaatcgagtgggcgcgccaggactccccagctcctggcggggaagggagggggagcccctgttctgcgcagggaggcggcggggctggggggcccccggaacgaggaagaggcaggggtgaccgctagaataggaaagtgctcacccccgggaggcaaaatttcgttcagatcgcacattaattggagatatctgattaattccagcttctgatgactataaatggcgattctctaccaaggtgtctatattaaaaaaaaaatcattccgtgtcatcccccacgtcaggcctgctcgtgggcgtgaggctgtacttcctccgcccccttctaatggagtgaaccattcccagctctcccccccccctcagcctctctctctctctctctttctctctctctctctctttctgtctcttcctcgctccctctctttctctcctccctctgccttcccagtgcataaagtctctgtcgctcccggaacttgttggcaatgcctattttttggctttcccccgcgttctctaaactaactatttaaaggtctgcggtcgcaaatggtttgactaaacgtaggatgggacttaagttgaacggcagatatatttcactgatcctcgcggtgcaaatagcgtatctggtgcaggccgtgagagcagcgggcaagtgcgatgcggtcttcaagggcttttcggactgtttgctcaagctgggcgacagcatggccaactacccgcagggcctggacgacaagacgaacatcaagaccgtgtgcacatactgggaggatttccacagctgcacggtcacagcccttacggattgccaggaaggggcgaaagatatgtgggataaactgagaaaagaatccaaaaacctcaacatccaaggcagcttattcgaactctgcggcagcggcaacggggcggcggggtccctgctcccggcgttcccggtgctcctggtgtctctctcggcagctttagcgacctggctttccttctgagcgtggggccagctccccccgcgcgcccacccacactcactccatgctcccggaaatcgagaggaagatccattagttctttggggacgttgtgattctctgtgatgctgaaaacactcatataggattgtgggaaatcctgattctcttttttatttcgtttgatttcttgtgttttatttgccaaatgttaccaatcagtgagcaagcaagcacagccaaaatcggacctcagctttagtccgtcttcacacacaaataagaaaacggcaaacccaccccattttttaattttattattattaattttttttgttggcaaaagaatctcaggaacggccctgggccacctactatattaatcatgctagtaacatgaaaaatgatgggctcctcctaataggaaggcgaggagaggagaaggccaggggaatgaattcaagagagatgtccacggacgaaacatacggtgaataattcacgctcacgtcgttcttccacagtatcttgttttgatcatttccactgcacatttctcctcaagaaaagcgaaaggacagactgttggctttgtgtttggaggataggagggagagagggaaggggctgaggaaatctctggggtaagagtaaaggcttccagaagacatgctgctatggtcactgaggggttagctttatctgctgttgttgatgcatccgtccaagttcactgcctttattttccctcctccctcttgttttagctgttacacacacagtaatacctgaatatccaacggtatagatcacaagggggggatgttaaatgttaatctaaaatatagctaaaaaaagattttgacataaaagagccttgattttaaaaaaaaaagagagagagatgtaatttaaaaagtttattataaattaaattcagcaaaaaaagatttgctacaaagtatagagaagtataaaataaaagttattgtttgaaaaaaaaaaaaaaaaaa

SEQ ID NO: 209 - DNA, 5826 bp, Homo sapiens
gaggaggagacggcatccagtacagaggggctggacttggacccctgcagcagccctgcacaggagaagcggcatataaagccgcgctgcccgggagccgctcggccacgtccaccggagcatcctgcactgcagggccggtctctcgctccagcagagcctgcgcctttctgactcggtccggaacactgaaaccagtcatcactgcatctttttggcaaaccaggagctcagctgcaggaggcaggatggtctggaggctggtcctgctggctctgtgggtgtggcccagcacgcaagctggtcaccaggacaaagacacgaccttcgaccttttcagtatcagcaacatcaaccgcaagaccattggcgccaagcagttccgcgggcccgaccccggcgtgccggcttaccgcttcgtgcgctttgactacatcccaccggtgaacgcagatgacctcagcaagatcaccaagatcatgcggcagaaggagggcttcttcctcacggcccagctcaagcaggacggcaagtccaggggcacgctgttggctctggagggccccggtctctcccagaggcagttcgagatcgtctccaacggccccgcggacacgctggatctcacctactggattgacggcacccggcatgtggtctccctggaggacgtcggcctggctgactcgcagtggaagaacgtcaccgtgcaggtggctggcgagacctacagcttgcacgtgggctgcgacctcatagacagcttcgctctggacgagcccttctacgagcacctgcaggcggaaaagagccggatgtacgtggccaaaggctctgccagagagagtcacttcaggggtttgcttcagaacgtccacctagtgtttgaaaactctgtggaagatattctaagcaagaagggttgccagcaaggccagggagctgagatcaacgccatcagtgagaacacagagacgctgcgcctgggtccgcatgtcaccaccgagtacgtgggccccagctcggagaggaggcccgaggtgtgcgaacgctcgtgcgaggagctgggaaacatggtccaggagctctcggggctccacgtcctcgtgaaccagctcagcgagaacctcaagagagtgtcgaatgataaccagtttctctgggagctcattggtggccctcctaagacaaggaacatgtcagcttgctggcaggatggccggttctttgcggaaaatgaaacgtgggtggtggacagctgcaccacgtgtacctgcaagaaatttaaaaccatttgccaccaaatcacctgcccgcctgcaacctgcgccagtccatcctttgtggaaggcgaatgctgcccttcctgcctccactcggtggacggtgaggagggctggtctccgtgggcagagtggacccagtgctccgtgacgtgtggctctgggacccagcagagaggccggtcctgtgacgtcaccagcaacacctgcttggggccctccatccagacacgggcttgcagtctgagcaagtgtgacacccgcatccggcaggacggcggctggagccactggtcaccttggtcttcatgctctgtgacctgtggagttggcaatatcacacgcatccgtctctgcaactccccagtgccccagatggggggcaagaattgcaaagggagtggccgggagaccaaagcctgccagggcgccccatgcccaatcgatggccgctggagcccctggtccccgtggtcggcctgcactgtcacctgtgccggtgggatccgggagcgcacccgggtctgcaacagccctgagcctcagtacggagggaaggcctgcgtgggggatgtgcaggagcgtcagatgtgcaacaagaggagctgccccgtggatggctgtttatccaacccctgcttcccgggagcccagtgcagcagcttccccgatgggtcctggtcatgcggctcctgccctgtgggcttcttgggcaatggcacccactgtgaggacctggacgagtgtgccctggtccccgacatctgcttctccaccagcaaggtgcctcgctgtgtcaacactcagcctggcttccactgcctgccctgcccgccccgatacagagggaaccagcccgtcggggtcggcctggaagcagccaagacggaaaagcaagtgtgtgagcccgaaaacccatgcaaggacaagacacacaactgccacaagcacgcggagtgcatctacctgggccacttcagcgaccccatgtacaagtgcgagtgccagacaggctacgcgggcgacgggctcatctgcggggaggactcggacctggacggctggcccaacctcaatctggtctgcgccaccaacgccacctaccactgcatcaaggataactgcccccatctgccaaattctgggcaggaagactttgacaaggacgggattggcgatgcctgtgatgatgacgatgacaatgacggtgtgaccgatgagaaggacaactgccagctcctcttcaatccccgccaggctgactatgacaaggatgaggttggggaccgctgtgacaactgcccttacgtgcacaaccctgcccagatcgacacagacaacaatggagagggtgacgcctgctccgtggacattgatggggacgatgtcttcaatgaacgagacaattgtccctacgtctacaacactgaccagagggacacggatggtgacggtgtgggggatcactgtgacaactgccccctggtgcacaaccctgaccagaccgacgtggacaatgaccttgttggggaccagtgtgacaacaacgaggacatagatgacgacggccaccagaacaaccaggacaactgcccctacatctccaacgccaaccaggctgaccatgacagagacggccagggcgacgcctgtgaccctgatgatgacaacgatggcgtccccgatgacagggacaactgccggcttgtgttcaacccagaccaggaggacttggacggtgatggacggggtgatatttgtaaagatgattttgacaatgacaacatcccagatattgatgatgtgtgtcctgaaaacaatgccatcagtgagacagacttcaggaacttccagatggtccccttggatcccaaagggaccacccaaattgatcccaactgggtcattcgccatcaaggcaaggagctggttcagacagccaactcggaccccggcatcgctgtaggttttgacgagtttgggtctgtggacttcagtggcacattctacgtaaacactgaccgggacgacgactatgccggcttcgtctttggttaccagtcaagcagccgcttctatgtggtgatgtggaagcaggtgacgcagacctactgggaggaccagcccacgcgggcctatggctactccggcgtgtccctcaaggtggtgaactccaccacggggacgggcgagcacctgaggaacgcgctgtggcacacggggaacacgccggggcaggtgcgaaccttatggcacgaccccaggaacattggctggaaggactacacggcctataggtggcacctgactcacaggcccaagactggctacatcagagtcttagtgcatgaaggaaaacaggtcatggcagactcaggacctatctatgaccaaacctacgctggcgggcggctgggtctatttgtcttctctcaagaaatggtctatttctcagacctcaagtacgaatgcagagatatttaaacaagatttgctgcatttccggcaatgccctgtgcatgccatggtccctagacacctcagttcattgtggtccttgtggcttctctctctagcagcacctcctgtcccttgaccttaactctgatggttcttcacctcctgccagcaaccccaaacccaagtgccttcagaggataaatatcaatggaactcagagatgaacatctaacccactagaggaaaccagtttggtgatatatgagactttatgtggagtgaaaattgggcatgccattacattgctttttcttgtttgtttaaaaagaatgacgtttacatataaaatgtaattacttattgtatttatgtgtatatggagttgaagggaatactgtgcataagccattatgataaattaagcatgaaaaatattgctgaactacttttggtgcttaaagttgtcactattcttgaattagagttgctctacaatgacacacaaatcccattaaataaattataaacaagggtcaattcaaatttgaagtaatgttttagtaaggagagattagaagacaacaggcatagcaaatgacataagctaccgattaactaatcggaacatgtaaaacagttacaaaaataaacgaactctcctcttgtcctacaatgaaagccctcatgtgcagtagagatgcagtttcatcaaagaacaaacatccttgcaaatgggtgtgacgcggttccagatgtggatttggcaaaacctcatttaagtaaaaggttagcagagcaaagtgcggtgctttagctgctgcttgtgccgctgtggcgtcggggaggctcctgcctgagcttccttccccagctttgctgcctgagaggaaccagagcagacgcacaggccggaaaaggcgcatctaacgcgtatctaggctttggtaactgcggacaagttgcttttacctgatttgatgatacatttcattaaggttccagttataaatattttgttaatatttattaagtgactatagaatgcaactccatttaccagtaacttattttaaatatgcctagtaacacatatgtagtataatttctagaaacaaacatctaataagtatataatcctgtgaaaatatgaggcttgataatattaggttgtcacgatgaagcatgctagaagctgtaacagaatacatagagaataatgaggagtttatgatggaaccttaaatatataatgttgccagcgattttagttcaatatttgttactgttatctatctgctgtatatggaattcttttaattcaaacgctgaaaagaatcagcatttagtcttgccaggcacacccaataatcagtcatgtgtaatatgcacaagtttgtttttgtttttgttttttttgttggttggtttgtttttttgctttaagttgcatgatctttctgcaggaaatagtcactcatcccactccacataaggggtttagtaagagaagtctgtctgtctgatgatggatagggggcaaatctttttcccctttctgttaatagtcatcacatttctatgccaaacaggaacaatccataactttagtcttaatgtacacattgcattttgataaaattaattttgttgtttcctttgaggttgatcgttgtgttgttgttttgctgcactttttacttttttgcgtgtggagctgtattcccgagaccaacgaagcgttgggatacttcattaaatgtagcgactgtcaacagcgtgcaggttttctgtttctgtgttgtggggtcaaccgtacaatggtgtgggagtgacgatgatgtgaatatttagaatgtaccatattttttgtaaattatttatgtttttctaaacaaatttatcgtataggttgatgaaacgtcatgtgttttgccaaagactgtaaatatttatttatgtgttcacatggtcaaaatttcaccactgaaaccctgcacttagctagaacctcatttttaaagattaacaacaggaaataaattgtaaaaaaggttttctatacatgaaaaaaaaaaaaaaaaaa

SEQ ID NO: 210 - DNA, 8169 bp, Homo sapiens
acagccgggctggagcgcgcacccggcactgaggcttcgctgctctcggagcgctcagaccgcggccgccgcagccggcgaaagaggcaaagtcccgcacgccggaggacatgcgcctcggctagcggccccgggccccaccaccgtgcggctttctccagattattcctctctcgctgtctctgactgtctctctctgtctctgtctctgtctctctctctctcacacacacacacacacacacaaacacacatacgcacgcacgatctcacttcgatctatacactggaggattaaaacaaacaaacaaaaaaaacatttccttcgctccccctccctctccactctgagaagcagaggagccgcacggcgaggggccgcagaccgtctggaaatgcgaatcctaaagcgtttcctcgcttgcattcagctcctctgtgtttgccgcctggattgggctaatggatactacagacaacagagaaaacttgttgaagagattggctggtcctatacaggagcactgaatcaaaaaaattggggaaagaaatatccaacatgtaatagcccaaaacaatctcctatcaatattgatgaagatcttacacaagtaaatgtgaatcttaagaaacttaaatttcagggttgggataaaacatcattggaaaacacattcattcataacactgggaaaacagtggaaattaatctcactaatgactaccgtgtcagcggaggagtttcagaaatggtgtttaaagcaagcaagataacttttcactggggaaaatgcaatatgtcatctgatggatcagagcatagtttagaaggacaaaaatttccacttgagatgcaaatctactgctttgatgcggaccgattttcaagttttgaggaagcagtcaaaggaaaagggaagttaagagctttatccattttgtttgaggttgggacagaagaaaatttggatttcaaagcgattattgatggagtcgaaagtgttagtcgttttgggaagcaggctgctttagatccattcatactgttgaaccttctgccaaactcaactgacaagtattacatttacaatggctcattgacatctcctccctgcacagacacagttgactggattgtttttaaagatacagttagcatctctgaaagccagttggctgttttttgtgaagttcttacaatgcaacaatctggttatgtcatgctgatggactacttacaaaacaattttcgagagcaacagtacaagttctctagacaggtgttttcctcatacactggaaaggaagagattcatgaagcagtttgtagttcagaaccagaaaatgttcaggctgacccagagaattataccagccttcttgttacatgggaaagacctcgagtcgtttatgataccatgattgagaagtttgcagttttgtaccagcagttggatggagaggaccaaaccaagcatgaatttttgacagatggctatcaagacttgggtgctattctcaataatttgctacccaatatgagttatgttcttcagatagtagccatatgcactaatggcttatatggaaaatacagcgaccaactgattgtcgacatgcctactgataatcctgaacttgatcttttccctgaattaattggaactgaagaaataatcaaggaggaggaagagggaaaagacattgaagaaggcgctattgtgaatcctggtagagacagtgctacaaaccaaatcaggaaaaaggaaccccagatttctaccacaacacactacaatcgcatagggacgaaatacaatgaagccaagactaaccgatccccaacaagaggaagtgaattctctggaaagggtgatgttcccaatacatctttaaattccacttcccaaccagtcactaaattagccacagaaaaagatatttccttgacttctcagactgtgactgaactgccacctcacactgtggaaggtacttcagcctctttaaatgatggctctaaaactgttcttagatctccacatatgaacttgtcggggactgcagaatccttaaatacagtttctataacagaatatgaggaggagagtttattgaccagtttcaagcttgatactggagctgaagattcttcaggctccagtcccgcaacttctgctatcccattcatctctgagaacatatcccaagggtatatattttcctccgaaaacccagagacaataacatatgatgtccttataccagaatctgctagaaatgcttccgaagattcaacttcatcaggttcagaagaatcactaaaggatccttctatggagggaaatgtgtggtttcctagctctacagacataacagcacagcccgatgttggatcaggcagagagagctttctccagactaattacactgagatacgtgttgatgaatctgagaagacaaccaagtccttttctgcaggcccagtgatgtcacagggtccctcagttacagatctggaaatgccacattattctacctttgcctacttcccaactgaggtaacacctcatgcttttaccccatcctccagacaacaggatttggtctccacggtcaacgtggtatactcgcagacaacccaaccggtatacaatggtgagacacctcttcaaccttcctacagtagtgaagtctttcctctagtcacccctttgttgcttgacaatcagatcctcaacactacccctgctgcttcaagtagtgattcggccttgcatgctacgcctgtatttcccagtgtcgatgtgtcatttgaatccatcctgtcttcctatgatggtgcacctttgcttccattttcctctgcttccttcagtagtgaattgtttcgccatctgcatacagtttctcaaatccttccacaagttacttcagctaccgagagtgataaggtgcccttgcatgcttctctgccagtggctgggggtgatttgctattagagcccagccttgctcagtattctgatgtgctgtccactactcatgctgcttcagagacgctggaatttggtagtgaatctggtgttctttataaaacgcttatgttttctcaagttgaaccacccagcagtgatgccatgatgcatgcacgttcttcagggcctgaaccttcttatgccttgtctgataatgagggctcccaacacatcttcactgtttcttacagttctgcaatacctgtgcatgattctgtgggtgtaacttatcagggttccttatttagcggccctagccatataccaatacctaagtcttcgttaataaccccaactgcatcattactgcagcctactcatgccctctctggtgatggggaatggtctggagcctcttctgatagtgaatttcttttacctgacacagatgggctgacagcccttaacatttcttcacctgtttctgtagctgaatttacatatacaacatctgtgtttggtgatgataataaggcgctttctaaaagtgaaataatatatggaaatgagactgaactgcaaattccttctttcaatgagatggtttacccttctgaaagcacagtcatgcccaacatgtatgataatgtaaataagttgaatgcgtctttacaagaaacctctgtttccatttctagcaccaagggcatgtttccagggtcccttgctcataccaccactaaggtttttgatcatgagattagtcaagttccagaaaataacttttcagttcaacctacacatactgtctctcaagcatctggtgacacttcgcttaaacctgtgcttagtgcaaactcagagccagcatcctctgaccctgcttctagtgaaatgttatctccttcaactcagctcttattttatgagacctcagcttcttttagtactgaagtattgctacaaccttcctttcaggcttctgatgttgacaccttgcttaaaactgttcttccagctgtgcccagtgatccaatattggttgaaacccccaaagttgataaaattagttctacaatgttgcatctcattgtatcaaattctgcttcaagtgaaaacatgctgcactctacatctgtaccagtttttgatgtgtcgcctacttctcatatgcactctgcttcacttcaaggtttgaccatttcctatgcaagtgagaaatatgaaccagttttgttaaaaagtgaaagttcccaccaagtggtaccttctttgtacagtaatgatgagttgttccaaacggccaatttggagattaaccaggcccatcccccaaaaggaaggcatgtatttgctacacctgttttatcaattgatgaaccattaaatacactaataaataagcttatacattccgatgaaattttaacctccaccaaaagttctgttactggtaaggtatttgctggtattccaacagttgcttctgatacatttgtatctactgatcattctgttcctataggaaatgggcatgttgccattacagctgtttctccccacagagatggttctgtaacctcaacaaagttgctgtttccttctaaggcaacttctgagctgagtcatagtgccaaatctgatgccggtttagtgggtggtggtgaagatggtgacactgatgatgatggtgatgatgatgatgatgacagaggtagtgatggcttatccattcataagtgtatgtcatgctcatcctatagagaatcacaggaaaaggtaatgaatgattcagacacccacgaaaacagtcttatggatcagaataatccaatctcatactcactatctgagaattctgaagaagataatagagtcacaagtgtatcctcagacagtcaaactggtatggacagaagtcctggtaaatcaccatcagcaaatgggctatcccaaaagcacaatgatggaaaagaggaaaatgacattcagactggtagtgctctgcttcctctcagccctgaatctaaagcatgggcagttctgacaagtgatgaagaaagtggatcagggcaaggtacctcagatagccttaatgagaatgagacttccacagatttcagttttgcagacactaatgaaaaagatgctgatgggatcctggcagcaggtgactcagaaataactcctggattcccacagtccccaacatcatctgttactagcgagaactcagaagtgttccacgtttcagaggcagaggccagtaatagtagccatgagtctcgtattggtctagctgaggggttggaatccgagaagaaggcagttataccccttgtgatcgtgtcagccctgacttttatctgtctagtggttcttgtgggtattctcatctactggaggaaatgcttccagactgcacacttttacttagaggacagtacatcccctagagttatatccacacctccaacacctatctttccaatttcagatgatgtcggagcaattccaataaagcactttccaaagcatgttgcagatttacatgcaagtagtgggtttactgaagaatttgagacactgaaagagttttaccaggaagtgcagagctgtactgttgacttaggtattacagcagacagctccaaccacccagacaacaagcacaagaatcgatacataaatatcgttgcctatgatcatagcagggttaagctagcacagcttgctgaaaaggatggcaaactgactgattatatcaatgccaattatgttgatggctacaacagaccaaaagcttatattgctgcccaaggcccactgaaatccacagctgaagatttctggagaatgatatgggaacataatgtggaagttattgtcatgataacaaacctcgtggagaaaggaaggagaaaatgtgatcagtactggcctgccgatgggagtgaggagtacgggaactttctggtcactcagaagagtgtgcaagtgcttgcctattatactgtgaggaattttactctaagaaacacaaaaataaaaaagggctcccagaaaggaagacccagtggacgtgtggtcacacagtatcactacacgcagtggcctgacatgggagtaccagagtactccctgccagtgctgacctttgtgagaaaggcagcctatgccaagcgccatgcagtggggcctgttgtcgtccactgcagtgctggagttggaagaacaggcacatatattgtgctagacagtatgttgcagcagattcaacacgaaggaactgtcaacatatttggcttcttaaaacacatccgttcacaaagaaattatttggtacaaactgaggagcaatatgtcttcattcatgatacactggttgaggccatacttagtaaagaaactgaggtgctggacagtcatattcatgcctatgttaatgcactcctcattcctggaccagcaggcaaaacaaagctagagaaacaattccagctcctgagccagtcaaatatacagcagagtgactattctgcagccctaaagcaatgcaacagggaaaagaatcgaacttcttctatcatccctgtggaaagatcaagggttggcatttcatccctgagtggagaaggcacagactacatcaatgcctcctatatcatgggctattaccagagcaatgaattcatcattacccagcaccctctccttcataccatcaaggatttctggaggatgatatgggaccataatgcccaactggtggttatgattcctgatggccaaaacatggcagaagatgaatttgtttactggccaaataaagatgagcctataaattgtgagagctttaaggtcactcttatggctgaagaacacaaatgtctatctaatgaggaaaaacttataattcaggactttatcttagaagctacacaggatgattatgtacttgaagtgaggcactttcagtgtcctaaatggccaaatccagatagccccattagtaaaacttttgaacttataagtgttataaaagaagaagctgccaatagggatgggcctatgattgttcatgatgagcatggaggagtgacggcaggaactttctgtgctctgacaacccttatgcaccaactagaaaaagaaaattccgtggatgtttaccaggtagccaagatgatcaatctgatgaggccaggagtctttgctgacattgagcagtatcagtttctctacaaagtgatcctcagccttgtgagcacaaggcaggaagagaatccatccacctctctggacagtaatggtgcagcattgcctgatggaaatatagctgagagcttagagtctttagtttaacacagaaaggggtgggggaactcacatctgagcattgttttcctcttcctaaaattaggcaggaaaatcagtctagttctgttatctgttgatttcccatcacctgacagtaactttcatgacataggattctgccgccaaatttatatcattaacaatgtgtgcctttttgcaagacttgtaatttacttattatgtttgaactaaaatgattgaattttacagtatttctaagaatggaattgtggtatttttttctgtattgattttaacagaaaatttcaatttatagaggttaggaattccaaactacagaaaatgtttgtttttagtgtcaaatttttagctgtatttgtagcaattatcaggtttgctagaaatataacttttaatacagtagcctgtaaataaaacactcttccatatgatattcaacattttacaactgcagtattcacctaaagtagaaataatctgttacttattgtaaatactgccctagtgtctccatggaccaaatttatatttataattgtagatttttatattttactactgagtcaagttttctagttctgtgtaattgtttagtttaatgacgtagttcattagctggtcttactctaccagttttctgacattgtattgtgttacctaagtcattaactttgtttcagcatgtaattttaacttttgtggaaaatagaaataccttcattttgaaagaagtttttatgagaataacaccttaccaaacattgttcaaatggtttttatccaaggaattgcaaaaataaatataaatattgccattaaaaaaaaaaaa

SEQ ID NO: 211 - DNA, 4362 bp, Homo sapiens
atacacacacgcgcgcgcgcacacacacatacgcatgtacacgcgcacccgcacccgcgcgcctgtatcccgtgctgtttccctggcagacacacaggcgctcacgagtctctccttgccagcctgcagggcggcgacccccaaaacccagctccgggtcccaacctaggcaagaagctgcttctctgccaacagctcctcttcggcctccgtcacagccacctggaccctaccctttcgcgactgctgctgctgctgcccggacgtggaagcagcaagaggcgcttggtcaagacacactgacggtgcatatcttttaccatatttaatactacttatggtaataggtattcccctttttttcttggaactctctgtgggtcaaagaattcggcgaggcagcattggtgtatggaattacataagccctaaactgggcgggattggatttgcaagttgtgtagtgtgctattttgtagctctctactacaacgtcatcattggctggagtttgttttatttttctcagtcttttcagcaacccctgccttgggatcagtgtcctttggtgaaaaatgcttcacacacttttgtagaaccagaatgtgaacaaagttctgccaccacctattactggtacagggaagcactgaatatttcaagttccatttctgaaagtgggggcttaaactggaagatgaccatctgcttgttggctgcctgggtcatggtttgcttggctatgatcaaaggcattcagtcttctggaaaaatcatatattttagttctctgtttccatatgtggtacttatttgcttcctcatcagagcattccttttaaatggttcaattgatggcattcgccacatgtttacccctaagcttgaaataatgctggagcccaaggtctggagagaagctgctactcaagtgttctttgccttaggtctgggatttggtggtgtcattgccttttcaagctacaacaagagagacaacaactgccactttgatgctgtcctggtgtccttcatcaattttttcacttctgtcctggcaacattggtggtgtttgcagttctgggcttcaaagcaaatgtcataaatgagaaatgcattacacaaaattcagagacgatcatgaaatttttgaaaatggggaacattagtcaggatattattccccatcatatcaacctttcaactgttactgcagaagattatcatttagtttatgacatcattcaaaaagtgaaagaagaagagtttcctgctcttcatctcaattcctgtaaaattgaagaagagctaaataaagctgttcaggggaccggcttagcttttattgcctttacagaagcgatgacacattttcctgcatctcccttctggtcagtgatgtttttcctcatgctggtcaatctaggccttggcagtatgtttggaaccattgaagggattgtcacgcctattgtggacactttcaaagtgaggaaagaaattcttactgttatctgttgtcttctggcattttgtattggcctgatatttgtgcaacgctctggaaattactttgttacaatgtttgatgattattctgctacactgcctctgctaattgtagtcattttggagaatattgctgtatgctttgtttatggcatagataagtttatggaagacctaaaagatatgctgggctttgctcccagcagatattactactatatgtggaaatatatttctcctctaatgctattatcattgctaatagctagtgttgtgaatatgggattaagtcctcctggctataacgcatggattgaagataaggcatctgaagaatttctgagctatccaacatggggactggttgtttgtgtctctctggttgtctttgcaatactcccagtccctgtagttttcattgttcgtcgcttcaaccttatagatgatagttctggtaatttagcatctgtgacctataagagaggaagggtcctgaaagagcctgtgaacttagagggcgatgatacaagcctcattcacggaaaaataccgagcgagatgccatctccaaattttggtaaaaatatttatcgaaaacagagtggatccccaactctggatactgctcccaatggacggtatggaatagggtacttgatggcagatattatgccagatatgccagaatctgatttgtagctgggggaaaagtcagtgggttttatttggttcatttttaccaatgaacattggccctagtaggagaagcattaggcttcacttatcagagggcaatctcaggtgttccgtggctgtgatctttaatcctaacagtatatgtcagttcaacttgagcattcttttggattctttggtttacatttgtgcagaaaggattgcagacaaatcttaggagggctgaggtacatgtttgccaggatttttttttaagtacctttggtgtattttcaaatatttctatctcttaaaaaaatggtattacctcagtttctaataatttctgggtttagtagtgttgacaattaaaaatggtatacattaaaatttataagtttgccttcagggtaacttccagtgtcacaatgagcagttctgtaagtgggtgcctctcagcacatttctatgaatatattatgtagataggctgtattgattttggtagcattgacaccttcttaggcaattagttgaagaaaactgcaaaatattttcttatgtaatagctgtatagagcaatagcaatcaaagcatgagaaggcactaacgctgggatgaaagatgagattcagaggtgactgagaatcatgtgagtgatggctgtatattttgtgtaaaatatatgtgtgaaaatgaactaagagtgagttactcagcactctcaagaattatgcagattctgcatttttcttatgccgtgtgcctaaaaacctacttgatatttattgtggtttcaagattattcatagtatatttatacaatatacttgcaatgcatttaagtacttaaagtactaatttgaaaacttgaagcaagatggcattttaattaatatatttctgttttgcttctgttttatgcaaatataaatcatttttaagtgattgttaaaattgtaatgcattacattttaatctacaaataaacaaagtttaaaaatgatgtttgtttttcacattgattttctttgtatcacctgaactggattgtctttcatttcagtcagcacttagacatttcataataactaaacatcacattccaagtgggatgaattacattaattgaatagagttaccaccgcttcagagtctaaggaaaaatagagtattatggttcaatggtgttcttatgtagtcttatgattcttgaaaaagtacttacagcctcccaagaaaccatgtgtacaattgactgcttgctgattcaatattgtctgcaaagtataaaagactatgatttttaaataaaactgttgtatatatgaaattggatagagcagaggaacctcactgagtgtcctctagttaaaaatctttcatttatcctaccaccagatcagttacatttttaaaacaatgatggatatagcagcaaaataagtgaggtaatacacatgccatatcaattgatttatttcagccagtattctcgctctgctatagatagatgttaataaatggtatcacagcatttaaagtattaaatccactggtgcataaatttttagtcttttaaaatatattcatgaatattgtgtttgtatccctttaaaatgtttaatattttataaataggcagtatatgcacattatacaaaactaaaaaattatgacaattcagtgtgaagtaagttctcatccaacatttctcctggccatccattctccatctttaaaggcaatcaccattgccagtttcttctgtatccttctggaaatacaatatattacataaatgacagcattctatattctctcttctatatcttacctatttctgtgaataatttattttggacagcattttatgtatgaatattcacaaatgtgcttccttatttcagaggctgaactaataaaaattttgtttatttttgtgttgaggcaatatttttatatggtaccctaatctttaatacttaacctgccagactttaaccgtaacacaataatgtattgccaaatagcaccattcttcttctctcactctcttgccatgggggctcttaaaaaaaaaagtatacatctaaggtgtacaacatgctgttttgatgtatataaatatagtgaaagcaaataaagtatatatctaaggtgtacaaaaaaaaaaa

SEQ ID NO: 212 - DNA, 2816 bp, Homo sapiens
tgggggcgtcctccttcgtccccgcccggctgtcaagctgtgttctagcggccgagggaccgaggggggctaagaaagggggcgcccagccatgcagaggcaaaaaggcgctgcggaacggggtccccgtcgccagtgctgaggcaggaggtcggagccacaagtgaggggctgggaagcaggacccagcacgggcgtcttggcaggcggccgggcgcagggccaggctgctggggacgctcagggctttccacccaagccatgggcgctgtcgggcactcgggggtcccctcgtggctccggccactcggcgtgggcattacgttggcttcacatcgccatccagcctcgaagccaacaggactgaaaaatagcttcggccaaacgttctcctcccgctaaggagaggggtcgagtgcgtcagcccgaggggactggagagggatgccctagccctcgaggggcggaggacccgcggttgaaggaggcagcgggagcggagagcgccctccttgaccatcgaatgcctccttctgtgtttccattcctgtcgagtgggctgggccacgctgaccaccctggaggagggacggacgacgctcggcgggctctgaccgtgccgccttcttgtggctgctgactgggatccaggagggagtgggcatggggcgcagccgcgcctccctccctccccgcctcccgggcgccggggttggcgatgtggagacgtgaggggacccgtcggctgctccggcttctccaggactccgccaggcgcccgcgcgtccctcctcacccggaggaggagaggctccgcgcggggctccgaggcgggcggcgcgcggagccggagtcccagcctcgccatgggacataacgggagctggatctctccaaatgccagcgagccgcacaacgcgtccggcgccgaggctgcgggtgtgaaccgcagcgcgctcggggagttcggcgaggcgcagctgtaccgccagttcaccaccaccgtgcaggtcgtcatcttcataggctcgctgctcggaaacttcatggtgttatggtcaacttgccgcacaaccgtgttcaaatctgtcaccaacaggttcattaaaaacctggcctgctcggggatttgtgccagcctggtctgtgtgcccttcgacatcatcctcagcaccagtcctcactgttgctggtggatctacaccatgctcttctgcaaggtcgtcaaatttttgcacaaagtattctgctctgtgaccatcctcagcttccctgctattgctttggacaggtactactcagtcctctatccactggagaggaaaatatctgatgccaagtcccgtgaactggtgatgtacatctgggcccatgcagtggtggccagtgtccctgtgtttgcagtaaccaatgtggctgacatctatgccacgtccacctgcacggaagtctggagcaactccttgggccacctggtgtacgttctggtgtataacatcaccacggtcattgtgcctgtggtggtggtgttcctcttcttgatactgatccgacgggccctgagtgccagccagaagaagaaggtcatcatagcagcgctccggaccccacagaacaccatctctattccctatgcctcccagcgggaggccgagctgcacgccaccctgctctccatggtgatggtcttcatcttgtgtagcgtgccctatgccaccctggtcgtctaccagactgtgctcaatgtccctgacacttccgtcttcttgctgctcactgctgtttggctgcccaaagtctccctgctggcaaaccctgttctctttcttactgtgaacaaatctgtccgcaagtgcttgatagggaccctggtgcaactacaccaccggtacagtcgccgtaatgtggtcagtacagggagtggcatggctgaggccagcctggaacccagcatacgctcgggtagccagctcctggagatgttccacattgggcagcagcagatctttaagcccacagaggatgaggaagagagtgaggccaagtacattggctcagctgacttccaggccaaggagatatttagcacctgcctggagggagagcaggggccacagtttgcgccctctgccccacccctgagcacagtggactctgtatcccaggtggcaccggcagcccctgtggaacctgaaacattccctgataagtattccctgcagtttggctttgggccttttgagttgcctcctcagtggctctcagagacccgaaacagcaagaagcggctgcttccccccttgggcaacaccccagaagagctgatccagacaaaggtgcccaaggtaggcagggtggagcggaagatgagcagaaacaataaagtgagcatttttccaaaggtggattcctagcaaggattgtaaattcttggaagcaacggggggcttccatattcccaccagagtgtgggaatgctgtggccatgtgattgtatgatctccttgcaactcagtgtgagttgattcctccaatatgggccagatgcttttgaatgatagggaaatctacataaaatccagtgtcctctttattgagggagtatatgtatccatctcagtgatccatgtccttagtgaagtccacattattctctgtggggacaagagctgggcagttttgaatgggtcttgaggtgggtaccccatgtgcactttctgaggatgcctcacttccctgggctctgcagagaacacacagagagaagactttcagagctcacaggagcagggagcaggagcactctaagggaattc

SEQ ID NO: 213 - DNA, 6860 bp, Homo sapiens
ctccgcccgggagcggcggcctctccggtgacagaggagtagtgagcggcacggggtgaggctgcagccaactccgctccccgcgcactcggctgcccaggcgctcggaacccagcagcggcgctcctccgcggtgccggtcgcccgcgatgcccgcttagcagcgtgtagcagcggccagcatcaccacacccgcggcaccgcgctgccggccgcagagccgggccagagccttgcacccctgccccagcccccaccccgccccccgccctgaaatgacttgttaatcggcgcagacaccaccaaggggactcaccgaagtggaatccaagtggaatttggatttggagaagagtttcttgaacatttaccctcttccttgttggttttctttttctttttcttctttttttttttggcttcttttttcctctccccttctccgctcgtcattggagatgaacacatcgcgtttgcatcccagaaagtagtcgccgcgactatttcccccaaagagacaagcacacatgtaggaatgacaaaggcttgcgaaggagagagcgcagcccgcggcccggagagatcccctcgataatggattactaaatgggatacacgctgtaccagttcgctccgagccccggccgcctgtccgtcgatgcaccgaaaagggtgaagtagagaaataaagtctccccgctgaactactatgaggtcagaagccttgctgctatatttcacactgctacactttgctggggctggtttcccagaagattctgagccaatcagtatttcgcatggcaactatacaaaacagtatccggtgtttgtgggccacaagccaggacggaacaccacacagaggcacaggctggacatccagatgattatgatcatgaacggaaccctctacattgctgctagggaccatatttatactgttgatatagacacatcacacacggaagaaatttattgtagcaaaaaactgacatggaaatctagacaggccgatgtagacacatgcagaatgaagggaaaacataaggatgagtgccacaactttattaaagttcttctaaagaaaaacgatgatgcattgtttgtctgtggaactaatgccttcaacccttcctgcagaaactataagatggatacattggaaccattcggggatgaattcagcggaatggccagatgcccatatgatgccaaacatgccaacgttgcactgtttgcagatggaaaactatactcagccacagtgactgacttccttgccattgacgcagtcatttaccggagtcttggagaaagccctaccctgcggaccgtcaagcacgattcaaaatggttgaaagaaccatactttgttcaagccgtggattacggagattatatctacttcttcttcagggaaatagcagtggagtataacaccatgggaaaggtagttttcccaagagtggctcaggtttgtaagaatgatatgggaggatctcaaagagtcctggagaaacagtggacgtcgttcctgaaggcgcgcttgaactgctcagttcctggagactctcatttttatttcaacattctccaggcagttacagatgtgattcgtatcaacgggcgtgatgttgtcctggcaacgttttctacaccttataacagcatccctgggtctgcagtctgtgcctatgacatgcttgacattgccagtgtttttactgggagattcaaggaacagaagtctcctgattccacctggacaccagttcctgatgaacgagttcctaagcccaggccaggttgctgtgctggctcatcctccttagaaagatatgcaacctccaatgagttccctgatgataccctgaacttcatcaagacgcacccgctcatggatgaggcagtgccctccatcttcaacaggccatggttcctgagaacaatggtcagataccgccttaccaaaattgcagtggacacagctgctgggccatatcagaatcacactgtggtttttctgggatcagagaagggaatcatcttgaagtttttggccagaataggaaatagtggttttctaaatgacagccttttcctggaggagatgagtgtttacaactctgaaaaatgcagctatgatggagtcgaagacaaaaggatcatgggcatgcagctggacagagcaagcagctctctgtatgttgcgttctctacctgtgtgataaaggttccccttggccggtgtgaacgacatgggaagtgtaaaaaaacctgtattgcctccagagacccatattgtggatggataaaggaaggtggtgcctgcagccatttatcacccaacagcagactgacttttgagcaggacatagagcgtggcaatacagatggtctgggggactgtcacaattcctttgtggcactgaatgggcattccagttccctcttgcccagcacaaccacatcagattcgacggctcaagaggggtatgagtctaggggaggaatgctggactggaagcatctgcttgactcacctgacagcacagaccctttgggggcagtgtcttcccataatcaccaagacaagaagggagtgattcgggaaagttacctcaaaggccacgaccagctggttcccgtcaccctcttggccattgcagtcatcctggctttcgtcatgggggccgtcttctcgggcatcaccgtctactgcgtctgtgatcatcggcgcaaagacgtggctgtggtgcagcgcaaggagaaggagctcacccactcgcgccggggctccatgagcagcgtcaccaagctcagcggcctctttggggacactcaatccaaagacccaaagccggaggccatcctcacgccactcatgcacaacggcaagctcgccactcccggcaacacggccaagatgctcattaaagcagaccagcaccacctggacctgacggccctccccaccccagagtcaaccccaacgctgcagcagaagcggaagcccagccgcggcagccgcgagtgggagaggaaccagaacctcatcaatgcctgcacaaaggacatgccccccatgggctcccctgtgattcccacggacctgcccctgcgggcctcccccagccacatccccagcgtggtggtcctgcccatcacgcagcagggctaccagcatgagtacgtggaccagcccaaaatgagcgaggtggcccagatggcgctggaggaccaggccgccacactggagtataagaccatcaaggaacatctcagcagcaagagtcccaaccatggggtgaaccttgtggagaacctggacagcctgccccccaaagttccacagcgggaggcctccctgggtcccccgggagcctccctgtctcagaccggtctaagcaagcggctggaaatgcaccactcctcttcctacggggttgactataagaggagctaccccacgaactcgctcacgagaagccaccaggccaccactctcaaaagaaacaacactaactcctccaattcctctcacctctccagaaaccagagctttggcaggggagacaacccgccgcccgccccgcagagggtggactccatccaggtgcacagctcccagccatctggccaggccgtgactgtctcgaggcagcccagcctcaacgcctacaactcactgacaaggtcggggctgaagcgtacgccctcgctaaagccggacgtaccccccaaaccatcctttgctcccctttccacatccatgaagcccaatgatgcgtgtacataatcccagggggagggggtcaggtgtcgaaccagcaggcaaggcgaggtgcccgctcagctcagcaaggttctcaactgcctcgagtacccaccagaccaagaaggcctgcggcagagccgaggacgctgggtcctcctctctgggacacaggggtactcacgaaaactgggccgcgtggtttggtgaaggtttgcaacggcggggactcaccttcattctcttccttcactttcccccacaccctacaacaggtcggacccacaaaagacttcagttatcatcacaaacatgagccaaaagcacatacctaccccatcccccacccccacacacacacacacacacacatgcacacaacacatacacacacacgcacagaggtgaacagaaactgaaacattttgtccacaacttcacgggacgtggccagactgggtttgcgttccaacctgcaaaacacaaatacattttttaaaatcaagaaaatttaaaaagacaaaaaaaaaagaattcattgataattctaactcagactttaacaatggcagaagtttactatgcgcaaatactgtgaaatgcccgccagtgttacagctttctgttgcagcagataaatgccatgttgggcaactatgtcatagatttctgctcctcctctcttttaatgaaataacgtgaccgttaacgcaagtaactctttatttattgttcaccctttttttccttaaggaaaggactcttccaaatatcatcctatgaacagctcttcagaaagcccattgaaagttaaactatttaacgtgaaatccattaactggaataattgagtttctttatttttacaataaattcactgagtaaataagttggagctggaattctgagctttgtgtttggactgtctggtctgtagctaaaggaaaaagttaggaggggaatatttatttaaatctatcagttcattgcctggtcaggtctctggcctataaacatgcaaaaaaactaattcatgttaaagtccttccagatcctaatttctaaagcaatcaggagagaaagcttttagaatggcacatcatatctcattgatgccaacatggttttgtccatggttctgactttctgtgaaggcaccagcttgcaatatgccatcccatttcaccttgcatgtgagacagcaaacaaaatccacaaatggtgtgaactaatatgctggctgctaccttgcataaattaatgatttgatcacacgggttcttcgtggggttacatctgtgaatagcctgttttccacatgtaaatttgtgccttacaccttgagttgtgtacacttgtaaactctttatgatcaactgttcccccttttgaaataagtgcagatatttatttaaccctcccttccccaccctctgccccacttccagccctctgaaagattggagtcaagcagatggaagaatgcagtggtgatagttgtcatgcgacagcctgagaacgctgggcagcaccacaccctccaattcacactgccttctagttgtgccaactggaaccaccctttggctgtgctgcgaagcatggaccccagtgttgttgtgggtgtgtcaaatcccctttcatcctcaagagctccctgcttcccttagattatttcaatacggtgatatccttatttgctagcagaaaagggactaacgtcccattcctcttttctgctgcgtccactggctagagagcaggcggtgcgcggttgggcagacacctgggaggagtctccaagccatgtgcacagcacacacgtgcagtgcacacaaagaaatgacatggaaatagatgcaggcaggctggtccctgctgtgattaacgagtaactccaagtacaaggccgaccacaatggatgctgcaaaaacgttgactggggcaaaggattttttattttattttttattttgttaattatgtttttaggggatgggaggtggtgtgtgtttttctcctcttggttttcatttgctcaagcacacaaaagggacttttgtttactctatcatgaacaaaggaactgtccacatactgtaaaccatgagcagtgttgttgttgtttttttaaacagtatatttggtggtctctttgtctgcttttatttccagttcgatcttctgggtttagttttgtctttaaaaagaattcaaaaaaagactgacaatgacagttttgagttggatagtgaaaaagtggagcctccataatcagtgtggttgccttcagacctgagtacttagctgagggtgggtgagagccctttgttccaaaagtccattagttttgctgttgtttaggagtaggtggttgttgttgtttttactttttttttttttggcttttgtaatggaatccatgttcacatcctgtgaactctgtctcctgaaaccctgaagtatttcctagaacctgaaatattgttttcttccttgaattttctctagaaatgcagaaattaggaaggtgatgggtctgtatccccctgcccccttctttcccatgcttgactcccgagagtactggcagtgcagcacccatcattgacgtaagcggctgtcttgtccagtgtttgtaggcatcactgcctcagctgttaaggagacctgtgtcaaaacttacatccacattcctacacccccacaacccatcacttctggtgttaaccctaaaatacccacatgtattgagctggtcttctgcatttaagtatttctccccagtttttttccccactgtgtgtggggggagggtccataaacccgagtgtgcctttgctttccacccttgctagacactggtagatgcaacaaactcagatttatatttgttgtaaagttgtaaaaatattgtgatgtcaccaattttccttccatctccacatcccctaacatctgattcacgacttaatgtatgttgtaagaaaagaaaaaagaaaagaaaaaaagggaaaaaagaaaagcaaggaaaaggctctttattacttaaaagtaataaaacctgactgttctatatta

SEQ ID NO: 214 - DNA, 5820 bp, Homo sapiens
agccgctgcgcccgagctggcctgcgagttcagggctcctgtcgctctccaggagcaacctctactccggacgcacaggcattccccgcgcccctccagccctcgccgccctcgccaccgctcccggccgccgcgctccggtacacacaggatccctgctgggcaccaacagctccaccatggggctggcctggggactaggcgtcctgttcctgatgcatgtgtgtggcaccaaccgcattccagagtctggcggagacaacagcgtgtttgacatctttgaactcaccggggccgcccgcaaggggtctgggcgccgactggtgaagggccccgacccttccagcccagctttccgcatcgaggatgccaacctgatcccccctgtgcctgatgacaagttccaagacctggtggatgctgtgcgggcagaaaagggtttcctccttctggcatccctgaggcagatgaagaagacccggggcacgctgctggccctggagcggaaagaccactctggccaggtcttcagcgtggtgtccaatggcaaggcgggcaccctggacctcagcctgaccgtccaaggaaagcagcacgtggtgtctgtggaagaagctctcctggcaaccggccagtggaagagcatcaccctgtttgtgcaggaagacagggcccagctgtacatcgactgtgaaaagatggagaatgctgagttggacgtccccatccaaagcgtcttcaccagagacctggccagcatcgccagactccgcatcgcaaaggggggcgtcaatgacaatttccagggggtgctgcagaatgtgaggtttgtctttggaaccacaccagaagacatcctcaggaacaaaggctgctccagctctaccagtgtcctcctcacccttgacaacaacgtggtgaatggttccagccctgccatccgcactaactacattggccacaagacaaaggacttgcaagccatctgcggcatctcctgtgatgagctgtccagcatggtcctggaactcaggggcctgcgcaccattgtgaccacgctgcaggacagcatccgcaaagtgactgaagagaacaaagagttggccaatgagctgaggcggcctcccctatgctatcacaacggagttcagtacagaaataacgaggaatggactgttgatagctgcactgagtgtcactgtcagaactcagttaccatctgcaaaaaggtgtcctgccccatcatgccctgctccaatgccacagttcctgatggagaatgctgtcctcgctgttggcccagcgactctgcggacgatggctggtctccatggtccgagtggacctcctgttctacgagctgtggcaatggaattcagcagcgcggccgctcctgcgatagcctcaacaaccgatgtgagggctcctcggtccagacacggacctgccacattcaggagtgtgacaagagatttaaacaggatggtggctggagccactggtccccgtggtcatcttgttctgtgacatgtggtgatggtgtgatcacaaggatccggctctgcaactctcccagcccccagatgaacgggaaaccctgtgaaggcgaagcgcgggagaccaaagcctgcaagaaagacgcctgccccatcaatggaggctggggtccttggtcaccatgggacatctgttctgtcacctgtggaggaggggtacagaaacgtagtcgtctctgcaacaaccccacaccccagtttggaggcaaggactgcgttggtgatgtaacagaaaaccagatctgcaacaagcaggactgtccaattgatggatgcctgtccaatccctgctttgccggcgtgaagtgtactagctaccctgatggcagctggaaatgtggtgcttgtccccctggttacagtggaaatggcatccagtgcacagatgttgatgagtgcaaagaagtgcctgatgcctgcttcaaccacaatggagagcaccggtgtgagaacacggaccccggctacaactgcctgccctgccccccacgcttcaccggctcacagcccttcggccagggtgtcgaacatgccacggccaacaaacaggtgtgcaagccccgtaacccctgcacggatgggacccacgactgcaacaagaacgccaagtgcaactacctgggccactatagcgaccccatgtaccgctgcgagtgcaagcctggctacgctggcaatggcatcatctgcggggaggacacagacctggatggctggcccaatgagaacctggtgtgcgtggccaatgcgacttaccactgcaaaaaggataattgccccaaccttcccaactcagggcaggaagactatgacaaggatggaattggtgatgcctgtgatgatgacgatgacaatgataaaattccagatgacagggacaactgtccattccattacaacccagctcagtatgactatgacagagatgatgtgggagaccgctgtgacaactgtccctacaaccacaacccagatcaggcagacacagacaacaatggggaaggagacgcctgtgctgcagacattgatggagacggtatcctcaatgaacgggacaactgccagtacgtctacaatgtggaccagagagacactgatatggatggggttggagatcagtgtgacaattgccccttggaacacaatccggatcagctggactctgactcagaccgcattggagatacctgtgacaacaatcaggatattgatgaagatggccaccagaacaatctggacaactgtccctatgtgcccaatgccaaccaggctgaccatgacaaagatggcaagggagatgcctgtgaccacgatgatgacaacgatggcattcctgatgacaaggacaactgcagactcgtgcccaatcccgaccagaaggactctgacggcgatggtcgaggtgatgcctgcaaagatgattttgaccatgacagtgtgccagacatcgatgacatctgtcctgagaatgttgacatcagtgagaccgatttccgccgattccagatgattcctctggaccccaaagggacatcccaaaatgaccctaactgggttgtacgccatcagggtaaagaactcgtccagactgtcaactgtgatcctggactcgctgtaggttatgatgagtttaatgctgtggacttcagtggcaccttcttcatcaacaccgaaagggacgatgactatgctggatttgtctttggctaccagtccagcagccgcttttatgttgtgatgtggaagcaagtcacccagtcctactgggacaccaaccccacgagggctcagggatactcgggcctttctgtgaaagttgtaaactccaccacagggcctggcgagcacctgcggaacgccctgtggcacacaggaaacacccctggccaggtgcgcaccctgtggcatgaccctcgtcacataggctggaaagatttcaccgcctacagatggcgtctcagccacaggccaaagacgggtttcattagagtggtgatgtatgaagggaagaaaatcatggctgactcaggacccatctatgataaaacctatgctggtggtagactagggttgtttgtcttctctcaagaaatggtgttcttctctgacctgaaatacgaatgtagagatccctaatcatcaaattgttgattgaaagactgatcataaaccaatgctggtattgcaccttctggaactatgggcttgagaaaacccccaggatcacttctccttggcttccttcttttctgtgcttgcatcagtgtggactcctagaacgtgcgacctgcctcaagaaaatgcagttttcaaaaacagactcagcattcagcctccaatgaataagacatcttccaagcatataaacaattgctttggtttccttttgaaaaagcatctacttgcttcagttgggaaggtgcccattccactctgcctttgtcacagagcagggtgctattgtgaggccatctctgagcagtggactcaaaagcattttcaggcatgtcagagaagggaggactcactagaattagcaaacaaaaccaccctgacatcctccttcaggaacacggggagcagaggccaaagcactaaggggagggcgcatacccgagacgattgtatgaagaaaatatggaggaactgttacatgttcggtactaagtcattttcaggggattgaaagactattgctggatttcatgatgctgactggcgttagctgattaacccatgtaaataggcacttaaatagaagcaggaaagggagacaaagactggcttctggacttcctccctgatccccacccttactcatcacctgcagtggccagaattagggaatcagaatcaaaccagtgtaaggcagtgctggctgccattgcctggtcacattgaaattggtggcttcattctagatgtagcttgtgcagatgtagcaggaaaataggaaaacctaccatctcagtgagcaccagctgcctcccaaaggaggggcagccgtgcttatatttttatggttacaatggcacaaaattattatcaacctaactaaaacattccttttctcttttttcctgaattatcatggagttttctaattctctcttttggaatgtagattttttttaaatgctttacgatgtaaaatatttattttttacttattctggaagatctggctgaaggattattcatggaacaggaagaagcgtaaagactatccatgtcatctttgttgagagtcttcgtgactgtaagattgtaaatacagattatttattaactctgttctgcctggaaatttaggcttcatacggaaagtgtttgagagcaagtagttgacatttatcagcaaatctcttgcaagaacagcacaaggaaaatcagtctaataagctgctctgccccttgtgctcagagtggatgttatgggattctttttttctctgttttatcttttcaagtggaattagttggttatccatttgcaaatgttttaaattgcaaagaaagccatgaggtcttcaatactgttttaccccatcccttgtgcatatttccagggagaaggaaagcatatacacttttttctttcatttttccaaaagagaaaaaaatgacaaaaggtgaaacttacatacaaatattacctcatttgttgtgtgactgagtaaagaatttttggatcaagcggaaagagtttaagtgtctaacaaacttaaagctactgtagtacctaaaaagtcagtgttgtacatagcataaaaactctgcagagaagtattcccaataaggaaatagcattgaaatgttaaatacaatttctgaaagttatgttttttttctatcatctggtataccattgctttatttttataaattattttctcattgccattggaatagatatctcagattgtgtagatatgctatttaaataatttatcaggaaatactgcctgtagagttagtatttctatttttatataatgtttgcacactgaattgaagaattgttggttttttcttttttttgttttgtttttttttttttttttttttgcttttgacctcccatttttactatttgccaatacctttttctaggaatgtgcttttttttgtacacatttttatccattttacattctaaagcagtgtaagttgtatattactgtttcttatgtacaaggaacaacaataaatcatatggaaatttatatttataaaaaaaaaaaaaaaaaaaaaaaaaaaaaaa

SEQ ID NO: 215 - DNA, 3654 bp, Homo sapiens
agatgccgcgggggccgctcgcagccgccgctgacttgtgaatgggaccgggactggggccgggactgacaccgcagcgcttgccctgcgccagggactggcggctcggaggttgcgtccaccctcaagggccccagaaatcactgtgttttcagctcagcggccctgtgacattccttcgtgttgtcatttgttgagtgaccaatcagatgggtggagtgtgttacagaaattggcagcaagtatccaatgggtgaagaagaagctaactggggacgtgggcagccctgacgtgatgagctcaaccagcagagacattccatcccaagagaggtctgcgtgacgcgtccgggaggccaccctcagcaagaccaccgtacagttggtggaaggggtgacagctgcattctcctgtgcctaccacgtaaccaaaaatgaaggagaactactgtttacaagccgccctggtgtgcctgggcatgctgtgccacagccatgcctttgccccagagcggcgggggcacctgcggccctccttccatgggcaccatgagaagggcaaggaggggcaggtgctacagcgctccaagcgtggctgggtctggaaccagttcttcgtgatagaggagtacaccgggcctgaccccgtgcttgtgggcaggcttcattcagatattgactctggtgatgggaacattaaatacattctctcaggggaaggagctggaaccatttttgtgattgatgacaaatcagggaacattcatgccaccaagacgttggatcgagaagagagagcccagtacacgttgatggctcaggcggtggacagggacaccaatcggccactggagccaccgtcggaattcattgtcaaggtccaggacattaatgacaaccctccggagttcctgcacgagacctatcatgccaacgtgcctgagaggtccaatgtgggaacgtcagtaatccaggtgacagcttcagatgcagatgaccccacttatggaaatagcgccaagttagtgtacagtatcctcgaaggacaaccctatttttcggtggaagcacagacaggtatcatcagaacagccctacccaacatggacagggaggccaaggaggagtaccacgtggtgatccaggccaaggacatgggtggacatatgggcggactctcagggacaaccaaagtgacgatcacactgaccgatgtcaatgacaacccaccaaagtttccgcagagcgtataccagatgtctgtgtcagaagcagccgtccctggggaggaagtaggaagagtgaaagctaaagatccagacattggagaaaatggcttagtcacatacaatattgttgatggagatggtatggaatcgtttgaaatcacaacggactatgaaacacaggagggggtgataaagctgaaaaagcctgtagattttgaaaccaaaagagcctatagcttgaaggtagaggcagccaacgtgcacatcgacccgaagtttatcagcaatggccctttcaaggacactgtgaccgtcaagatctcagtagaagatgctgatgagccccctatgttcttggccccaagttacatccacgaagtccaagaaaatgcagctgctggcaccgtggttgggagagtgcatgccaaagaccctgatgctgccaacagcccgataaggtattccatcgatcgtcacactgacctcgacagatttttcactattaatccagaggatggttttattaaaactacaaaacctctggatagagaggaaacagcctggctcaacatcactgtctttgcagcagaaatccacaatcggcatcaggaagccaaagtcccagtggccattagggtccttgatgtcaacgataatgctcccaagtttgctgccccttatgaaggtttcatctgtgagagtgatcagaccaagccactttccaaccagccaattgttacaattagtgcagatgacaaggatgacacggccaatggaccaagatttatcttcagcctaccccctgaaatcattcacaatccaaatttcacagtcagagacaaccgagataacacagcaggcgtgtacgcccggcgtggagggttcagtcggcagaagcaggacttgtaccttctgcccatagtgatcagcgatggcggcatcccgcccatgagtagcaccaacaccctcaccatcaaagtctgcgggtgcgacgtgaacggggcactgctctcctgcaacgcagaggcctacattctgaacgccggcctgagcacaggcgccctgatcgccatcctcgcctgcatcgtcattctcctggtcattgtagtattgtttgtgaccctgagaaggcaaaagaaagaaccactcattgtctttgaggaagaagatgtccgtgagaacatcattacttatgatgatgaagggggtggggaagaagacacagaagcctttgatattgccaccctccagaatcctgatggtatcaatggatttatcccccgcaaagacatcaaacctgagtatcagtacatgcctagacctgggctccggccagcgcccaacagcgtggatgtcgatgacttcatcaacacgagaatacaggaggcagacaatgaccccacggctcctccttatgactccattcaaatctacggttatgaaggcaggggctcagtggccgggtccctgagctccctagagtcggccaccacagattcagacttggactatgattatctacagaactggggacctcgttttaagaaactagcagatttgtatggttccaaagacacttttgatgacgattcttaacaataacgatacaaatttggccttaagaactgtgtctggcgttctcaagaatctagaagatgtgtaaacaggtatttttttaaatcaaggaaaggctcatttaaaacaggcaaagttttacagagaggatacatttaataaaactgcgaggacatcaaagtggtaaatactgtgaaataccttttctcacaaaaaggcaaatattgaagttgtttatcaacttcgctagaaaaaaaaaacacttggcatacaaaatatttaagtgaaggagaagtctaacgctgaactgacaatgaagggaaattgtttatgtgttatgaacatccaagtctttcttcttttttaagttgtcaaagaagcttccacaaaattagaaaggacaacagttctgagctgtaatttcgccttaaactctggacactctatatgtagtgcatttttaaacttgaaatatataatattcagccagcttaaacccatacaatgtatgtacaatacaatgtacaattatgtctcttgagcatcaatcttgttactgctgattcttgtaaatctttttgcttctactttcatcttaaactaatacgtgccagatataactgtcttgtttcagtgagagacgccctatttctatgtcatttttaatgtatctatttgtacaattttaaagttcttattttagtatacgtataaatatcagtattctgacatgtaagaaaatgttacggcatcacacttatattttatgaacattgtactgttgctttaatatgagcttcaatataagaagcaatctttgaaataaaaaaagatttttttttaaaaaaaa

SEQ ID NO: 216 - DNA, 3282 bp, Homo sapiens
tgcaaacaactctggcgatgccaaaattcccctccaagtgacacggctttgcgaaggaggtttcctcaggctgggctctttctgtcattcccttctgcctttctcggcgacgataaaaggctttgctctggcaataggaatttagaaaaaaagaaaaagctgcgctaaactccaccgtgacctcaaactctttggactgtttgaaaaaaaaaaaattggaagaaaatccatcctccaagagaatcggcataggaggagatggaagttttcccctttctcttggttttgtccgtctggtggtctcgaacctgggactcggcgaatgcggattcgatcattcacatcggagcaatttttgatgaatctgccaaaaaggatgatgaggtatttcgcactgcggttggtgaccttaaccagaatgaggagatcttacagactgagaaaatcacattttcagtgacgtttgttgatggcaacaaccctttccaagcagttcaagaagcctgtgaacttatgaatcaaggcatcttggccctggtcagctccattggctgcacgtcagcaggatccctccagtctttggcagacgccatgcatatcccccacctcttcattcagcgctcaacagctgggaccccaaggagtggctgtggactcacccggagcaacaggaatgatgactacactctctcagttcgcccacctgtctacttgcatgatgttatcctaagagtggtcacagagtatgcctggcagaaattcattatattctatgatagtgaatacgatatccgtggaatacaggagttcttggacaaagtctctcagcagggaatggatgttgcacttcagaaggtagaaaacaacatcaataaaatgattaccactctctttgacaccatgagaatagaagaactgaatcgctatcgagacactcttaggcgagcgatccttgttatgaatcctgctacagccaaatccttcattactgaggttgtggagactaatttggttgcttttgactgtcactggatcattataaatgaggaaataaacgatgtggacgtacaggaacttgtaagaaggtcaattggaaggttaacgattattcggcagacatttccagttccccagaacataagtcagcggtgtttccgtggcaaccatcgaatatcttcaacattgtgtgatccaaaggatccatttgctcagaatatggagatttccaacctttacatatatgacacggtgcttctgcttgctaatgcttttcataagaagctggaggaccgaaagtggcacagcatggcaagtctgtcatgtatcagaaagaactcaaagccctggcagggtgggcgctccatgttggagaccatcaagaagggtggagttagtgggttgactggagagctagaatttggagaaaatggaggcaatcccaatgtccactttgaaatccttggaaccaactatggagaagagcttggcagaggtgttcgaaaacttggttgctggaatcctgtcacaggtctgaatgggtcactgactgacaagaaattggagaataacatgcgtggagtggttctacgtgtagtaactgttctggaagaaccttttgtgatggtctctgaaaatgtcttgggtaagccgaagaaataccagggcttctccattgatgttttggatgccttatctaactacctgggttttaactacgaaatttacgtagcaccggatcacaaatacggaagcccacaagaagatgggacatggaatggcttggtaggagaacttgtctttaagagagccgacatagggatttctgctttaaccatcactccagatcgtgaaaatgtggtggactttacgacacgttacatggactactcagtgggggtactacttcgaagggctgaaaagacagtggatatgtttgcctgtcttgcaccatttgatctctctctatgggcttgcattgctggcacagtccttctggtgggtctactggtctacctcttgaactggcttaatcccccacgattacaaatgggatcaatgacgtctactactctctacaactccatgtggtttgtgtatggatcttttgtacaacaaggcggggaagtcccgtacacgactctggctacccgaatgatgatgggggcttggtggctatttgctttgattgttatctcatcttacacggcaaacctcgctgctttcctcactattacacgcattgaaagttccatccagtctctccaggacctttccaagcaaacagaaatcccttatggcacagtcctagactctgcggtatatgagcatgtccgcatgaaaggactgaatccttttgagagggacagcatgtattcccaaatgtggcggatgatcaaccgaagcaatggatcggagaacaatgttctggagtcccaggcaggcattcaaaaggtaaaatatggaaattatgctttcgtatgggatgcagctgtattggaatatgtggctatcaatgacccagattgttccttttacaccattggaaatactgttgctgatcggggatatggaattgcattacaacatggcagtccttaccgagatgttttttcacaaaggatcctggagcttcagcagaatggtgacatggacatcctgaagcacaaatggtggcctaagaatggccagtgtgacctgtactcgtcagtggacacaaagcagaaaggaggcgccctggacataaagagctttgcaggggtcttttgtatcctggctgctggaattgtcctctcctgcttcatagccatgctggagacgtggtggaacaagaggaaaggctcccgggttccatcaaaagaggatgacaaggaaattgacctggagcacctccatagacgtgtaaatagcttgtgcacagatgacgacagcccccataaacagttttccacctcgtcaattgatttgacccctctggacattgacactttgccaacacgacaagcactggagcaaatcagtgatttcaggaacactcatattaccacaacaacctttatcccagagcagatccagactcttagccgcacactgtcagctaaagctgcttctggtttcacttttggcaacgtgcctgagcaccgaactggcccttttaggcacagggcacctaatgggggctttttcaggagtcctataaaaacaatgtcatctattccttatcaaccaactcctaccctggggctcaatctgggtaatgatccagaccgaggcacctccatatga

SEQ ID NO: 217 - DNA, 9648 bp, Homo sapiens
ggtttgtaatgatagggcggcagcagcagcagcagcagcagtggtggaacgaggaggtggagaattgagagcacgatgcatacacaggtgtttctgagtagtaattagatcgctgtgaaggaaaaagcacacctttgagttttcacctgtgaacactatagcgctgagagagacagtctgaaagcagaggaagacatcgatcagtaacaccaagagacaccaaagttgaaagttttgttttctttccctctgttttatttttcccccgtgtgtccctactatggtcagaaagcctgttgtgtccaccatctccaaaggaggttacctgcagggaaatgttaacgggaggctgccttccctgggcaacaaggagccacctgggcaggagaaagtgcagctgaagaggaaagtcactttactgaggggagtctccattatcattggcaccatcattggagcaggaatcttcatctctcctaagggcgtgctccagaacacgggcagcgtgggcatgtctctgaccatctggacggtgtgtggggtcctgtcactatttggagctttgtcttatgctgaattgggaacaactataaagaaatctggaggtcattacacatatattttggaagtctttggtccattaccagcttttgtacgagtctgggtggaactcctcataatacgccctgcagctactgctgtgatatccctggcatttggacgctacattctggaaccattttttattcaatgtgaaatccctgaacttgcgatcaagctcattacagctgtgggcataactgtagtgatggtcctaaatagcatgagtgtcagctggagcgcccggatccagattttcttaaccttttgcaagctcacagcaattctgataattatagtccctggagttatgcagctaattaaaggtcaaacgcagaactttaaagacgccttttcaggaagagattcaagtattacgcggttgccactggctttttattatggaatgtatgcatatgctggctggttttacctcaactttgttactgaagaagtagaaaaccctgaaaaaaccattccccttgcaatatgtatatccatggccattgtcaccattggctatgtgctgacaaatgtggcctactttacgaccattaatgctgaggagctgctgctttcaaatgcagtggcagtgaccttttctgagcggctactgggaaatttctcattagcagttccgatctttgttgccctctcctgctttggctccatgaacggtggtgtgtttgctgtctccaggttattctatgttgcgtctcgagagggtcaccttccagaaatcctctccatgattcatgtccgcaagcacactcctctaccagctgttattgttttgcaccctttgacaatgataatgctcttctctggagacctcgacagtcttttgaatttcctcagttttgccaggtggctttttattgggctggcagttgctgggctgatttatcttcgatacaaatgcccagatatgcatcgtcctttcaaggtgccactgttcatcccagctttgttttccttcacatgcctcttcatggttgccctttccctctattcggacccatttagtacagggattggcttcgtcatcactctgactggagtccctgcgtattatctctttattatatgggacaagaaacccaggtggtttagaataatgtcagagaaaataaccagaacattacaaataatactggaagttgtaccagaagaagataagttatgaactaatggacttgagatcttggcaatctgcccaaggggagacacaaaatagggatttttacttcattttctgaaagtctagagaattacaactttggtgataaacaaaaggagtcagttatttttattcatatattttagcatattcgaactaatttctaagaaatttagttataactctatgtagttatagaaagtgaatatgcagttattctatgagtcgcacaattcttgagtctctgatacctacctattggggttaggagaaaagactagacaattactatgtggtcattctctacaacatatgttagcacggcaaagaaccttcaaattgaagactgagatttttctgtatatatgggttttgtaaagatggttttacacactatagatgtctatactgtgaaaagtgttttcaattctgaaaaaaagcatacatcatgattatggcaaagaggagagaaagaaatttattttacattgacattgcattgcttccccttagataccaatttagataacaaacactcatgctttaatggattatacccagagcactttgaacaaaggtcagtggggattgttgaatacattaaagaagagtttctaggggctactgtttatgagacacatccaggagttatgtttaagtaaaaatccttgagaatttattatgtcagatgttttttcattcattatcaggaagttttagttatctgtcatttttttttttcacatcagtttgatcaggaaagtgtataacacatcttagagcaagagttagtttggtattaaatcctcattagaacaaccacctgtttcactaataacttacccctgatgagtctatctaaacatatgcattttaagccttcaaattacattatcaacatgagagaaatcaccaacaaagaagatgttcaaaataatagtcccatatctgtaatcatatctacatgcaatgttagtaattctgaagttttttaaatttatggctatttttacacgatgatgaattttgacagtttgtgcattttctttatacattttatattcttctgttaaaatatctcttcagatgaaactgtccagattaattaggaaaaggcatatattaacataaaaattgcaaaagaaatgtcgctgtaaataagatttacaactgatgtttctagaaaatttccacttctatatctaggctttgtcagtaatttccacaccttaattatcattcaacttgcaaaagagacaactgataagaagaaaattgaaatgagaatctgtggataagtgtttgtgttcagaagatgttgttttgccagtattagaaaatactgtgagccgggcatggtggcttacatctgtaatcccagcactttgggaggctgagggggtggatcacctgaggtcgggagttctagaccagcctgaccaacatggagaaaccccatctctactaaaaatacaaaattagctgggcatggtggcacatgctggtaatctcagctattgaggaggctgaggcaggagaattgcttgaacccgggaggcggaggttgcagtgagccaagattgcaccactgtactccagcctgggtgacaaagtcagactccatctccaaaaaaaaaagattatatatatatatatatgtgtgtgtatgtgtgtgtgtgtgtgtgtgtgtatatatatatatatatatatacacacacacacacacactttttatatatatatatatatatatatagtggaacttacaaatgagagtaatataatgatgaaattttgaactgttatttataaacatctaaggtaaaatggttagtcatggccagagtatgtttcatcctttaatttttgtccatttgaaaataaggatttttgaaagaattataccaattaaaattattaaaggcaaacatagaattcataaaaaattgtccaaagtagaaatgatgacctataatttggagcatttccaattcagtaatttcaattttgctcttgaaaacatttaatatatatccaagactgacatttctttagctgaacctaacgtttgggtctctgagtgaatttataataactccttccttccttagcatagggttttcaaaatttgatttataattcctatttccagtaaatattgttcatttgtccacatctctccctatgatatgttgctggaggtaagaatttctttcatattcctattttttttttccccatagactaggctcatagaatttaaacaagcaaattttcctgagctttttcttgccaaatgaaagaagactggtaaattctcatagagaggtttgtgtagttcttggctcttcctggggttaatgtgcttatattcacagtggcaaattggtctcagactttaatttatttatttttgatttgaatttctctttaaaagtatcaatttaaaaggtaactagaattattctttctcattttcaaaagtgatttttgcattattaaatttccctgccattgtaatgccatttcacgcagaaaaaaagtcagccagtaattaagaaaaaaagtgatggagattaagtagtattttggcttatttttaggactcatcatgagaagacacagttcctttaatcaggaaattaatatccataattttcactcaaaattgcagtatgtaaagcagattctcaaaaactctcctgaacacttatttatatatatgtttttatataagtaaaatttttctcatatttttatacgatatgcacacacacacatacatgcacatactacttactacatgttctgtacttgtactttgtaccatgcatattcaaatgtttatatacataagtttattataacataaacagtaaaagtaatgaatactgtttaaaataactaatatagtattttttaatttttgtggggatggattctcaaatacttgtgattttaaaagattctaaagctaaaacacaacttgattttaaaaagaatgattctccttacacaattataaatatttgcagtaaatattttccttataatactgttttgaccccatttaaaaagtattagattatattcctttgatccaatgaaaactgaaccttataaatggttagctgaaagtagaccttattcttgtccttctttagaagagtaaagatttgtcctagggaagatggctgacttcggttcccaacatgcgtatgcatttagactgtagctcctcagccctgtggacacaaaatttggacagcttattaggttacgttagcaatgcatgacggtttctccaacactaagatattcacgttgaaacagatttcctgttcgtcttatgtgtctggtaaaattgtttccccaattacaatttgacatatcaatagagggttaacaagagtataattacataacagaattcctcatgaactgtaatcagtctacaggaaaatcattattttatcttgatttgcagatgaatatactgctaagaaagggagcaactctgacctttgttaaagttgatcttttgtaattgaggtataaggtatgaaaagataaaaaaccgaaggccagagaatcaggaaatgaaagatagtatggactgaaggtaacaatattttaatgttatgcaatatagtcagagaaatattaaaaattagttgtttgctgtgcataggtggatctcgcaggaagctaatgaaacctaagcttcagtgcctctcacttagacatgttccattcgaggtcctgaacctaactttgtattaggaattctgtactaattttgttgaagaagaccagcaaagttgtgtacacttctacccccacaaaatctgcattgtccatgtgagtaaagtaaaataattcctgttatttttttctgttagaaataagtatggaggatatgtttttaaaaatttatgagttaattgaaatatccatatataacaagtgactttctcacaatatatatgatgtgatatatagggagatagtttcactttcatcatattttatacgttgattctgaactatagaaaaataataaatgggattttaattatagctcttagttgggaaagaaatatagagagatgtgggatttgaatgcccatgaaagacattttattttacttgaatatattcttgcttcactttaccctccataatatgttgtacattagtgctgatcaagtttacagagttacattttgctttcctaaccattcagtcaggaattaaaatatggcattgtataacaactgggaagaagctcatagtggatataaattagagtagataatgggtcaccttgatagcctctgtttacattacttgtatatgggcaaaataattattacctatacgtgtatttaagcttaattttcatataaacagtatttttaatctatgttaaaatagataatatctaaaagtgtgatctctaggtagtccttagtttattagtactgtacttcaaaaagatttttaaataggtccggcacggtggctcatgcctgtaatcccagcactttgggaggctgaggcgggcgaatcacctgaggtcaggagttcgagatcagcctggccaacatggtgaaaccctgtctcaactaaaaatataaaaattagccgggcgtggtggcaggcgcctgtaatcccagctactcgggaggctgaggcaggagaatcacttgaacccaaggggcagaagctgcagttagccaagatcgcatcattgcactccagcctaggggacaagagcgcgagacttcatctcaaaaaaaaaaaaaaaaaaaaaaaaagatttttaaataatagctaaaggtatgctctctaggtcatccttagtttattagtactgtacttaaaaattattttttaatagtcaattttgggagataattatttctttccttatattttccaattagttggtgtctaaaaataaatgttttgtctaattttagatcaggtatacattcacaaaagcataaatcatagtctcacaggaaattcaccaattttccatatgtcgtgagataactgtcctttctacaacctcataacaatgaatttatataattacctagattttcttagtgtgaatctacccattagttttattttcttggtagttatttttttccctcctctctgttactattggccttaaaatacacagaggacggttacagtgtcctaatagctgttacatgtgtgtgtttcagcgtacttgaatcaagtgtacatttatagtaccaataaccgcctttacagctttacagttaacaattctctcacaaaactgtagagcattaggcatctgagagccatagagggccaactttgttccagagtgaacatgctttttttcctcaacatatacactactgattttttttaaaagtatgactttcaagtgaattaatgtattggttaggagaactgcttgctaagtccttattacctcttgttaaagcctcagaaggccgtgctgaaagccagaggggaaaaaaagagtaatgcacaggtatctcttttgcagtggtgactgtattttgagtaccttgtgtgacagggtattattacagcatcttgtgggaaaacctattaggcctttgcatgttaaagctgtataatttgttgggttgtgagtggtctgacttaaatgtgtattataaaatttagacatcaaattttcctactaactaactttattagatgcatacttggaagcacagtcatatcacactgggaggcaatgcaatgtggttacctggtcctaggtttgaactgtcttatttcaaaagatttctgaattaatttttccctagaatttctccttcattccaaagtacaaacatactttgaagaatgaaacagattgttcccatgaatgtatgctcatactcgactagaaacgatctatgttaaatgactgtgtatatgaattatttcaagtactaccccaaataactttcttattgctctgaaagaagaaaagcaatgtaaatcactatgattattgcacaaacaaccagaattctccaacaattttaagtaatctgatcctcttcttggagaaaattgttacctaatagtttttccttatgaatgttattactactggtataaatcaaatttctataaatttcctacttaagtcttaagaactgggttcttcctttgatgttattcatgttcagaaaggaaacaacactttactcttttaggacaattcctagaatctatagtagtatcaggatatattttgctttaaaatatattttggttattttgaatacagacattggctccaaattttcatctttgcacaatagtatgacttttcactagaacttctcaacatttgggaactttgcaaatatgagcatcatatgtgttaaggctgtatcatttaatgctatgagatacattgttttctccctatgccaaacaggtgaacaaacgtagttgttttttactgatactaaatgttggctacctgtgattttatagtatgcacatgtcagaaaaaggcaagacaaatggcctcttgtactgaatacttcggcaaacttattgggtcttcattttctgacagacaggatttgactcaatatttgtagagcttgcgtagaatggattacatggtagtgatgcactggtagaaatggtttttagttattgactcagaattcatctcaggatgaatcttttatgtctttttattgtaagcatatctgaatttactttataaagatggttttagaaagctttgtctaaaaatttggcctaggaatggtaacttcattttcagttgccaaggggtagaaaaataatatgtgtgttgttatgtttatgttaacatattattaggtactatctatgaatgtatttaaatatttttcatattctgtgacaagcatttataatttgcaacaagtggagtccatttagcccagtgggaaagtcttggaactcaggttacccttgaaggatatgctggcagccatctctttgatctgtgcttaaactgtaatttatagaccagctaaatccctaacttggatctggaatgcattagttatgaccttgtaccattcccagaatttcaggggcatcgtgggtttggtctagtgattgaaaacacaagaacagagagatccagctgaaaaagagtgatcctcaatatcctaactaactggtcctcaactcaagcagagtttcttcactctggcactgtgatcatgaaacttagtagaggggattgtgtgtattttatacaaatttaatacaatgtcttacattgataaaattcttaaagagcaaaactgcattttatttctgcatccacattccaatcatattagaactaagatatttatctatgaagatataaatggtgcagagagactttcatctgtggattgcgttgtttcttagggttcctagcactgatgcctgcacaagcatgtgatatgtgaaataaaatggattcttctatagctaaatgagttccctctggggagagttctggtactgcaatcacaatgccagatggtgtttatgggctatttgtgtaagtaagtggtaagatgctatgaagtaagtgtgtttgttttcatcttatggaaactcttgatgcatgtgcttttgtatggaataaattttggtgcaatatgatgtcattcaactttgcattgaattgaattttggttgtatttatatgtattatacctgtcacgcttctagttgcttcaaccattttataaccatttttgtacatattttacttgaaaatattttaaatggaaatttaaataaacatttgatagtttacataataa

SEQ ID NO: 218 - DNA, 4815 bp, Homo sapiens
agtggcgtcggaactgcaaagcacctgtgagcttgcggaagtcagttcagactccagcccgctccagcccggcccgacccgaccgcacccggcgcctgccctcgctcggcgtccccggccagccatgggcccttggagccgcagcctctcggcgctgctgctgctgctgcaggtctcctcttggctctgccaggagccggagccctgccaccctggctttgacgccgagagctacacgttcacggtgccccggcgccacctggagagaggccgcgtcctgggcagagtgaattttgaagattgcaccggtcgacaaaggacagcctatttttccctcgacacccgattcaaagtgggcacagatggtgtgattacagtcaaaaggcctctacggtttcataacccacagatccatttcttggtctacgcctgggactccacctacagaaagttttccaccaaagtcacgctgaatacagtggggcaccaccaccgccccccgccccatcaggcctccgtttctggaatccaagcagaattgctcacatttcccaactcctctcctggcctcagaagacagaagagagactgggttattcctcccatcagctgcccagaaaatgaaaaaggcccatttcctaaaaacctggttcagatcaaatccaacaaagacaaagaaggcaaggttttctacagcatcactggccaaggagctgacacaccccctgttggtgtctttattattgaaagagaaacaggatggctgaaggtgacagagcctctggatagagaacgcattgccacatacactctcttctctcacgctgtgtcatccaacgggaatgcagttgaggatccaatggagattttgatcacggtaaccgatcagaatgacaacaagcccgaattcacccaggaggtctttaaggggtctgtcatggaaggtgctcttccaggaacctctgtgatggaggtcacagccacagacgcggacgatgatgtgaacacctacaatgccgccatcgcttacaccatcctcagccaagatcctgagctccctgacaaaaatatgttcaccattaacaggaacacaggagtcatcagtgtggtcaccactgggctggaccgagagagtttccctacgtataccctggtggttcaagctgctgaccttcaaggtgaggggttaagcacaacagcaacagctgtgatcacagtcactgacaccaacgataatcctccgatcttcaatcccaccacgtacaagggtcaggtgcctgagaacgaggctaacgtcgtaatcaccacactgaaagtgactgatgctgatgcccccaataccccagcgtgggaggctgtatacaccatattgaatgatgatggtggacaatttgtcgtcaccacaaatccagtgaacaacgatggcattttgaaaacagcaaagggcttggattttgaggccaagcagcagtacattctacacgtagcagtgacgaatgtggtaccttttgaggtctctctcaccacctccacagccaccgtcaccgtggatgtgctggatgtgaatgaagcccccatctttgtgcctcctgaaaagagagtggaagtgtccgaggactttggcgtgggccaggaaatcacatcctacactgcccaggagccagacacatttatggaacagaaaataacatatcggatttggagagacactgccaactggctggagattaatccggacactggtgccatttccactcgggctgagctggacagggaggattttgagcacgtgaagaacagcacgtacacagccctaatcatagctacagacaatggttctccagttgctactggaacagggacacttctgctgatcctgtctgatgtgaatgacaacgcccccataccagaacctcgaactatattcttctgtgagaggaatccaaagcctcaggtcataaacatcattgatgcagaccttcctcccaatacatctcccttcacagcagaactaacacacggggcgagtgccaactggaccattcagtacaacgacccaacccaagaatctatcattttgaagccaaagatggccttagaggtgggtgactacaaaatcaatctcaagctcatggataaccagaataaagaccaagtgaccaccttagaggtcagcgtgtgtgactgtgaaggggccgctggcgtctgtaggaaggcacagcctgtcgaagcaggattgcaaattcctgccattctggggattcttggaggaattcttgctttgctaattctgattctgctgctcttgctgtttcttcggaggagagcggtggtcaaagagcccttactgcccccagaggatgacacccgggacaacgtttattactatgatgaagaaggaggcggagaagaggaccaggactttgacttgagccagctgcacaggggcctggacgctcggcctgaagtgactcgtaacgacgttgcaccaaccctcatgagtgtcccccggtatcttccccgccctgccaatcccgatgaaattggaaattttattgatgaaaatctgaaagcggctgatactgaccccacagccccgccttatgattctctgctcgtgtttgactatgaaggaagcggttccgaagctgctagtctgagctccctgaactcctcagagtcagacaaagaccaggactatgactacttgaacgaatggggcaatcgcttcaagaagctggctgacatgtacggaggcggcgaggacgactaggggactcgagagaggcgggccccagacccatgtgctgggaaatgcagaaatcacgttgctggtggtttttcagctcccttcccttgagatgagtttctggggaaaaaaaagagactggttagtgatgcagttagtatagctttatactctctccactttatagctctaataagtttgtgttagaaaagtttcgacttatttcttaaagcttttttttttttcccatcactctttacatggtggtgatgtccaaaagatacccaaattttaatattccagaagaacaactttagcatcagaaggttcacccagcaccttgcagattttcttaaggaattttgtctcacttttaaaaagaaggggagaagtcagctactctagttctgttgttttgtgtatataattttttaaaaaaaatttgtgtgcttctgctcattactacactggtgtgtccctctgccttttttttttttttaagacagggtctcattctatcggccaggctggagtgcagtggtgcaatcacagctcactgcagccttgtcctcccaggctcaagctatccttgcacctcagcctcccaagtagctgggaccacaggcatgcaccactacgcatgactaattttttaaatatttgagacggggtctccctgtgttacccaggctggtctcaaactcctgggctcaagtgatcctcccatcttggcctcccagagtattgggattacagacatgagccactgcacctgcccagctccccaactccctgccattttttaagagacagtttcgctccatcgcccaggcctgggatgcagtgatgtgatcatagctcactgtaacctcaaactctggggctcaagcagttctcccaccagcctcctttttatttttttgtacagatggggtcttgctatgttgcccaagctggtcttaaactcctggcctcaagcaatccttctgccttggccccccaaagtgctgggattgtgggcatgagctgctgtgcccagcctccatgttttaatatcaactctcactcctgaattcagttgctttgcccaagataggagttctctgatgcagaaattattgggctcttttagggtaagaagtttgtgtctttgtctggccacatcttgactaggtattgtctactctgaagacctttaatggcttccctctttcatctcctgagtatgtaacttgcaatgggcagctatccagtgacttgttctgagtaagtgtgttcattaatgtttatttagctctgaagcaagagtgatatactccaggacttagaatagtgcctaaagtgctgcagccaaagacagagcggaactatgaaaagtgggcttggagatggcaggagagcttgtcattgagcctggcaatttagcaaactgatgctgaggatgattgaggtgggtctacctcatctctgaaaattctggaaggaatggaggagtctcaacatgtgtttctgacacaagatccgtggtttgtactcaaagcccagaatccccaagtgcctgcttttgatgatgtctacagaaaatgctggctgagctgaacacatttgcccaattccaggtgtgcacagaaaaccgagaatattcaaaattccaaatttttttcttaggagcaagaagaaaatgtggccctaaagggggttagttgaggggtagggggtagtgaggatcttgatttggatctctttttatttaaatgtgaatttcaacttttgacaatcaaagaaaagacttttgttgaaatagctttactgtttctcaagtgttttggagaaaaaaatcaaccctgcaatcactttttggaattgtcttgatttttcggcagttcaagctatatcgaatatagttctgtgtagagaatgtcactgtagttttgagtgtatacatgtgtgggtgctgataattgtgtattttctttgggggtggaaaaggaaaacaattcaagctgagaaaagtattctcaaagatgcatttttataaattttattaaacaattttgttaaaccat

SEQ ID NO: 219 - DNA, 3747 bp, Homo sapiens
atctgatgcatttgactgtcttttatccaactgcccagaagcaaatgtgttaactcggcgatgccccttcatgcccgggttcttgcagagctctgaggacgcccagacccattttcctggctggatttggagcggctgctgggctgtggacccaggtgtgtggatcgctttacccagaagcttggaaagcgccaatattaacctgcttccaggtacatcacaaggtcaagagagtgtcttgcagccctcttgtttccgtgtatctacaccttcttctcttggccagaaggatatttacgttttggttcacagcatttgaagccaaaagttcagcccttcgaactggtttgctatacaaaacaaaacaaaacaaataaggtaatgaggattgcttattaaactgcttaacaaaatccccgactcttcctcagccctttctcggctccctcctccccaccaaaatgtcaccagctcttgaattacgtggattcgggttggaggagaacttgaaggaaacgtgattaaagggctatgcgagaacgctctctttgctgcccgcggtccggtgggcttcgaagccaatcgtgagaaggaccggttccctccgtgctgcttcctccccgtgcagtgctgggtgtgcgtgtgcgagtgtgagtgcaagtgcgcgcgcgcccgggtgcgagtgtgtgtgagtgtgagcgtgtgtctgtgtgtgcgtgcgcggccgccctgcctctgcccgctccccgggcgcggagccgcgggtttcatggggcgattgcagcgattcccccacccagagcgacctgcgggcagcggcggcagtggcaggagccgcctttccgattccctacgatgcgggtgctgagctatggcaaagggcagcgaagtgacgagcgagacccgcgtacgactgtgaaagccacctggagccaccttgccgggattgtacctgcaggcagaaagtcttcctacgaccgtcttttcccttagaggcaccagaatccctgtaaccattcatccaggtgttgagaagatatgtagcagccgagcacccatcttttgacaccgtcctctgaaatcagctttggagatgctttcactctgtccgtcttctgcagcagccaggcagagtgccgactccttcacagccgtgaggaactcttcaggctccagaagctcttaaacctgatctacaatggaaaaaattcttttttatctgtttctcattggcatagcagtgaaagctcagatctgtccaaagcgttgtgtctgtcagattttgtctcctaatcttgcaaccctttgtgccaagaaagggcttttatttgttccaccaaacattgacagaagaactgtggaactgcggttggcagacaattttgttacaaatattaaaaggaaagattttgccaatatgaccagcttggtggacctgactctatccaggaatacaataagttttattacacctcatgctttcgctgacctacgaaatttgagggctttgcatttgaatagcaacagattgactaaaattacaaatgatatgttcagtggtctttccaatcttcatcatttgatactgaacaacaatcagctgactttaatttcctctacagcgtttgatgatgtcttcgcccttgaggagctggatctgtcctataataatctagaaaccattccttgggatgctgttgagaagatggttagcttgcatacccttagtttggatcacaatatgattgataacattcctaaggggaccttctcccatttgcacaagatgactcggttagatgtgacatcaaataaattgcagaagctaccacctgaccctctctttcagcgagctcaggtactagcaacctcaggaatcataagcccatctacttttgcattaagttttggtggaaaccccttgcattgcaattgtgaattgttgtggttgaggcgtctgtccagagaagatgacttagagacctgtgcttctcctccacttttaactggccgctacttttggtcaattcctgaagaagagtttttgtgtgagcctcctctcattactcgtcatacacatgagatgagagtcctggagggacaaagggcaacactgaggtgcaaagccaggggagaccctgagcctgcaattcactggatttctcctgaagggaagcttatttcaaatgcaacaagatctctggtgtatgataacggaacacttgacattcttatcacaactgtaaaggatacaggtgcttttacctgcattgcttccaatcctgctggggaagcaacacaaatagtggatcttcatataattaagctccctcacttactaaatagtacaaaccatatccatgagcctgatcctggttcttcagatatctcaacttctaccaagtcaggttctaatacaagcagtagtaatggtgatactaaattgagtcaagataaaattgtggtggcagaagctacatcatcaacggcactacttaaatttaattttcaaagaaatatccctggaatacgtatgtttcaaatccagtacaatggtacttatgatgacacccttgtttacagaatgatacctcctacgagcaaaacttttctggtcaataatctggctgctggaactatgtatgacttgtgtgtcttggccatatatgatgatggcatcacttccctcactgccacaagagtcgtgggttgcatccagtttactacggaacaggattatgtgcgttgccatttcatgcagtctcagtttttgggaggcaccatgattattattattggtggaatcattgtagcatctgtgctggtattcatcattattctgatgatccggtataaggtttgcaacaataatgggcaacacaaggtcaccaaggttagcaatgtttattcccaaactaacggggctcaaatacaaggctgtagtgtaacgctgccccagtccgtgtccaaacaagctgtgggacacgaagagaatgcccagtgttgtaaagctaccagtgacaatgtgattcaatcttcagaaacttgttcgagtcaggactcctctaccactacctctgctttgcctccttcctggacttcaagcacttctgtgtcccaaaagcagaaaagaaagactggcacaaagccaagtacagaaccacagaatgaagccgtcacaaatgttgaatcccaaaacactaacaggaacaactcaactgccttgcagttagctagccgtcctcccgattctgtcacagaggggcccacgtctaaaagagcacatataaagccaaatgctttgctgactaatgttgaccagattgtccaggaaacacagaggctggagttaatctgaagagcaccacttctcctctctctcctgaaaaaatttgccactgatatttttactggataaaattcaaaaatgtttcaattcacaaaggctaattgttgaactggtgtcgtagaagaaattgtctacaggagccaaggtgaaagtctctgatgacggcggaactggctccattagaccatggttcatcctcttttaaaaccaaatttttttttcttctggcctacaagtattttttttttaaaaaagaaaaaaagcctacattggcatcaagttctgtatcaatccatcttacattgccatccatgatttaacagactgtagaatcttgaataatctatatcactttaacaaataaatgttttactatgacagaaaaaaaaaaaaaaaaa

SEQ ID NO: 220 - DNA, 2544 bp, Homo sapiens
aagaaaaacagctgagagggcatcaggaaggagtttcgacccgcgctggcgagtcatgagcgccaagtttcccactggcgcgcaaacttgagttacttttgagcgtggatactggcgaagaggctgcgggcggtattagcgtttgcagcgacttggctcgggcagctgacccaagtgtcctgtcttccttcctctgcttgtctctaggctctgaaactgcggagcggccaccggacgccttctggagcaggtagcagcatgcagccgcctccaagtctgtgcggacgcgccctggttgcgctggttcttgcctgcggcctgtcgcggatctggggagaggagagaggcttcccgcctgacagggccactccgcttttgcaaaccgcagagataatgacgccacccactaagaccttatggcccaagggttccaacgccagtctggcgcggtcgttggcacctgcggaggtgcctaaaggagacaggacggcaggatctccgccacgcaccatctcccctcccccgtgccaaggacccatcgagatcaaggagactttcaaatacatcaacacggttgtgtcctgccttgtgttcgtgctggggatcatcgggaactccacacttctgagaattatctacaagaacaagtgcatgcgaaacggtcccaatatcttgatcgccagcttggctctgggagacctgctgcacatcgtcattgacatccctatcaatgtctacaagctgctggcagaggactggccatttggagctgagatgtgtaagctggtgcctttcatacagaaagcctccgtgggaatcactgtgctgagtctatgtgctctgagtattgacagatatcgagctgttgcttcttggagtagaattaaaggaattggggttccaaaatggacagcagtagaaattgttttgatttgggtggtctctgtggttctggctgtccctgaagccataggttttgatataattacgatggactacaaaggaagttatctgcgaatctgcttgcttcatcccgttcagaagacagctttcatgcagttttacaagacagcaaaagattggtggctattcagtttctatttctgcttgccattggccatcactgcatttttttatacactaatgacctgtgaaatgttgagaaagaaaagtggcatgcagattgctttaaatgatcacctaaagcagagacgggaagtggccaaaaccgtcttttgcctggtccttgtctttgccctctgctggcttccccttcacctcagcaggattctgaagctcactctttataatcagaatgatcccaatagatgtgaacttttgagctttctgttggtattggactatattggtatcaacatggcttcactgaattcctgcattaacccaattgctctgtatttggtgagcaaaagattcaaaaactgctttaaggctgggccacatgttggaaataagctagtaatgttgttttctgtcaatattgaatgtgatggtacagtaaaccaaaacccaacaatgtggccagaaagaaagagcaataataattaattcacacaccatatggattctatttataaatcacccacaaacttgttctttaatttcatcccaatcactttttcagaggcctgttatcatagaagtcattttagactctcaattttaaattaattttgaatcactaatattttcacagtttattaatatatttaatttctatttaaattttagattatttttattaccatgtactgaatttttacatcctgataccctttccttctccatgtcagtatcatgttctctaattatcttgccaaattttgaaactacacacaaaaagcatacttgcattatttataataaaattgcattcagtggctttttaaaaaaatgtttgattcaaaactttaacatactgataagtaagaaacaattataatttctttacatactcaaaaccaagatagaaaaaggtgctatcgttcaacttcaaaacatgtttcctagtattaaggactttaatatagcaacagacaaaattattgttaacatggatgttacagctcaaaagatttataaaagattttaacctattttctcccttattatccactgctaatgtggatgtatgttcaaacaccttttagtattgatagcttacatatggccaaaggaatacagtttatagcaaaacatgggtatgctgtagctaactttataaaagtgtaatataacaatgtaaaaaattatatatctgggaggattttttggttgcctaaagtggctatagttactgattttttattatgtaagcaaaaccaataaaaatttaagtttttttaacaactaccttatttttcactgtacagacactaattcattaaatactaattgattgtttaaaagaaatataaatgtgacaagtggacattatttatgttaaatatacaattatcaagcaagtatgaagttattcaattaaaatgccacatttctggtctctgggaaaaaaaaaaaaaa

SEQ ID NO: 221 - DNA, 2413 bp, Homo sapiens
tttggttttcccacagactcctgaagaataggtcagaagaaagggttaaagccttaaaaggggaacaaccattgcggggctcagggaggaggataatgttctttgggctgccgcaccctgatccccggggtcccgaaccctcccgtccctggccaggcctgccagccacagggtgagggcccccttccgccgcaacctgccactctcacaccaatgcgggaccgccttctcttccttccccaccccccaccccaccctgccgtcctttctcccccaatctccgcctctgattggctgagcccccggctccccgctccccctctcctccatccccggtgaaaactgcgggctccgagctgggtgcagcaaccggaggcggcggcgcgtctggaggaggctgcagcagcggaagaccccagtccagatccaggactgagatcccagaaccatgaacctggccatcagcatcgctctcctgctaacagtcttgcaggtctcccgagggcagaaggtgaccagcctaacggcctgcctagtggaccagagccttcgtctggactgccgccatgagaataccagcagttcacccatccagtacgagttcagcctgacccgtgagacaaagaagcacgtgctctttggcactgtgggggtgcctgagcacacataccgctcccgaaccaacttcaccagcaaatacaacatgaaggtcctctacttatccgccttcactagcaaggacgagggcacctacacgtgtgcactccaccactctggccattccccacccatctcctcccagaacgtcacagtgctcagagacaaactggtcaagtgtgagggcatcagcctgctggctcagaacacctcgtggctgctgctgctcctgctctccctctccctcctccaggccacggatttcatgtccctgtgactggtggggcccatggaggagacaggaagcctcaagttccagtgcagagatcctacttctctgagtcagctgaccccctccccccaatccctcaaaccttgaggagaagtggggaccccacccctcatcaggagttccagtgctgcatgcgattatctacccacgtccacgcggccacctcaccctctccgcacacctctggctgtctttttgtactttttgttccagagctgcttctgtctggtttatttaggttttatccttccttttctttgagagttcgtgaagagggaagccaggattggggacctgatggagagtgagagcatgtgaggggtagtgggatggtggggtaccagccactggaggggtcatccttgcccatcgggaccagaaacctgggagagacttggatgaggagtggttgggctgtgcctgggcctagcacggacatggtctgtcctgacagcactcctcggcaggcatggctggtgcctgaagaccccagatgtgagggcaccaccaagaatttgtggcctaccttgtgagggagagaactgagcatctccagcattctcagccacaaccaaaaaaaaataaaaagggcagccctccttaccactgtggaagtccctcagaggccttggggcatgacccagtgaagatgcaggtttgaccaggaaagcagcgctagtggagggttggagaaggaggtaaaggatgagggttcatcatccctccctgcctaaggaagctaaaagcatggccctgctgcccctccctgcctccacccacagtggagagggctacaaaggaggacaagaccctctcaggctgtcccaagctcccaagagcttccagagctctgacccacagcctccaagtcaggtggggtggagtcccagagctgcacagggtttggcccaagtttctaagggaggcacttcctcccctcgcccatcagtgccagcccctgctggctggtgcctgagcccctcagacagccccctgccccgcaggcctgccttctcagggacttctgcggggcctgaggcaagccatggagtgagacccaggagccggacacttctcaggaaatggcttttcccaacccccagcccccacccggtggttcttcctgttctgtgactgtgtatagtgccaccacagcttatggcatctcattgaggacaaagaaaactgcacaataaaaccaagcctctggaatctgtcctcgtgtccacctggccttcgctcctccagcagtgcctgcctgcccccgcttcgctggggtctccacgggtgaggctggggaacgccacctcttcctcttccctgacttctccccaaccacttagtagcaacgctaccccaggggctaatgactgcacactgggcttcttttcagaatgaccctaacgagacacatttgcccaaataaacgaacatcccatgtctgctgaaaaaaaaaaaaaaaaa

SEQ ID NO: 222 - DNA, 1849 bp, Homo sapiens
acagccacactgcagtatgtcaggaacagtcatggagctgttctcattgtttgcctctccttttcctcctttttaccttctggcccctctcttcattcagagatgctggcagagccattccctaaggttgtagcaagtttaatcatcctccatttgtctggggcaaccaagaaaggaacagaaaagcaaaccacctcagaaacacagaagtcagtgcagtgtggaacttggacaaaacatgcagagggaggtatctttacctctcccaactatcccagcaagtatccccctgaccgggaatgcatctacatcatagaagccgctccaagacagtgcattgaactttactttgatgaaaagtactctattgaaccgtcttgggagtgcaaatttgatcatattgaagttcgagatggaccttttggcttttctccaataattggacgtttctgtggacaacaaaatccacctgtcataaaatccagtggaagatttctatggattaaattttttgctgatggagagctggaatctatgggattttcagctcgatacaatttcacacctgaataaaaggcaaactccttagcaggatctacagagtgtttcgtgatctctccttctccatcatctcatctctggatgctgtggtgcccagaacgttgatctaacaccatcttgaagcacacatgctgatctccaggtgcaccacgatttgtgcccttgaaaatgctgtttgctcaatctttctggagaaagtttgccacatattcggacttagtaaattagaactcctaccttgaaacccagatgaaggttcaattttccccaggattcctttcctcaccattctcctatgtgagggacttcttgtattataatcttttaatataatattatattttatgtaatattgtgttaaattatattgttttatgtaatatattattttaaatgttattttatatatgatattaaaagattataattatataatctttttcgataatttattcttgtattacaatctttttattataatagtctccactctccccaaaatattgtgaattcttcagctgaggagttttgctttagtttcttatcgccatggactgggaattaacatgtatttaacacattttgctcaaacaatcaaacagtaaaagctgaagagagcgtattattattcgcccattccgagagaaagttgaagatgactgaagaactaaaaatacataaatgaattaagtaattataaacataaatttcctgtagctccaacatgactttgatctgagtaatagtgttgtgaaatagattactacatgattttcattgcttttatattatatatagtaattaatattcagaatagttgattaactttcttaagtgtcacataatttaaaaatgaaattgctgtttgccccagatatgtttttctgtgttctttttaaatttcagtgaaattttcttatactcccttcattaaatctattatctggtttctaaacctttacctatttaatgtctcttttcctttctttctaaaaagtaactggttaaactacagttttgtcatttatgaaattttttctgttattattgtagggatagtcaatattatcattttaaggatagttaaaacttattttgcaattaatacgtattttacagtacactaatatgcatatatgttgtattttattaaaatattaaaatgttttttaaacaaaaatattgtccgaagctctaaataccagagtattgattttaaagtctgccaagacaataatacaagtaacacaactaagcctttctttaaataataaaacgagtatctaaa

SEQ ID NO: 223 - DNA, 5333 bp, Homo sapiens
cggctgctcgcgagctgctttctctcctcttccctttccgggtgcacggcgaggagaaagtctctatgcaactaagccccggcgcgcacttggccaggtatgtaccgcgggagcggcgcgttctgcgcggaagcagatgctgctgccgccacggcggcggcggctgccagctcctgagctctgtaactgtcacactgcacctgagctgaacttgaaaagagagtgaaggggcgattgggcgaacgcttttggcagacacagagggtgtttgtagacgtgggggaggagaatctctattaacgccccccaccgtaaccactgcacatcacctccatctctgcaaatacagcccgaggagtagaggcagcagcagctggacccccaaagagagacgtggggcagcggctgtgaccgcatctcctgagctacaacaacaggtcgcctttttgagactcctttggcgggaagggctacttggaaaggaaggtttgaaagagtgagaagggtaggtgtaagggttccctaattcgtcgaaagaattctattgggtgactctcgttcgtcttctctatcctacactccacatactgaccctatattatccagactgtgccggggagaaatcaaaaacacctgtttgaagaaacggctgcacctgtgtgcttatttgtgccagagggtggcctagcccacctgcaggaagagatttggctgggttctgttgagggtgattgttaggacgttgtattttgttgccattattccaaatacctgtcttggagggaaagttgcccttctgagaactgtgactttaccaggagccctatcttggaataagagttacacctctggaccacgtttctcactagtactttgcttgactggaggaagtgggtgacttttggctgcttcggtgacccattgtagacgcctcgttacccttcttccttccgcttcaagtaatcatggcggcgggggtggcagcgtggctgccttttgcaagggcagcggctatcgggtggatgcctgtggcctcggggcctatgccggctcccccgaggcaggagaggaaaaggacccaagatgctctcattgtgctgaatgtgagtggcacccgcttccagacgtggcaggacaccctggaacgttacccagacactctactgggcagttctgagagggactttttctaccacccagaaactcagcagtatttctttgaccgtgacccagacatcttccgccacatcctgaatttctaccgcactgggaagctccactatcctcgccacgagtgcatctctgcttacgatgaagaactggccttctttggcctcatcccggaaatcatcggcgactgctgttatgaggagtacaaggatcgcaggcgagagaacgccgagcgcctgcaggacgacgcggataccgacaccgctggggagagcgccttgcccaccatgactgcaaggcagagggtctggagggccttcgagaacccccacaccagcacgatggccctggtgttctactatgtcacggggtttttcattgccgtctctgtcatcgcgaatgtggtggaaacagtgccgtgcggatcaagcccaggtcacattaaagaactgccctgtggagagcggtatgctgtggccttcttctgcttggacacggcctgcgtcatgatcttcacagttgagtatttgcttcgcctggctgcagcgcctagtcgttaccgttttgtgcgtagtgtcatgagtatcatcgacgtggtggccatcctgccttattacattgggctggtgatgacagacaatgaggacgtcagcggagcctttgtcacactccgagtcttccgggtcttcaggatctttaagttttcccgccactctcaaggcctgcgcatcctggggtacacactgaagagttgtgcctcagaattgggcttcttgcttttctcgctcaccatggctatcatcatcttcgctacagttatgttctacgcagagaaggggtcttcggctagcaagttcaccagcatccctgcagccttctggtataccatcgtcaccatgacaacactagggtatggtgacatggtgccaaaaaccatagcagggaagatttttggttctatctgttcgctgagtggggtcttggtcattgctctacctgttccggtgattgtatccaacttcagtcgcatctaccaccagaatcaacgagcagacaaacgaagggcacaaaagaaagctagactggccaggatccgggcagccaaaagcggaagcgcaaatgcttacatgcagagcaaacggaatggtttactcagtaatcagctgcagtcctcagaggatgagcaggcttttgttagcaaatccggctccagctttgaaacccagcaccaccacctgcttcactgcctggaaaaaaccacgaatcacgagtttgtggacgaacaagtctttgaagaaagctgcatggaagttgcaactgttaatcgtccttcaagtcacagtccttcactgtcttcacaacaaggagtcaccagcacctgctgttcacgacgacacaaaaaaacttttcgcatcccaaatgccaatgtatcaggaagccatcaaggtagtatacaagaactcagcacgattcagatcagatgtgtggagagaacacctctgtctaacagccgatccagtttaaatgccaaaatggaagagtgtgttaaactaaactgtgaacaaccttatgtgactacagcaataataagcatcccaacacctccagtaaccacaccagaaggagacgataggccagaatcccctgagtactcaggaggaaatattgtcagagtttctgctttgtaagacaattggaataaggtctaagagaattcgagccctggctgtgaaaagaatctcaacatagaagaaagaagaaacaataaatattctgcagattaatgcagcaaagaaagaaggttggtagtgaaacacaaagcttccaatcttaaggatgtgaataaaaccaccaaatggcatttctagacagtttgacctgttatacagagtaatattctgtggccctttgactttgtgaatgagcacaatgaaatgccgcctactgatgcttcttatgatcagaactcttttttaataaaataaataacataaatcgttgaacataatgttccagttgaatgcaaaacaaaaaaaatatggaaaacattttgataaaattttttcctgttaaaaccatgaacattggctatgatgaagattattacatatgaaaaaaaaactcacacaacatatttgtattgactgaaggaaaccatcataatgcatgctagaattctttgaagcagtgatctcagtttccttatgttgtcttcagaataggcatgataaactataattgtagaaaggggtaatttctgtgcacttacaacaagctgagtgttcatgttccatggtgggctgtgcaaataaactccttttagacctgcagtatttctcatggggatgctcattagtaaatctaaagtgttcagatagttcagtattcattatcgtttaactttgcacctagatactgttacaactgcaataatttgttgtacaactgttgtatcaggaatcaggatttttttgttgttgtactttccagatccttatagatacggtaagagccacattcgtagaaaaacttctggtgtggccaggttttaggtaactttttaatccaaaactattgtgccataaatgtttttcagtaatattttttggtccactgtattcctgtgacacagtgcattatctgttcttgtatttctatagcacctctctattgggtttatcatcatcaacaagactactgtttactgtagttcaagtgactttcctacttttgtatttccaaaaaaaattatcttgtaagtagcttgtcatcaatccccttgtcgaaaactagaaaaaaaggagttgacccatataaattatctctaacgtctttgttgtttatggaaaagcccagatactggatatatcactatgtattttatgaacagaattgactgggactaatatcacaggatcaatcatctcagaatcttacttgatgcattatttattttgctttagatcttgaatacattttgagaataactaatgtggattgaaatgtagagatacactggagtgctttatttagcaatatttgatgaaagcatgctttctacgccattcaggaaggcagcacaaatttatctcagaaaggttcctgtgtattgcaaggtacaattttctccaataaatcaggagaacaggagtttgatgatgcaaagttgatctctgtacatttaagtgaaaagtctttataacttttcacccttaaaatatttcagcagacatgtctgcacatgacagtgtaaaaaagtttaatgtcaaatgcaaagtttttattcattccaagccaccactgtaaggaataaagcttagcttctgtacatggaaagagctaataattatccctctgtcagagatgagatttttaaatgcttatgatatttaatcataaaaagggattaatccaaccattttctagtaaagccagaaattcttgcttcccatttctagaatagtttctagaacagtgctatgcacatattagatcttaataaacatttgctgagtgaaagtaagataaactcaactatctcttgggaagaactggcttcattcctagtacatcttttaaaaagttactaattttccagcagtacaaatattaacaattatattaacacctgcctcatgtcagtttatgcttctagagcaatgtctagtgaaacttatctgatggcatttattgaaaaccttctaaaaagtagactaaggaaaccataatcagaattactatgtcttttgattcccaatgagaagttctattttcatgttcttaatattacatacaagaaaatgcagttaggttatttcaattgacaattctgcctcctcttttgatttatcacttacccaaaattattaattttattaggcttttggaaaagaaaaaaaactttttgatgttttaggtgatttaaaaatataccgtgttggtggtgaatgactattgatgactgtgttaagtgcatctgtattgtaagtgaaatgtaattatttctgtgtaccatatggagtaactaaggtcattgtttttgacaattttgtttgaaattcatatatcttatttcaaaggatagcataatatctgcattatgctggaaaaaaatagacctttggagaatacttaaataaaacatgtgcatgcttgaacaggac

SEQ ID NO: 224 - DNA, 2136 bp, Homo sapiens
agctggattcacacacttggatgtagacctcgaccttcacaggactcttcattgctggttggcaatgatgtatcggccagatgtggtgagggctaggaaaagagtttgttgggaaccctgggttatcggcctcgtcatcttcatatccctgattgtcctggcagtgtgcattggactcactgttcattatgtgagatataatcaaaagaagacctacaattactatagcacattgtcatttacaactgacaaactatatgctgagtttggcagagaggcttctaacaattttacagaaatgagccagagacttgaatcaatggtgaaaaatgcattttataaatctccattaagggaagaatttgtcaagtctcaggttatcaagttcagtcaacagaagcatggagtgttggctcatatgctgttgatttgtagatttcactctactgaggatcctgaaactgtagataaaattgttcaacttgttttacatgaaaagctgcaagatgctgtaggaccccctaaagtagatcctcactcagttaaaattaaaaaaatcaacaagacagaaacagacagctatctaaaccattgctgcggaacacgaagaagtaaaactctaggtcagagtctcaggatcgttggtgggacagaagtagaagagggtgaatggccctggcaggctagcctgcagtgggatgggagtcatcgctgtggagcaaccttaattaatgccacatggcttgtgagtgctgctcactgttttacaacatataagaaccctgccagatggactgcttcctttggagtaacaataaaaccttcgaaaatgaaacggggtctccggagaataattgtccatgaaaaatacaaacacccatcacatgactatgatatttctcttgcagagctttctagccctgttccctacacaaatgcagtacatagagtttgtctccctgatgcatcctatgagtttcaaccaggtgatgtgatgtttgtgacaggatttggagcactgaaaaatgatggttacagtcaaaatcatcttcgacaagcacaggtgactctcatagacgctacaacttgcaatgaacctcaagcttacaatgacgccataactcctagaatgttatgtgctggctccttagaaggaaaaacagatgcatgccagggtgactctggaggaccactggttagttcagatgctagagatatctggtaccttgctggaatagtgagctggggagatgaatgtgcgaaacccaacaagcctggtgtttatactagagttacggccttgcgggactggattacttcaaaaactggtatctaagagagaaaagcctcatggaacagataacatttttttttgttttttgggtgtggaggccatttttagagatacagaattggagaagacttgcaaaacagctagatttgactgatctcaataaactgtttgcttgatgcatgtattttcttcccagctctgttccgcacataagcatcctgcttctgccagatcaactctgtcatctgtgagcaatagttgaaactttatgtacatagagaaatagataatacaatattacattacagcctgtattcatttgttctctagaagttttgtcagaattttgacttgttgacataaatttgtaatgcatatatacaatttgaagcactccttttcttcagttcctcagctcctctcatttcagcaaatatccattttcaaggtgcagaacaaggagtgaaagaaaatataagaagaaaaaaatcccctacattttattggcacagaaaagtattaggtgtttttcttagtggaatattagaaatgatcatattcattatgaaaggtcaagcaaagacagcagaataccaatcacttcatcatttaggaagtatgggaactaagttaaggaaatccagaaagaagccaagatatatccttattttcatttccaaacaactactatgataaatgtgaagaagattctgtttttttgtgacctataataattatacaaacttcatgcaatgtacttgttctaagcaaattaaagcaaatatttatttaacattgttactgaggatgtcaacatataacaataaaatataaatcaccca

SEQ ID NO: 225 - DNA, 2136 bp, Homo sapiens; identical to SEQ ID NO: 224

SEQ ID NO: 226 - DNA, 5748 bp, Homo sapiens
gagaagaaagccagtgcgtctctgggcgcaggggccagtggggctcggaggcacaggcaccccgcgacactccaggttccccgacccacgtccctggcagccccgattatttacagcctcagcagagcacggggcgggggcagaggggcccgcccgggagggctgctacttcttaaaacctctgcgggctgcttagtcacagccccccttgcttgggtgtgtccttcgctcgctccctccctccgtcttaggtcactgttttcaacctcgaataaaaactgcagccaacttccgaggcagcctcattgcccagcggaccccagcctctgccaggttcggtccgccatcctcgtcccgtcctccgccggcccctgccccgcgcccagggatcctccagctcctttcgcccgcgccctccgttcgctccggacaccatggacaagttttggtggcacgcagcctggggactctgcctcgtgccgctgagcctggcgcagatcgatttgaatataacctgccgctttgcaggtgtattccacgtggagaaaaatggtcgctacagcatctctcggacggaggccgctgacctctgcaaggctttcaatagcaccttgcccacaatggcccagatggagaaagctctgagcatcggatttgagacctgcaggtatgggttcatagaagggcacgtggtgattccccggatccaccccaactccatctgtgcagcaaacaacacaggggtgtacatcctcacatccaacacctcccagtatgacacatattgcttcaatgcttcagctccacctgaagaagattgtacatcagtcacagacctgcccaatgcctttgatggaccaattaccataactattgttaaccgtgatggcacccgctatgtccagaaaggagaatacagaacgaatcctgaagacatctaccccagcaaccctactgatgatgacgtgagcagcggctcctccagtgaaaggagcagcacttcaggaggttacatcttttacaccttttctactgtacaccccatcccagacgaagacagtccctggatcaccgacagcacagacagaatccctgctaccactttgatgagcactagtgctacagcaactgagacagcaaccaagaggcaagaaacctgggattggttttcatggttgtttctaccatcagagtcaaagaatcatcttcacacaacaacacaaatggctggtacgtcttcaaataccatctcagcaggctgggagccaaatgaagaaaatgaagatgaaagagacagacacctcagtttttctggatcaggcattgatgatgatgaagattttatctccagcaccatttcaaccacaccacgggcttttgaccacacaaaacagaaccaggactggacccagtggaacccaagccattcaaatccggaagtgctacttcagacaaccacaaggatgactgatgtagacagaaatggcaccactgcttatgaaggaaactggaacccagaagcacaccctcccctcattcaccatgagcatcatgaggaagaagagaccccacattctacaagcacaatccaggcaactcctagtagtacaacggaagaaacagctacccagaaggaacagtggtttggcaacagatggcatgagggatatcgccaaacacccaaagaagactcccattcgacaacagggacagctgcagcctcagctcataccagccatccaatgcaaggaaggacaacaccaagcccagaggacagttcctggactgatttcttcaacccaatctcacaccccatgggacgaggtcatcaagcaggaagaaggatggatatggactccagtcatagtataacgcttcagcctactgcaaatccaaacacaggtttggtggaagatttggacaggacaggacctctttcaatgacaacgcagcagagtaattctcagagcttctctacatcacatgaaggcttggaagaagataaagaccatccaacaacttctactctgacatcaagcaataggaatgatgtcacaggtggaagaagagacccaaatcattctgaaggctcaactactttactggaaggttatacctctcattacccacacacgaaggaaagcaggaccttcatcccagtgacctcagctaagactgggtcctttggagttactgcagttactgttggagattccaactctaatgtcaatcgttccttatcaggagaccaagacacattccaccccagtggggggtcccataccactcatggatctgaatcagatggacactcacatgggagtcaagaaggtggagcaaacacaacctctggtcctataaggacaccccaaattccagaatggctgatcatcttggcatccctcttggccttggctttgattcttgcagtttgcattgcagtcaacagtcgaagaaggtgtgggcagaagaaaaagctagtgatcaacagtggcaatggagctgtggaggacagaaagccaagtggactcaacggagaggccagcaagtctcaggaaatggtgcatttggtgaacaaggagtcgtcagaaactccagaccagtttatgacagctgatgagacaaggaacctgcagaatgtggacatgaagattggggtgtaacacctacaccattatcttggaaagaaacaaccgttggaaacataaccattacagggagctgggacacttaacagatgcaatgtgctactgattgtttcattgcgaatcttttttagcataaaattttctactctttttgttttttgtgttttgttctttaaagtcaggtccaatttgtaaaaacagcattgctttctgaaattagggcccaattaataatcagcaagaatttgatcgttccagttcccacttggaggcctttcatccctcgggtgtgctatggatggcttctaacaaaaactacacatatgtattcctgatcgccaacctttcccccaccagctaaggacatttcccagggttaatagggcctggtccctgggaggaaatttgaatgggtccattttgcccttccatagcctaatccctgggcattgctttccactgaggttgggggttggggtgtactagttacacatcttcaacagaccccctctagaaatttttcagatgcttctgggagacacccaaagggtgaagctatttatctgtagtaaactatttatctgtgtttttgaaatattaaaccctggatcagtcctttgatcagtataattttttaaagttactttgtcagaggcacaaaagggtttaaactgattcataataaatatctgtacttcttcgatcttcaccttttgtgctgtgattcttcagtttctaaaccagcactgtctgggtccctacaatgtatcaggaagagctgagaatggtaaggagactcttctaagtcttcatctcagagaccctgagttcccactcagacccactcagccaaatctcatggaagaccaaggagggcagcactgtttttgttttttgttttttgttttttttttttgacactgtccaaaggttttccatcctgtcctggaatcagagttggaagctgaggagcttcagcctcttttatggtttaatggccacctgttctctcctgtgaaaggctttgcaaagtcacattaagtttgcatgacctgttatccctggggccctatttcatagaggctggccctattagtgatttccaaaaacaatatggaagtgccttttgatgtcttacaataagagaagaagccaatggaaatgaaagagattggcaaaggggaaggatgatgccatgtagatcctgtttgacatttttatggctgtatttgtaaacttaaacacaccagtgtctgttcttgatgcagttgctatttaggatgagttaagtgcctggggagtccctcaaaaggttaaagggattcccatcattggaatcttatcaccagataggcaagtttatgaccaaacaagagagtactggctttatcctctaacctcatattttctcccacttggcaagtcctttgtggcatttattcatcagtcagggtgtccgattggtcctagaacttccaaaggctgcttgtcatagaagccattgcatctataaagcaacggctcctgttaaatggtatctcctttctgaggctcctactaaaagtcatttgttacctaaacttatgtgcttaacaggcaatgcttctcagaccacaaagcagaaagaagaagaaaagctcctgactaaatcagggctgggcttagacagagttgatctgtagaatatctttaaaggagagatgtcaactttctgcactattcccagcctctgctcctccctgtctaccctctcccctccctctctccctccacttcaccccacaatcttgaaaaacttcctttctcttctgtgaacatcattggccagatccattttcagtggtctggatttctttttattttcttttcaacttgaaagaaactggacattaggccactatgtgttgttactgccactagtgttcaagtgcctcttgttttcccagagatttcctgggtctgccagaggcccagacaggctcactcaagctctttaactgaaaagcaacaagccactccaggacaaggttcaaaatggttacaacagcctctacctgtcgccccagggagaaaggggtagtgatacaagtctcatagccagagatggttttccactccttctagatattcccaaaaagaggctgagacaggaggttattttcaattttattttggaattaaatacttttttccctttattactgttgtagtccctcacttggatatacctctgttttcacgatagaaataagggaggtctagagcttctattccttggccattgtcaacggagagctggccaagtcttcacaaacccttgcaacattgcctgaagtttatggaataagatgtattctcactcccttgatctcaagggcgtaactctggaagcacagcttgactacacgtcatttttaccaatgattttcaggtgacctgggctaagtcatttaaactgggtctttataaaagtaaaaggccaacatttaattattttgcaaagcaacctaagagctaaagatgtaatttttcttgcaattgtaaatcttttgtgtctcctgaagacttcccttaaaattagctctgagtgaaaaatcaaaagagacaaaagacatcttcgaatccatatttcaagcctggtagaattggcttttctagcagaacctttccaaaagttttatattgagattcataacaacaccaagaattgattttgtagccaacattcattcaatactgttatatcagaggagtaggagagaggaaacatttgacttatctggaaaagcaaaatgtacttaagaataagaataacatggtccattcacctttatgttatagatatgtctttgtgtaaatcatttgttttgagttttcaaagaatagcccattgttcattcttgtgctgtacaatgaccactgttattgttactttgacttttcagagcacacccttcctctggtttttgtatatttattgatggatcaataataatgaggaaagcatgatatgtatattgctgagttgaaagcacttattggaaaatattaaaaggctaacattaaaagactaaaggaaacagaaaaaaaaaaaaaaaaa

SEQ ID NO: 227 - DNA, 2652 bp, Homo sapiens
gacaatgtgcaaatgacaccgttttgtgctcaccagggcaaagcaagggagcgccctcacttcagcatctcagccctgctaaagaaaaagctgctgggtaacatcctttgtttttgcccagggaagctttagctgtgattcccttcagccggctcctgaatgtcaaagccagcacaggccagccagaagatgacactgagactacaggtttggaaggcggcgttgccatgccaggtgccgaagatgatgtggtgactccaggaaccagcgaagaccgctataagtctggcttgacaactctggtggcaacaagtgtcaacagtgtaacaggcattcgcatcgaggatctgccaacttcagaaagcacagtccacgcgcaagaacaaagtccaagcgccacagcctcaaacgtggccaccagtcactccacggagaaagtggatggagacacacagacaacagttgagaaagatggtttgtcaacagtgaccctggttggaatcatagttggggtcttactagccatcggcttcattggtgcaatcatcgttgtggttatgcgaaaaatgtcgggaaggtactcgccctaaagagctgaagggttacgccctgctgccaacgtgcttaaaaaaagaccgtttctgactctgtgccctgtccctgagctcgtgggagaagatgacccgtggaacacttgcctggcccactcagaatccacggtgacctctccgcttgccaaaataaccgaaggaaagaccgttcaccagacttggctcctctaaacatttgctgttcaaacatgtttttgaatatacattctataaaagattatttgaaagacaaaattcatagaaaatggagcaaaactgtataaactgatttgtaactaacactggaccattggatcgatattatatgctgtaaccatgtgtctccgtctgaccattcttgttattgttaaaatgcagaggaatctggaaatatttatatccacggagtccttggatccagtgctacgtcagtaaatagcaccagcattttgcaattgctgatctgctgaaatgtacacattctggtctagtttggtctatcttttaaagcctgatctggtgtgaataatcaactaggaaatctaaacttggataacacgtggtgaacaactgcctttagctggtccagattaatcatttcaaagacatccattttagatcacaagcaggaagtcgatagtctcaaaggcactttgtttctcccaagtaggccaccaggcagcctctagagttgctttacccaaatccttctccagccatgacttggtgactctaagcttgctcccacctgccccctccacttccctcagatgatgaggagccagggctaagggggcagccttctctcttcccagtgatgcacatccttcacattggctgctttgttctggaatatggatatctcagcctggatgccgaggaagctgctggatgcttaatggtgctagaggctcaagtgtgtttgaaaccaagagccagttgtcccccatgcagaaagaaatcctgtgtgagcctctggtatgagaaataaaatctgccagttttataacattcactttctgcctctgaggaaagatacagggaacaaaaatcaatttgtacagtcttaatattaaaagcagcttgactaaatacctgatttaaaaatagaagacatccccagtcctcatgacataccgcaaatatctgtggggtcctgttgaaaagaacaaaataaaggagcccaaggggtcattctgtctcagcaccatccagcctggcacttctcttcccatatatccattggatttttttttttttttcctaaacaaagtttttacactgagcagatgctctgtcatgatggcggttgtgcaattctggtatcctctaaatttgtaagcattcataaaacaggaaaaagtaaactatcattcggaagcacagcccattcctcccattttttgcaatgatgtctggatgttattttaaacagtgtgtctgtgtgttcccaaatccagctggccccaccagctcagattccattttttttgtgtgtgtgtgtgaaacgtagtctgcaactctgcctcccggcaattatacatgtgtcaggatgtcaaaaagcaattctcctgcctcagcctcctgagtagctgggactacaggttcctaccaccacacccggccaatttttgtatttttagtagagatggggtttcaccgtatcggcgaggatgatctctatctcttgacctcgtgatctgcccgcctcggcctcccaaagtgctgggattacaggcgtgtgccactgcgctcggcctcagattccatatttgaacaccagctgattgagagaaggggaatgagaagagctggatgagtttaaataactcattgttcagattcctgaacaggagttgggataatggccatcttttctttcctatcctttcttcccccctcactgtgaaaaataacagtccaccccaagtcatacactggacccagtgcctgcggggacaggactgtgggtttcttggtcacacctgtgttggtgctcaatgcagtgtagacatgttttcaaataaaacaaatgattgtgtacaaaaaaaaaaaaaaaaaa

SEQ ID NO: 228 - DNA, 7357 bp, Homo sapiens
gcactgctgatgaaacctggcgccggaacccgccagccctcggcgcccattcagtccgcgcaggcaggtgtgagcagcgggtcaactacctggcaggcgcgcacgcggccgcgggctcccgctaaccgcagcctccactcctctccccgcgcgccgcgcccccgccccgccccgccccgcccggtctcgccggccgagcgtccgttggtccttgagcgcgtccgacagtctgtctgttcgcgatcctgccggagccccgccgccgccggcttggattctgaaaccttccttgtatccctcctgagacatctttgctgcaagatcgaggctgtcctctggtgagaaggtggtgaggcttcccgtcatattccagctctgaacagcaacatggggtgcaaagtcctgctcaacattgggcagcagatgctgcggcggaaggtggtggactgtagccgggaggagacgcggctgtctcgctgcctgaacacttttgatctggtggccctcggggtgggcagcacactgggtgctggtgtctacgtcctggctggagctgtggcccgtgagaatgcaggccctgccattgtcatctccttcctgatcgctgcgctggcctcagtgctggctggcctgtgctatggcgagtttggtgctcgggtccccaagacgggctcagcttacctctacagctatgtcaccgttggagagctctgggccttcatcaccggctggaacttaatcctctcctacatcatcggtacttcaagcgtagcgagggcctggagcgccaccttcgacgagctgataggcagacccatcggggagttctcacggacacacatgactctgaacgcccccggcgtgctggctgaaaaccccgacatattcgcagtgatcataattctcatcttgacaggacttttaactcttggtgtgaaagagtcggccatggtcaacaaaatattcacttgtattaacgtcctggtcctgggcttcataatggtgtcaggatttgtgaaaggatcggttaaaaactggcagctcacggaggaggattttgggaacacatcaggccgtctctgtttgaacaatgacacaaaagaagggaagcccggtgttggtggattcatgcccttcgggttctctggtgtcctgtcgggggcagcgacttgcttctatgccttcgtgggctttgactgcatcgccaccacaggtgaagaggtgaagaacccacagaaggccatccccgtggggatcgtggcgtccctcttgatctgcttcatcgcctactttggggtgtcggctgccctcacgctcatgatgccctacttctgcctggacaataacagccccctgcccgacgcctttaagcacgtgggctgggaaggtgccaagtacgcagtggccgtgggctccctctgcgctctttccgccagtcttctaggttccatgtttcccatgcctcgggttatctatgccatggctgaggatggactgctatttaaattcttagccaacgtcaatgataggaccaaaacaccaataatcgccacattagcctcgggtgccgttgctgctgtgatggccttcctctttgacctgaaggacttggtggacctcatgtccattggcactctcctggcttactcgttggtggctgcctgtgtgttggtcttacggtaccagccagagcagcctaacctggtataccagatggccagtacttccgacgagttagatccagcagaccaaaatgaattggcaagcaccaatgattcccagctggggtttttaccagaggcagagatgttctctttgaaaaccatactctcacccaaaaacatggagccttccaaaatctctgggctaattgtgaacatttcaaccagccttatagctgttctcatcatcaccttctgcattgtgaccgtgcttggaagggaggctctcaccaaaggggcgctgtgggcagtctttctgctcgcagggtctgccctcctctgtgccgtggtcacgggcgtcatctggaggcagcccgagagcaagaccaagctctcatttaaggttcccttcctgccagtgctccccatcctgagcatcttcgtgaacgtctatctcatgatgcagctggaccagggcacctgggtccggtttgctgtgtggatgctgataggcttcatcatctactttggctatggcctgtggcacagcgaggaggcgtccctggatgccgaccaagcaaggactcctgacggcaacttggaccagtgcaagtgacgcacagccccgccccccggaggtggcagcagccccgagggacgcccccagaggaccgggaggcaccccaccctccccaccagtgcaacagaaaccacctgcgtccacaccctcactgcagccaaaggtgcaattacttgacctgcagccccagcccaccctcggctctgcagccggttctccgggccctggtcacctccagacagctgcctggccggggccactaggctgcggctggccactgtgtctcctcacttctctgaacaaagcagttcctcccctaccagctcagccccgagctgccgcagcctcaggcagaacggaggtcaccttctctccttatcttgggaaccaggccttcctcccggggactgttctgggattgaaattgtgcatactccaaactttcgcagccatcttcccgctcagccccagacacccagcaatcaagccagatgagtaccacaaaacagtgtgtccccagcagctccccaccccagagccaaatgacagtagtgcacttaaaaaggaaaatcaggcctgttgtccttctccggttgcattcagatgggtcattagggccggaccctgcctgccccttggcttctcagggctttgctctgacaccatgacagctgcccggggctgagggcagctggctccactcaaatgaggaagaagggatcactcccattagggcctgctttgcttatgcatgtgtgtgcacatgcatgtaaaccagggaccttcagctcacggcctccaggcctgggccagttcttgctgctcctgccgtctcccccgactggctgtgtcctgagtaactggaacatgagacagtatctgcaggactggccccatggtggccgagtcagaagtctgtttcctgtgagtcgccaccgttcactcagtcttgccctcccatgctttggagccagtctggtggctcctgtaaggttctcaaggctggtggcagctcagtctggggtcaggacatgtcggggtcatgcgtttctggccctgacataagctgtctggcctctctgtgacatgatgaaattgaaatcaatccacagtccatgaaattgtgacactccaccagattaagttagggcataacattaacttggaaatggccatgtcatcacccctgcggctgtcctatagctgagatgcgtgggtcgcaggggaggtgatttctaggcatattgctgtcccttttgtgtatctgtcatccggatgcttcggaccccacgcctctgcaagtgggagagacccgagcatcctccccacccccatagctccagtgcacgccacccccgtcttgcctgggtcggggcctgcggccagcaccatttcacacacactccttgtagatgggagccagaggaaacctgaacgtgggtggagcgttccactgagtctacttcaggagacagaaggcccatgctgatgggggaggaggagggatgtgggcattttggacaccaggggaaatggaaatgctgctttcaaaacttagtttcctttccatttcttcctagtctggcctttgacacaaatctggtagaaagaagcctgataaattgagggcacttgtaccctccctgtgcccccagaaggttcttggagagaagtgcaagaatttgtgaacacggcggtggagggcgggtggatggccatgggctgagcctccgtatcaggcctgctcaccttgctgggagctttattctgatctcattttgaatgttccagagggagcatcataagagcccagagctccgatttccaaagagtgatattgacatttatggagattggtgttgtaacatattttgataaatactaacttattttgttggggttttggttgtctcttgtcttaggacctggtagttatttgcttgatttttttttccgttattttctacataggcaaagagaattcgagggatagacagtctccaagaaaagtgaagtggtgggagagaattgcttttttcttttttttcttttctctagtttttctttctggctgagatttccgtgcaagacagcacccaatagactatttagagttgacatttgacattttaatgggcgccatggctcattttgtagattgagaaggtgcgtctcccctgctccaagtctcatcatgacagcgtgctgacagctgggagtctgtggccttcctcacgcagaggccttaaagctggacacagaagcacgcctaggctgggcagggatgggacccatgccccctccttagaggacgggcttcctggttaggaaaggacacgtgggggtgccttgcataatagttcactggtcaccgtgcttttatgagtagtgtttttgtgcacttgccaggggttttctctctgtgtgagaggggagtgatttaagcaatggtgtctggagtaagccttacaattttaatagactttttcttatcatatccctcatttctttccctgaaataaaaatacacacaagcaaaaaaaaaatgatagtttcacatctcttagttcccttgcccaaacaagaatattcttagttccactggccaggattttcctacatagtcagaacttacacattactagaggcacacccaccaaggagtattgtgtctacttttatctgtgcaccagccacaaatacccacattggaaagacccatttgtgatgggtaaacatcccttcctgtctcccacaacccctgtgactgccctgcatgtgttcatgacctccgaaggcccaaattcatgaagcagcaaacccagcagatctccacccccctgcctcaggacctctgctgaagagggggatgaagtgggtctccagggaggcagtgggggccttgttggcagctggctcgggagccggcttacaggagggcagctctgcagttgggaggggcaccgtccggaggagaccaggcctctacacaccccccactctacttatcatccctgctcacacacccttgtccaaggctttatgcatcggatttatttttccaaatcaagaggacagtgatagatgcattttccccaggctgtctcagaaaggtcgctaaatgtatactgttgtcagaattgctgagatctccccccacttttggtttttgcagcagtaaaaactctttccactgtgacttattttctctctcaggcagccagccacctggtcccttgtgctgactctagcacagtggccaggatccaatacgagtccaggggtgaccgcaggatggtgggggcagcgggcttctccacctaccccagccaccaaggccctgacgcactgcctcctgcaccttcagcacatccctgtgcacagctggaagggtgcatggcccgctcacctttgttcagatgggtggaaacgctgatgataccagctcctccctgccgtgcccctgccacggagcaggcattgtgaactggctggtgtttgcagtcccacgtggcatggcctccagcccaacccacagtggagactggagacagggcaatgagtctggtggggggcacgtggacatgccccataggggccccacccagacttaacaggcaaggtcctgggcattgcgcgacgcaggactcaatgctaaagcaagcctgcctggctctgtgccagggcccctcttctgattcacacatcccatttttacacagacccttccttcttaataaaggctgacagttctgttggcagccaagaacccacaccatgaagacagggagtgaggggcctttgtgcccaactccagcacagctgcgttctggggtgtgtgagaggcatgttcgtgtctgtgcgctggtggtctcgtgagacagttccgaggacggggaaattgcagggtggtgggggcgtgaggcttatatgtggaactgatgcagagttcgcctgcagacggatctggatatacactatgtataattgttacgtgtaatttaaaatatatctgtttgccatcgtcatgagaagattatatgtaaggctctgaagggagagggagatgtacattctgccaggctcctggggaccttatccgagtcatgaaattgattactgttgatccagtggtgcaagaagctacactccatgtgtcatcacgcttatgactcctaatgtatttttaaggcaaaaaatgtcagccgactccatcttcacccctcgattcctcgagtccagcctttctgtgccagtgcttcactgagccacaacgctctcgccatcgggacccggctgggcctggagtctcggggcacagttgccatggagccctcctgggtcattctacaaatgtgctgagtgccagctgaaaaccccacaggagatggagtaccttggccaagcttaaagagaagattttctcagggtatttattagtgtgtccagcagggtcaggaagcaggatggaaagatgcactcagactgttaatttattaacaaggcaaatgattttgtgtttcttgatgacagactattaagtttgggacttattttcccatttgagaagttataatatatatttaagatgataagtttcctgcttaagttgtgcctttcagcttcaatgagtttaaggagcactaagggtaatgataccaatgagggttggtttattatcaaacctgaatagctgtggtttctccagtaaatattttcttctactgaacatggagccattattaagagttgtgtgttttttattatgtacatttgtatatttttttgcttgtttgatgttctatttttctaatagttttcttttagtttcttaaagttgtgatactagatttagattctgatgctaactgcaaatcaggttggtctctgctgggtctctcctgcttttattttactttaaggacaagtgtagttgtcgtccaccacctttcaaaaaatgtgaaactgccctgcctcccctttttgctgacaacactgtgtacattgaccacttcctaccatactttatgttgtaaaatcaaactcttttgtggtacattatctcatgcttctgcaaattcgaataaattctatggcttccaaaaaaaaaaaaaaa

SEQ ID NO: 229 - DNA, 6314 bp, Homo sapiens; identical to SEQ ID NO: 195

SEQ ID NO: 230 - DNA, 3854 bp, Homo sapiens
gcggcgcggagggaggtgagcggcgcgcgcggagccggcgggcgaggaggaggactgcacagaggccccgcccccgccgccgcgagccggctcttcgccgcctccgaacccgctcactttgcctctcgcctctggacggcggcggggcggccgccggattcgcggccgcagggagcgccggagacggggagctattccgccccggcggctccattcggcgcccgcagccctcagggggtcggccccgcggcttgggagagggcaccgcggcctcggtgtgcgcagccctcgggcgcgagggtcggcggcgcggacacagccgcgttcccagccggtggggctcagcgctggcgccggcgaggactccccggccacccgcaggtaccgccgggcggagggcgcgctactagcagcgccggagatactcgagcccagggacccccgggccagcggagggcaggagcggagccccgagggagcgcgggccccgacggcgcgctcccccgtcagccacgggcaggcaggccccgcgtggcggcttggggtggggggctgcagcggggccctcgggccgaaagtcccccgggcggccagccatgaccttcgggcgcagcggggcggcctcggtggtgctgaacgtgggcggcgcccggtattcgctgtcccgggagctgctgaaggacttcccgctgcgccgcgtgagccggctgcacggctgccgctccgagcgcgacgtgctcgaggtgtgcgacgactacgaccgcgagcgcaacgagtacttcttcgaccggcactcggaggccttcggcttcatcctgctctacgtgcgcggccacggcaagctgcgcttcgcgccgcggatgtgcgagctctccttctacaacgagatgatctactggggcctggagggcgcgcacctcgagtactgctgccagcgccgcctcgacgaccgcatgtccgacacctacaccttctactcggccgacgagccgggcgtgctgggccgcgacgaggcgcgccccggcggggccgaggcggctccctccaggcgctggctggagcgcatgcggcggaccttcgaggagcccacgtcgtcgctggccgcgcagatcctggctagcgtgtcggtggtgttcgtgatcgtgtccatggtggtgctgtgcgccagcacgttgcccgactggcgcaacgcagccgccgacaaccgcagcctggatgaccggagcaggtactccgccggccctgggagggagccctccgggataattgaagctatctgcataggttggttcactgccgagtgcatcgtgaggttcattgtctccaaaaacaagtgtgagtttgtcaagagacccctgaacatcattgatttactggcaatcacgccgtattacatctctgtgttgatgacagtgtttacaggcgagaactctcaactccagagggctggagtcaccttgagggtacttagaatgatgaggattttttgggtgattaagcttgcccgtcacttcattggtcttcagacactcggtttgactctcaaacgttgctaccgagagatggttatgttacttgtcttcatttgtgttgccatggcaatctttagtgcactttctcagcttcttgaacatgggctggacctggaaacatccaacaaggactttaccagcattcctgctgcctgctggtgggtgattatctctatgactacagttggctatggagatatgtatcctatcacagtgcctggaagaattcttggaggagtttgtgttgtcagtggaattgttctattggcattacctatcacttttatctaccatagctttgtgcagtgttatcatgagctcaagtttagatctgctaggtatagtaggagcctctccactgaattcctgaattaatgcattgcaaatcaattcttgcatacacttcatagaaagactttgatgctgcttcatatttatgtgtttcttgctgggtgagcactgcagtggcattgtcatcatcttggtagggtaaaaattatccttcccagccgaagggataaaacagtttacttgttatggagtaaatagaattgagactgcaaaggaagaataatgactcctagagtaaactttaggacccggttttatttagacttgttttcccgtttccttgaatgattacacatttttaaaaaatacattatttgaacattttaaaacagaaaggtactattttccaaatgtttttccatcttatgaattcagaagaagcttggaacttatagtgttttttgtttgagagtaacattttcatttctaaatgttttataatttctcatatcaatgtcagaagtatcctggaaacatatgtcacatgcgggaactgtttaacaaatactttaaaaatttggccaaaatttaaactgtataatggagctagatacaagcaagaatagtatttgaaagacttttccagcatacttctcaattctttgctttatttttgtgccaattattcaccttatcgtgccgcttcatggaagcttgagtatgttctcccttttccattttggatttatctctttactgtaatgactcaaaaggtatttaagaattgacgagagcttgtgttgtttagcatcttactggataatatttgaattcattgctgttcctaggtgataactgtcctaatatttagatgtccaaacaagaatacttccaacataaaaattataataggaataatttgagatgactcaatattacaacctcttcttctcttaacctcctcccccaaacactagaggtttaataagacttatcagatgaaaggatatttatatagccttttagtagcaaagtcatacttacgtgttgtcactggattatcataaaagggagaaattaaatattactgtactcttagttgctgtgtagctaagtcaattttaagccagtaaaagcgatggatacataatgatttgatctgatctttaactattgtgaatcacagctacaccaaaactcttcttgtaagaatactgactaatatgccatgttaatctggctagattattaggactagataatgtaaaagtgatgattgtttagtaactaaattttagcaacagaaattagaattttgctttttcaaccagttaccataaagaagttagtgtatatataaacacaaataattagtgacagattcataaaaaattgaatgttgtacacagtaattttgtcagaggtagagaagacagggattgggaagtggtgggtgatggaggacctggatatatttatcaaataaagggttaccagaagtgttcattaaaggaattttagccatcatctagttcaaacctcaactattacaggtagaaaatcagggcaggagagaatataattgtgaaggagtcagggctaacacctggatctccagaaacctagcccagcaggttaatcttcacacatctctgggttctgagaaaagcctggaaaaatcacacttctttgtcattgtcatgctgaggtaataatagcaaaactgttttctttcccttaatttcctttcctaagcttatgtaatagtttggccattaaatatcttgccctattttccctattactgctagtatgctacttcttacatacccaaaagaaattcagttatttattgtatatttattgtattctaatataattgaaataaatggcatggatttattttttcttaactatttggattaaagctttgtggttcatgcaaacaatgtgcagatgatagcacctccatattactaataaaaatatgataaccatcaaaaaaaaaaaaaaaaaaaaaaaaaaaaaaaa

SEQ ID NO: 231 - DNA, 1679 bp, Homo sapiens
actgtaggcaccaccgggcgccgaatggctgttttctaactgggatcctcggtgacgtatggctgcctgccccttggcagctgtctttatggaccagtaggcagagcgaaattgacgctgacaagacttttgcatcttggaagggactgtaatctactgtagtgaagaacagagcctctcaatcagacgggtgtaaataagagacggaggggagtccaaaagaaaaggaagaggaggaaaaacaagtgtgtgttggggggaacagggggaaaagcatttttggtggatggtatgaagccagccatggaaactgcagccgaggaaaatactgaacaaagccaagagagaaaaggctgctttgaatgctgcatcaagtgtctgggaggagtcccctacgcctccctggtggccaccatcctctgcttctccggggtggccttattctgcggctgtgggcatgtggctctcgcaggcaccgtggcgattcttgagcaacacttctccaccaacgccagtgaccatgccttgctgagcgaggtgatacaactgatgcagtatgtcatctatggaattgcgtcctttttcttcttgtatgggatcattctgttggcagaaggcttttacaccacaagtgcagtgaaagaactgcacggtgagtttaaaacaaccgcttgtggccgatgcatcagtggaatgttcgttttcctcacctatgtgcttggagtggcctggctgggtgtgtttggtttctcagcggtgcccgtgtttatgttctacaacatatggtcaacttgtgaagtcatcaagtcaccgcagaccaacgggaccacgggtgtggagcagatctgtgtggatatccgacaatacggtatcattccttggaatgctttccccggaaaaatatgtggctctgccctggagaacatctgcaacacaaacgagttctacatgtcctatcacctgttcattgtggcctgtgcaggagctggtgccaccgtcattgccctgctgatctacatgatggctactacatataactatgcggttttgaagtttaagagtcgggaagattgctgcactaaattctaaattgcataaggagttttagagagctatgctctgtagcatgaaatatcactgacactccagactaaagcagagtctaggtttctgcaattttgttacagtaatttgtaaatagctttagtaaactcaccttgcatggtagattaataagatgacttactgtacatgaattacacaataatgagatctggtggctatttccacattttgaaaaggattcagttatttactgacagtggtgagcatcctttttaaaataatgttctcatacttaaacattagagagcagtatctttaaatgaattattaacactttggaatacttacattttctgttatttttgattgcctgataaccagtttcaatgatgaaaatgaaaacaagtgctgaagatgaaatggaagagaaccgttttaatctggattttgttttgtcacacctggaaaatactttgcaaatatgttctaaattgaaaacaatttttttatgatcacatggttcactaccaaatgaccctcaaataagccagatgaaaatttgaagaaaaaggtcacccagttctctggaaaaaaaaaaaaaaaaaaaaaaaaaa

SEQ ID NO: 232 - DNA, 927 bp, Homo sapiens
tctctccacgaggctgccggcttaggacccccagctccgacgtaagtccctctcgtgcgccacctccatccgctgcccctctgcccacgggccgggctcagatgtcgccctctggtcgcctgtgtcttctcaccatcgttggcctgattctccccaccagaggacagacgttgaaagataccacgtccagttcttcagcagactcaactatcatggacattcaggtcccgacacgagccccagatgcagtctacacagaactccagcccacctctccaaccccaacctggcctgctgatgaaacaccacaaccccagacccagacccagcaactggaaggaacggatgggcctctagtgacagatccagagacacacaagagcaccaaagcagctcatcccactgatgacaccacgacgctctctgagagaccatccccaagcacagacgtccagacagacccccagaccctcaagccatctggttttcatgaggatgaccccttcttctatgatgaacacaccctccggaaacgggggctgttggtcgcagctgtgctgttcatcacaggcatcatcatcctcaccagtggcaagtgcaggcagctgtcccggttatgccggaatcgttgcaggtgagtccatcagaaacaggagctgacaacctgctgggcacccgaagaccaagccccctgccagctcaccgtgcccagcctcctgcatcccctcgaagagcctggccagagagggaagacacagatgatgaagctggagccagggctgccggtccgagtctcctacctcccccaaccctgcccgcccctgaaggctacctggcgccttgggggctgtccctcaagttatctcctctgctaagacaaaaagtaaagcactgtggtctttgccccaaaaaaaaaaaaaaaaaaaa

SEQ ID NO: 233 - DNA, 5906 bp, Homo sapiens
gcaatcacgggtgtttagtctgcagccgagcagctaaagggagaaagaatcgctcaggaaagacacactgcagactccaccggcaccctgcaatagatggattccgactacacaagggagaaaacgcggaggtgacactctcctgcctggaaagaggacgaacgaccaaacaaacgcaaggactggactccatgccgaaggtatctggaagtcgtgacacggtgtgtataaaacaaaagtttgcgagctgttaattgctgtgctgtgttattaagagacgctttcaagtttcaagtaccaaatgtagctttacgttgccaaaggaagttgaggcaattgctttgctgttttaacttgctctgtgagggaaatctcataaactgaccaatgcaccaaatgaatgctaaaatgcactttaggtttgtttttgcacttctgatagtatctttcaaccacgatgtactgggcaagaatttgaaatacaggatttatgaggaacagagggttggatcagtaattgcaagactatcagaggatgtggctgatgttttattgaagcttcctaatccttctactgttcgatttcgagccatgcagaggggaaattctcctctacttgtagtaaacgaggataatggggaaatcagcataggggctacaattgaccgtgaacaactgtgccagaaaaacttgaactgttccatagagtttgatgtgatcactctacccacagagcatctgcagcttttccatattgaagttgaagtgctggatattaatgacaattctccccagttttcaagatctctcatacctattgagatatctgagagtgcagcagttgggactcgcattcccctggacagtgcatttgatccagatgttggggaaaattccctccacacatactcgctctctgccaatgatttttttaatatcgaggttcggaccaggactgatggagccaagtatgcagaactcatagtggtcagagagttagatcgggagctgaagtcaagctacgagcttcagctcactgcctcagacatgggagtacctcagaggtctggctcatccatactaaaaataagcatttcagactccaatgacaacagccctgcttttgagcagcaatcttatataatacaactcttagaaaactccccggttggcactttgctcttagatctgaatgccacggatccagatgagggcgctaatgggaaaattgtatattccttcagcagtcatgtgtctcccaaaattatggagacttttaaaattgattctgaaagaggacatttgactcttttcaagcaagtggattatgaaatcaccaaatcctatgagattgatgttcaggctcaagatttgggtccaaattcaatcccagcccattgcaaaattataattaaggttgtggatgttaatgacaataaacctgaaattaacatcaacctcatgtcccctggaaaagaagaaatatcttatatttttgaaggggatcctattgatacatttgttgctttggtcagagttcaggacaaggattctgggctgaatggagaaatagtttgtaagcttcatggacatggtcactttaaacttcagaagacatatgaaaacaattatttaatcttaactaatgccacactggatagagaaaagagatctgagtatagtttgactgtaatcgctgaggacagggggacacccagtctctctacagtgaaacattttacagttcaaatcaatgatatcaatgacaatccaccccacttccagagaagccgatatgaatttgtaatttcagaaaataactcaccaggggcatatatcaccactgttacagccacagatcctgatcttggagaaaatgggcaagtgacatacaccatcttggagagttttattctaggaagttccataactacatatgtaaccattgacccatctaatggagccatctatgccctcagaatctttgatcatgaagaagtgagtcagatcacttttgtggtagaagcaagagatggaggaagcccgaagcaactggtaagcaataccacagttgtgctcaccatcattgacgaaaatgacaacgttcctgtggttatagggcctgcattgcgtaataatacggcagaaatcaccattcccaaaggggctgaaagtggctttcatgtcacaagaataagggcaattgacagagactctggtgtgaatgctgaactcagctgcgccatagtagcaggtaatgaggagaatatcttcataattgatccacgatcatgtgacatccataccaacgttagcatggattctgttccctacacagaatgggagctgtcagttatcattcaggacaaaggcaatcctcagctacataccaaagtccttctgaagtgcatgatctttgaatatgcagagtcggtgacaagtacagcaatgacttcagtaagccaggcatccttggatgtctccatgataataattatttccttaggagcaatttgtgcagtgttgctggttattatggtgctatttgcaactaggtgtaaccgcgagaagaaagacactagatcctataactgcagggtggccgaatcaacttaccagcaccacccaaaaaggccatcccggcagattcacaaaggggacatcacattggtgcctaccataaatggcactctgcccatcagatctcatcacagatcgtctccatcttcatctcctaccttagaaagagggcagatgggcagccggcagagtcacaacagtcaccagtcactcaacagtttggtgacaatctcatcaaaccacgtgccagagaatttctcattagaactcacccacgccactcctgctgttgagcaggtctctcagcttctttcaatgcttcaccaggggcaatatcagccaagaccaagttttcgaggaaacaaatattccaggagctacagatatgcccttcaagacatggacaaatttagcttgaaagacagtggccgtggtgacagtgaggcaggagacagtgattatgatttggggcgagattctccaatagataggctgttgggtgaaggattcagcgacctgtttctcacagatggaagaattccagcagctatgagactctgcacggaggagtgcagggtcctgggacactctgaccagtgctggatgccaccactgccctcaccgtcttctgattataggagtaacatgttcattccaggggaagaattcccaacgcaaccccagcagcagcatccacatcagagtcttgaggatgacgctcagcctgcagattccggtgaaaagaagaagagtttttccacctttggaaaggactccccaaacgatgaggacactggggataccagcacatcatctctgctctcggaaatgagcagtgtgttccagcgtctcttaccgccttccctggacacctattctgaatgcagtgaggtggatcggtccaactccctggagcgcaggaagggacccttgccagccaaaactgtgggttacccacagggggtagcggcatgggcagccagtacgcattttcaaaatcccaccaccaactgtgggccgccacttggaactcactccagtgtgcagccttcttcaaaatggctgccagccatggaggagatccctgaaaattatgaggaagatgattttgacaatgtgctcaaccacctcaatgatgggaaacacgaactcatggatgccagtgaactggtggcagagattaacaaactgcttcaagatgtccgccagagctaggagattttagcgaagcatttttgtttccatgtatatggaaatagggaacaacaacaacaacaaaaaaccctgaaagaactggcattgccaaatagttgcatttatcataaatgtgtctgtgtatattgaatattaaatactgtattttcgtatgtacacaatgcaagtgtgattattttaatctgtattttaaaaatacatttgtaccttatatttatgtgtaatttaacaaacaaattttatttttttactcccatgacagacatgtttttcctagtcgtgtagaaactagccactgttcaaatctgatacactattcaaccacaaagtgtaaaggcactgcttagattagttttgttggggaagaattattatgttgtatgaacaaccccactgaagcattatacaattcttaattccattaagtgatcccactttttttcaataactttttagaaattaagaatcattaaaattgttaagctattttattgttattttctctactttctactagccccaatagttgaactcttataggaaaatcgaaagataaagtgaaagtttatttcaggactgagaaatatcttgaaggttatttattagatgactatctcaaatgaactttttatagacaatgatgaaaacagaattaaagtcaatgtttcctgactcccaggcccctactattccaggccatcacactggcctgttccggagaatatttctctcacaatattattatctacttataattatggtaaacaataaattttattccatccttgtagtatgaaacatgctccaaggaaatggaatctgtcctttaaatggataacagtatgtgttctaatggcataaaatattactggataaaaacagttgtgtcagtgtctctcctaaggtagtaaatataattgacttattctgaacccattctattttgaatctcccctttcctctcacaatacttgaacattttaatcttttggaatattgtctttctttgttataactattcatttttagcttttgtctccagtgcatgatctcatatttttgcttttatttttagtataagaacatttataaaatcatatttttgttactgcaattgttttatttgttgtgtggcaaatgagaaatcctttatttattgtgctgtgatctctctgtgtggaatgccttggtgagagagatgcttattatgactattatcatttctgaccaagcttctattaatgttatttctaataatacactatcttgattgtactctccagaaaatttttctgtcagtgaaaataaaagaaaaattaaagtaaagctaaggaactgtctataagtcagagtcctgttcctacatatttgttcaaaagcttggcatgcagcaggcccttcctgagcgggtgattcagtgttgagtttcaaataataaacaggcagcattcagttggctgggcgaacaagaaaaacacaatggaaaaggaatgagtttgagacttgtaatgggaatgaaagtagtaagccatattccagctaaataagttaaatgcatttggggaataaagaaaaaagagtaagcaagcaataattgcttgaatatttttcaaattacaacaaaaaaaaatactttcttaggacattttgtattaaattgtgcaggataaaaaggtatccttacaatgtttccaggaggcaagaatattatcgtccctggcttgctagtcaggaattgaaacactgggaaagttaagtaactgaaaagtgactaaaattcagatatttgaattctcaaatgagtaccacattaaatagaatatattacctctttcaacaggcacattttcctttataggagagattgcaattacaagtgaaatttcagtatatttttcagtagattacacacacaaacgctaaccatatttaaatgcattctgcctttcaacttcacttcctttcagtatatattaccattaagaaaaagacttttatatcctcactgttcttaatttaaagcaccagcagtaatatgggaagctatgctgaaaaccgctattttgaataatgtgaaataaataaaatgcaatatttcattcaacacaaaa

SEQ ID NO: 234 - DNA, 1796 bp, Homo sapiens
ccttttcccctgcctgcccttcgggcacctcaggaaggcaccttcctctgtcagaatggccaccatggtaccatccgtgttgtggcccagggcctgctggactctgctggtctgctgtctgctgaccccaggtgtccaggggcaggagttccttttgcgggtggagccccagaaccctgtgctctctgctggagggtccctgtttgtgaactgcagtactgattgtcccagctctgagaaaatcgccttggagacgtccctatcaaaggagctggtggccagtggcatgggctgggcagccttcaatctcagcaacgtgactggcaacagtcggatcctctgctcagtgtactgcaatggctctcagataacaggctcctctaacatcaccgtgtacaggctcccggagcgtgtggagctggcacccctgcctccttggcagccggtgggccagaacttcaccctgcgctgccaagtggaggatgggtcgccccggaccagcctcacggtggtgctgcttcgctgggaggaggagctgagccggcagcccgcagtggaggagccagcggaggtcactgccactgtgctggccagcagagacgaccacggagcccctttctcatgccgcacagaactggacatgcagccccaggggctgggactgttcgtgaacacctcagccccccgccagctccgaacctttgtcctgcccgtgacccccccgcgcctcgtggccccccggttcttggaggtggaaacgtcgtggccggtggactgcaccctagacgggctttttccagcctcagaggcccaggtctacctggcgctgggggaccagatgctgaatgcgacagtcatgaaccacggggacacgctaacggccacagccacagccacggcgcgcgcggatcaggagggtgcccgggagatcgtctgcaacgtgaccctagggggcgagagacgggaggcccgggagaacttgacggtctttagcttcctaggacccattgtgaacctcagcgagcccaccgcccatgaggggtccacagtgaccgtgagttgcatggctggggctcgagtccaggtcacgctggacggagttccggccgcggccccggggcagccagctcaacttcagctaaatgctaccgagagtgacgacggacgcagcttcttctgcagtgccactctcgaggtggacggcgagttcttgcacaggaacagtagcgtccagctgcgagtcctgtatggtcccaaaattgaccgagccacatgcccccagcacttgaaatggaaagataaaacgagacacgtcctgcagtgccaagccaggggcaacccgtaccccgagctgcggtgtttgaaggaaggctccagccgggaggtgccggtggggatcccgttcttcgtcaacgtaacacataatggtacttatcagtgccaagcgtccagctcacgaggcaaatacaccctggtcgtggtgatggacattgaggctgggagctcccactttgtccccgtcttcgtggcggtgttactgaccctgggcgtggtgactatcgtactggccttaatgtacgtcttcagggagcaccaacggagcggcagttaccatgttagggaggagagcacctatctgcccctcacgtctatgcagccgacagaagcaatgggggaagaaccgtccagagctgagtgacgctgggatccgggatcaaagttggcgggggcttggctgtgccctcagattccgcaccaataaagccttcaaactccctaaaaaaaaaaaaaaaaaa

SEQ ID NO: 235 - DNA, 3924 bp, Homo sapiens
atggagccccgggctgccgcggcgggcgagccagagccgccggcggcgtcctcctccttccaggcccggctctggaagaacctgcagctgggggtgggcaggagcaagggcggcgggggcgggcgcgctgggggtccagagcgccgcactgcggacaccccgtcgccctccccgccacccccggtgggcacagggaatgcaccggccagggggagtggtgcaggcagcaggtggagcggcttcaagaagcggaagcaagtgctggaccgagtcttctcctcctcgcagcccaacctgtgctgctcgtcgccggagcccctggagcccggcggcgccggcagagccgagcaggggtccacgctacgccgccggatccgcgagcatttgctccccgccgtaaaggggcccgcggcggcctcgggagcagcgggagggacgcctcctggcggacgctcccccgactcagctccttcctcttcctccgcctcatcctccctgtcctcctcgccccagcctcccccgaggggggaccgcgcccgagatgagggtgcacggcgtcagggccccggggcgcacttgtgccaccagaagagctcctctctgccgggcaccgcctgcctggagcagctgctggagccgccgcctcctcccgcagagccggcgcggagtcccgcggagtctcgggccccggagacgggcgaggagcacggcagcagccagaaaataataaacactgctggaaccagtaatgcagaagtccccttggctgatcccggaatgtaccagctggacattacattaagaaggggtcaaagtttagctgctcgagatcgaggagggacgagtgatccatatgtgaagtttaaaatcggaggaaaagaagtttttagaagtaagataatacacaagaacctcaaccctgtgtgggaagaaaaagcttgtattctggttgatcatcttagggagccattgtatataaaggtatttgactatgattttggactacaggatgactttatgggctcagcctttctggatctgacacaattggagttaaacaggcccacagatgtgacccttactctgaaagatcctcattatcctgaccatgatcttggaatcattttgctctcagtcatccttacccctaaagaaggagagtccagggatgtgacaatgctaatgaggaagagttggaaaagatcaagtaaggaactttcagaaaatgaagtggttggatcttatttctctgtgaagtctctcttttggaggacgtgcggcaggccagctcttcctgtcctgggcttctgcagagcagagcttcagaatccttattgcaaaaatgtacaatttcagacccaaagtttacgcctatcagacctacacagaaaatcgcatctttggagaggaatagtcagcatcaccttgattgaagggagagacctcaaggccatggattccaacgggttgagcgatccctacgtgaagttccggcttgggcatcagaagtacaagagcaagattatgccaaaaacgttgaatcctcagtggagggaacaatttgattttcacctttatgaagaaagaggaggagtcattgatatcactgcatgggacaaagatgctgggaaaagggatgatttcattggcaggtgccaggtcgacctgtcagccctcagtagggaacagacgcacaagctggagttgcagctggaagagggtgagggacacctggtgctgctggtcactctgacagcatcagccacagtcagcatctctgacctgtctgtcaactccctggaggaccagaaggaacgagaggagatattaaagagatatagcccattgaggatatttcacaacctgaaagatgtgggatttctccaggtgaaagtcatcagagcggaagggttaatggctgccgacgtcactggaaaaagtgacccattttgtgtggtagaactgaacaacgatagactgctaacacatactgtctacaaaaatctcaatcctgagtggaataaagtcttcacgttcaacattaaagatatccattcagttcttgaagtgacagtttatgatgaagatcgggatcgaagtgctgactttctgggcaaagttgctataccattgctgtctattcaaaatggtgaacagaaagcctacgtcttgaaaaacaagcagctgacagggccaacaaagggggtcatctatcttgaaatagatgtgatttttaatgctgtgaaagccagcttacgaacattaatacccaaagaacagaagtacattgaagaggaaaacagactctctaaacagctgctactaagaaactttatcagaatgaaacgttgtgtcatggtgctggtaaatgctgcatactacgttaatagttgctttgattgggattcacccccaaggagtctcgctgcttttgtgctctttctctttgttgtctggaactttgagctctacatgataccactggttttgttgttactattgacatggaactacttcttgataatatcagggaaagataacaggcaacgtgatacagtagtggaggacatgctagaggacgaggaagaagaagatgacaaagatgacaaggacagtgaaaaaaagggatttataaataaaatctatgccatccaggaggtatgtgtcagtgtccagaacatcctagatgaagtggcttcctttggcgaaaggataaagaatactttcaactggactgtcccattcttaagctggctggccattgtagccctctgtgtgttcacagccatcctgtactgcattccgctgagatacattgtccttgtctggggcatcaataaatttacaaaaaagcttcggagtccatatgcaattgataacaatgaactacttgacttcctttccagagtcccttcagatgtacaagtggtgcaataccaagaactgaaaccagatccttctcatagcccatataaaagaaagaaaaacaatcttggctagccagctcccagcactgaggagaccagcatctgtttgggaagataaaagaaaaagccctcagcctcagcagcatttcctttctttctgctttttatttattttgcctttttatcatgatcgagagaatctgtaaatagtgtacaaaggcatatgtctttgaatatatacttctattgtacagactcaacttgataaaggttttgctactgctgtgtcaaaaccttgttagctgtggataataatataacacactgaaagaacaaatataagaatgataacactggaagatatattcttatctaattactagtggattaaatactcacctgtgctctgattaaatctacatcaattgtaaatgtcgatttgattttaaagtttttttttaatgcgactattttttatctgaaaagtaatccattacacttttctatgttttatacatttcaaaagggagggaaattccaaagcctgaataatggaatggatacatttcaatttaacatatattctggctttagatcccgacattcactcctgtgcaaattacttaggtatgacttaggctaattttaagctaataagtgaaggtacattcactccctcaagagaatcaatactcagaaggttacaaagttttctttatagaatttcaatcaatcattccatctaaaaccttaaaatctctacaggactacataacataaatactgccagtttataaacgattgcctatctgaatttttatacctaccactactttaatttatacagttagttagcaaattagcaacccagtaagtacagttatcaaaaatactaggaaactatatccatatcgcttttggtgtcagattgtatctgtgcatctaaaaatattttaataaatactcaagtgctctcagagaaaaaaaaaaaaaaaaa

SEQ ID NO: 236 - DNA, 1753 bp, Homo sapiens; identical to SEQ ID NO: 202

SEQ ID NO: 237 - DNA, 2316 bp, Homo sapiens; identical to SEQ ID NO: 203

SEQ ID NO: 238 - DNA, 3081 bp, Homo sapiens
ctgagctgcctggcgccgtcttgatactttcagaaagaatgcattccctgtaaaaaaaaaaaaaaaatactgagagagggagagagagagagaagaagagagagagacggagggagagcgagacagagcgagcaacgcaatctgaccgagcaggtcgtacgccgccgcctcctcctcctctctgctcttcgctacccaggtgacccgaggagggactccgcctccgagcggctgaggaccccggtgcagaggagcctggctcgcagaattgcagagtcgtcgcccctttttacaacctggtcccgttttattctgccgtacccagtttttggatttttgtcttccccttcttctctttgctaaacgacccctccaagataatttttaaaaaaccttctcctttgctcacctttgcttcccagccttcccatccccccaccgaaagcaaatcattcaacgacccccgaccctccgacggcaggagccccccgacctcccaggcggaccgccctccctccccgcgcgcgggttccgggcccggcgagagggcgcgagcacagccgaggccatggaggtgacggcggaccagccgcgctgggtgagccaccaccaccccgccgtgctcaacgggcagcacccggacacgcaccacccgggcctcagccactcctacatggacgcggcgcagtacccgctgccggaggaggtggatgtgctttttaacatcgacggtcaaggcaaccacgtcccgccctactacggaaactcggtcagggccacggtgcagaggtaccctccgacccaccacgggagccaggtgtgccgcccgcctctgcttcatggatccctaccctggctggacggcggcaaagccctgggcagccaccacaccgcctccccctggaatctcagccccttctccaagacgtccatccaccacggctccccggggcccctctccgtctaccccccggcctcgtcctcctccttgtcggggggccacgccagcccgcacctcttcaccttcccgcccaccccgccgaaggacgtctccccggacccatcgctgtccaccccaggctcggccggctcggcccggcaggacgagaaagagtgcctcaagtaccaggtgcccctgcccgacagcatgaagctggagtcgtcccactcccgtggcagcatgaccgccctgggtggagcctcctcgtcgacccaccaccccatcaccacctacccgccctacgtgcccgagtacagctccggactcttcccccccagcagcctgctgggcggctcccccaccggcttcggatgcaagtccaggcccaaggcccggtccagcacagaaggcagggagtgtgtgaactgtggggcaacctcgaccccactgtggcggcgagatggcacgggacactacctgtgcaacgcctgcgggctctatcacaaaatgaacggacagaaccggcccctcattaagcccaagcgaaggctgtctgcagccaggagagcagggacgtcctgtgcgaactgtcagaccaccacaaccacactctggaggaggaatgccaatggggaccctgtctgcaatgcctgtgggctctactacaagcttcacaatattaacagacccctgactatgaagaaggaaggcatccagaccagaaaccgaaaaatgtctagcaaatccaaaaagtgcaaaaaagtgcatgactcactggaggacttccccaagaacagctcgtttaacccggccgccctctccagacacatgtcctccctgagccacatctcgcccttcagccactccagccacatgctgaccacgcccacgccgatgcacccgccatccagcctgtcctttggaccacaccacccctccagcatggtcaccgccatgggttagagccctgctcgatgctcacagggcccccagcgagagtccctgcagtccctttcgacttgcatttttgcaggagcagtatcatgaagcctaaacgcgatggatatatgtttttgaaggcagaaagcaaaattatgtttgccactttgcaaaggagctcactgtggtgtctgtgttccaaccactgaatctggaccccatctgtgaataagccattctgactcatatcccctatttaacagggtctctagtgctgtgaaaaaaaaaatgctgaacattgcatataacttatattgtaagaaatactgtacaatgactttattgcatctgggtagctgtaaggcatgaaggatgccaagaagtttaaggaatatgggagaaatagtgtggaaattaagaagaaactaggtctgatattcaaatggacaaactgccagttttgtttcctttcactggccacagttgtttgatgcattaaaagaaaataaaaaaaagaaaaaagagaaaagaaaaaaaaagaaaaaagttgtaggcgaatcatttgttcaaagctgttggcctctgcaaaggaaataccagttctgggcaatcagtgttaccgttcaccagttgccgttgagggtttcagagagcctttttctaggcctacatgctttgtgaacaagtccctgtaattgttgtttgtatgtataattcaaagcaccaaaataagaaaagatgtagatttatttcatcatattatacagaccgaactgttgtataaatttatttactgctagtcttaagaactgctttctttcgtttgtttgtttcaatattttccttctctctcaatttttggttgaataaactagattacattcagttggcctaaggtggttgtgctcggagggtttcttgtttcttttccattttgtttttggatgatatttattaaatagcttctaagagtccggcggcatctgtcttgtccctattcctgcagcctgtgctgagggtagcagtgtatgagctaccagcgtgcatgtcagcgaccctggcccgacaggccacgtcctgcaatcggcccggctgcctcttcgccctgtcgtgttctgtgttagtgatcactgcctttaatacagtctgttggaataatattataagcataataataaagtgaaaatattttaaaactacaa

SEQ ID NO: 239 - DNA, 6475 bp, Homo sapiens
gtttggcaagtcagtgcaagaggctgacttctgagaggcttccaggagcccgaagagaggacctccacgggagaagggagtgcgtgtgctcggttttgtttttttctctcttttttttttttttttctgaatgaacagctttgcccaagtgactgaaaaatacagcttcttcctgaatctaccggcgtagttgctgaagagcgctctagacaggacatggctctgaagactcactctttggaatgtcctcttgctcccggcttataaacaactgtcccgaggaaagaaaggttttacatagccaaatacagcctgacaaatggcacttcggaactgtgctttctgatgacaacgcgttcgatttctgacaaagcctctcgcacgctgcccctggagggaagtcctaagtaaaactcagaccctccttaaagtgaggagcgagggcttggacggtgaacacggcagcatggcatccgcggggcacattatcaccttgctcctgtggggttacttactggagctttggacaggaggtcatacagctgatactacccacccccggttacgcctgtcacataaagagctcttgaatctgaacagaacatcaatatttcatagcccttttggatttcttgatctccatacaatgctgctggatgaatatcaagagaggctcttcgtgggaggcagggaccttgtatattccctcagcttggagagaatcagtgacggctataaagagatacactggccgagtacagctctaaaaatggaagaatgcataatgaagggaaaagatgcgggtgaatgtgcaaattatgttcgggttttgcatcactataacaggacacaccttctgacctgtggtactggagcttttgatccagtttgtgccttcatcagagttggatatcatttggaggatcctctgtttcacctggaatcacccagatctgagagaggaaggggcagatgtccttttgaccccagctcctccttcatctccactttaattggtagtgaattgtttgctggactctacagtgactactggagcagagacgctgcgatcttccgcagcatggggcgactggcccatatccgcactgagcatgacgatgagcgtctgttgaaagaaccaaaatttgtaggttcatacatgattcctgacaatgaagacagagatgacaacaaagtatatttcttttttactgagaaggcactggaggcagaaaacaatgctcacgcaatttacaccagggtcgggcgactctgtgtgaatgatgtaggagggcagagaatactggtgaataagtggagcactttcctaaaagcgagactcgtttgctcagtaccaggaatgaatggaattgacacatattttgatgaattagaggacgtttttttgctacctaccagagatcataagaatccagtgatatttggactctttaacactaccagtaatatttttcgagggcatgctatatgtgtctatcacatgtctagcattcgggcagccttcaacggaccatatgcacataaggaaggacctgaataccactggtcagtctatgaaggaaaagtcccttatccaaggcctggttcttgtgccagcaaagtaaatggagggagatacggaaccaccaaggactatcctgatgatgccatccgatttgcaagaagtcatccactaatgtaccaggccataaaacctgcccataaaaaaccaatattggtaaaaacagatggaaaatataacctgaaacaaatagcagtagatcgagtggaagctgaggatggccaatatgacgtcttgtttattgggacagataatggaattgtgctgaaagtaatcacaatttacaaccaagaaatggaatcaatggaagaagtaattctagaagaacttcagatattcaaggatccagttcctattatttctatggagatttcttcaaagcgggcaacagctgtatattggatctgcttctgctgtggctcaagtcagattccatcactgtgacatgtatggaagtgcttgtgctgactgctgcctggctcgagacccttactgtgcctgggatggcatatcctgctcccggtattacccaacaggcacacatgcaaaaaggcgtttccggagacaagatgttcgacatggaaatgcagctcagcagtgctttggacaacagtttgttggggatgctttggataagactgaagaacatctggcttatggcatagagaacaacagtactttgctggaatgtaccccacgatctttacaagcgaaagttatctggtttgtacagaaaggacgtgagacaagaaaagaggaggtgaagacagatgacagagtggttaagatggaccttggtttactcttcctaaggttacacaaatcagatgctgggacctatttttgccagacagtagagcatagctttgtccatacggtccgtaaaatcaccttggaggtagtggaagaggagaaagtcgaggatatgtttaacaaggacgatgaggaggacaggcatcacaggatgccttgtcctgctcagagtagcatctcgcagggagcaaaaccatggtacaaggaattcttgcagctgatcggttatagcaacttccagagagtggaagaatactgcgagaaagtatggtgcacagatagaaagaggaaaaagcttaaaatgtcaccctccaagtggaagtatgccaaccctcaggaaaagaagctccgttccaaacctgagcattaccgcctgcccaggcacacgctggactcctgatggggtgagactatctactgtcttttgaagaatttatatttggaaagtaaaaaagtaaaaaaataaatcatccaacttctttgcattacttaaaagagatttctgtaatacaggaatgactatgaaggtgttataataaattattctacatactcatttgactggataaactttacataaaattaactaattttttaaataaatgcattgcttaatggtttctcattatgtttatcaaaaaacaactgtagctgttattttcagtacttggctgcttttctgtgaaaattattattttacttttggaagacaagattattagaatattgaagaaaaattggagacttataatcatggtaaatataaaactaaatatgttttaatatttctgaatttttcttttccatcacaatgtaagatatgcagaatacaagatactttggcattctcatgtgaactttctgtactctttaaggattattttattagtgttgtttaagccatgagtgttaagtagcaggtgtgttgtgagtgctgtaacccatgaaaggaaaaatgtcattctgaggcttgtgcccttcgtaaaatattcattaaagtacattcacactatttttgctttataacacagtctttaattttcactcactgtggaaataaaaactaaggtaacttctcagaaagatatcaaatctcagaaagaatgtcaaatcagatgaagttatagttaggattctaactactgtaaaagatttttgcttccctcttgtggtaaaaaaaattatattctcacacatttcttttttctctacagacggatatctgtttaggaaagatttgaaagcagattatcagtaggtacatggatacatcaagttcatttgcagaaacaaataactgaaataaaaaacatgttaatccttgtatcatactttaatatgaaagtattgtttatagataatttatctcacaagtcaaaaatgaagattttgcagcactgaaaatctattaaagctccaaattttaagtttctaaataatcttcgctgaaatctaaaatatactataacaaccgtgttttatttgtgaaaaaaatattaaagtgatttgctctcaaatatcaaattttcttctctcttttatattaagagacagaaaattgtttcatgagttcacttaactactgagatattcagagcatttttacctctctcttaaatgttataaaaaacaattgtatttttaagaatgtttatttatcaaagtctttccttcttctattaaatatttagcaattacctttctaaaatatgaaattttgtaagatgttttcacctaaataaaaattgaaagcaagtggattacacaggagaaccattatgaacatttatttagatattaatcttaaacagtgtttatttcagttttcaaagttagcttataggttatacatttaagttaaagtgctcataatcacttgcaatttcattgtaaaatgaacaaatacataaatattttaagaaaaatttaagtttattcagataagtcaccatgcttcaaaagatctaagaaatgcaaatatactgaaaattgacatcctctgaaaattccacttgctatttacccaagaatccactggaggtcattactgccattaaataataactgaaaagactatgtagtgaaatgtatttttaaaaactatattcagtaaaagcctgctcaatttggagaaatagaaccacaaacacagatcacaggggccttacaaagtttatgtctgaacaaataagtcaattaagtacactttattgaaaattgccttccattaacacacaagaaagaaagcaggattttctcctgtatctgaattttaaaattaaaaaggcagataagacataaatagttatcattttaattgcaataacacagacaagtagttaatgatgataacaatggtgtaacttgtaaactaaatatttggtaactgaagcaataggcagaggaaaatagcttttctatgacacaagtcataagaagtccatatactgaagagcgtttgattaaaataaagtgactattaaccagaaaagaaacattttacataaaatgctaaaatttattataggaaaataaatcaaacccaaagaaagtttattcaatgctaatttgaaagaaaattgataagaaaactttgagggcccaagtccacaatttggtgagaccactaaattttacatataattatacacacacatatgtacatatatatgtatataatcttgcttcccgcctgtttatggcagtactgaagagaaatgggaaagaagagggagggagagagaaagacgaagggagagagaaagcagtttccaaggatatgtttcatgtcccaccattttctcagtttctccctctctctcccaacacacacacacacacacccctcacatactataaaataaatcttcactgccctatcaaaatacaaataaatcaatctatgctgttctgtccttcttgagaatctaaaacataccacaaaaatacatccccagtcttttgttctgtctgaggttagaattaattcaaattcagaatctgttgtgagaaatgcccaggctttaaaaattaaaaatggatggatcttctctgaactcagggagggcacatacttagatacctacaagacttggaggaattaagagttcacccttcatctcaccaaattttccccatttttctctttcttgtagaaggagagaaaccatgctctctagcaacattgagcaaaaatcataaccactcatctaatttctaagaggcacctccatcgagggccggtctcctgcttctttagacctcttctatctttgttacaggagaggacctgtggatagacttagttttgacataaaacaatgcccattcacctcctccttcagcacaacgtcacccattgggcaagagatccagatttgttaacaaaaaagattttacttcgtgattccacgtctataattctatattgctaattttttcttttgtgtgaattactgaatatttcagagcaaagctatcaacttggagaaacagggattaaaaataaggataaacactaataagagctctagaaaaaagggaacagaaagtctgcctgtttagtaagtggcaattccatacatattttagagttttttctatctaaaattagttaaatacttagaatgtttgtaatgagtgttcgatatttgctataggttttagggttttgtaaatcttcatagtaattataaacatttgtaaaatttgtaaaatactataagtcattttgagtgttggtgttaagcatgaaacaaacagcagctgttgtccttaaaaatgaattgacctggccgggcgcggtggctcacgcctgtaatcccagcactttgggaggccgaggcgggtggatcatgaggtcaggagatcgagaccatcctggctaacaaggtgaaaccccgtctctactaaaaatacaaaaaattagccgggcgcggtggcgggcgcctgtagtcccagctacttgggaggctgaggcaggagaatggcgtgaacccgggaagcggagcttgcagtgagccgagattgcgccactgcagtccgcagtccggcctgggcgacagagcgagactccgtctc

SEQ ID NO: 240 - DNA, 1740 bp, Homo sapiens
gcgcgggccagcagctctgcgaggggccggagcgcggcggagccatgcagtacccgcaccccgggccggcggcgggcgccgtgggggtgccgctgtacgcgcccacgccgctgctgcaacccgcacacccgacgcccttttacatcgaggacatcctgggccgcgggcccgccgcgcccacgcccgcccccacgctgccgtcccccaactcctccttcaccagcctcgtgtccccctaccggaccccggtgtacgagcccacgccgatccatccagccttctcgcaccactccgccgccgcgctggccgctgcctacggacccggcggcttcgggggccctctgtaccccttcccgcggacggtgaacgactacacgcacgccctgctccgccacgaccccctgggcaaacctctactctggagccccttcttgcagaggcctctgcataaaaggaaaggcggccaggtgagattctccaacgaccagaccatcgagctggagaagaaattcgagacgcagaaatatctctctccgcccgagaggaagcgtctggccaagatgctgcagctcagcgagagacaggtcaaaacctggtttcagaatcgacgcgctaaatggaggagactaaaacaggagaaccctcaaagcaataaaaaagaagaactggaaagtttggacagttcctgtgatcagaggcaagatttgcccagtgaacagaataaaggtgcttctttggatagctctcaatgttcgccctcccctgcctcccaggaagaccttgaatcagagatttcagaggattctgatcaggaagtggacattgagggcgataaaagctattttaatgctggatgatgaccactggcattggcatgttcagaaaactggatttaggaataatgttttgctacagaaaatcttcatagaagaactggaaggctatataagaaagggaatcaattctctggtattctggaaacctaaaaatatttggtgcactgctcaattaacaaacctacatggagaccttaattttgacttaacaaatagtttatgtactgctcttaggttgttttgataaagtgacattatagtgattaaattcttccccctttaaaaaaacagttagtggttttcactatttataaaaaattaattttgaactttttgttaaatttttaagttatagctttaaaggttttaataggaccttcttgaacgacttttctgtaatctgtttatctcccacttaatggaaaggcaaaggggtaccccaaatccagaggtgcctacatttcaggcagccttggagtattttaaaaggaaaacattctttacttttatatgacattcttatactgctgtctcaaatccaaaaacatttcagagctcttgtctcagagatgtgtgttctttttgtcagagatatggttgatgagaatcttaaatgcttgttttgcactatcacttagtacctgtttgaccaaggtgttaaggggatagtacctcccaattcaagcagagaaactgacctgactaaagttaatcgcagatgaactagaagtcacaggttaattaaatgtaagtagattgtagatactgttttatatcaaacaatgtttataatgtgtatatagaattgttcactgtaaaaaaaatggccaaaatgtgttttttttttaataagtaacttgactataaaataaagccgtccgtgggacgactgacctcgttgcaa

SEQ ID NO: 241 - DNA, 2148 bp, Homo sapiens
agaaaggactttgaagagcaagcggcgttgttcgcctgcggaagcagtgctgccggtctctggacaaatttctcccggaggtggagacaaggaagctccagcttcgctttcccttgtggcccagagtggaacatactgagctgcactgaatcatctggatgcactcgcaactttaggaactggtggcaatttgtaaaaagacagctctggaagttgaagagaccagtggcttcaagcaaaaagtaaattgaaaatgggagatatctttttgtgtaagaaagtggaatcaccaaagaagaatttgagagaatccaaacaaagggaggaggatgatgaagatccagatctgatctatgttggggtggagcatgtacatagagatgctgaagttctctttgtcgggatgatttcaaattcaaaaccagtcgtttcaaacattttgaacagagtcaccccaggctcaaagtcaagaagaaagaaaggccacttccgtcaatatcctgctcacgtgtcgcagcctgcaaatcatgtgacctctatggcaaaagccatcatgcccgtttctctgtctgaggggcgatcgacagatagtcctgtcactatgaagtcttcatctgaacctggttataaaatgagctcaccacaagttgtttctcccaattactcagattcgctccccccagggactcagtgtctagttggagctatggtctctggaggaggcagaaatgagagttctcctgattcaaagcgactttccacttcagatataaacagcagagattccaaaagggttaaactcagggatggaatcccaggggtaccttctttagctgtggtcccttcagatatgtcttctacaataagcacaaatacaccctcacaggggatctgcaactcatcaaaccatgttcagaatggagtaacatttccttggcctgatgctaatggaaaggcacatttcaatcttacagatccagagagagcaaatgagtctggcctggcaatgacagacatttcaagtctagcaagtcaaaacaagacctttgatcccaagaaagaaaatcccatcgtgttacttagcaacttttactatggacagcataaaggagatgggcagccggaacagaagactcacaccacctttaaatgcctcagctgcgtgaaagttctaaaaaatattaagtttatgaatcacatgaagcatcatttggaatttgagaagcagaggaacgacagctgggaagaccacaccacctgccagcactgccaccggcagtttcccactcccttccagctacagtgtcacattgatagtgtacacatcgccatggggccctctgctgtctgtaaaatctgtgaattgtcatttgaaacagatcaggtcctcttacaacacatgaaggaccatcataagcctggcgaaatgccctacgtgtgccaggtttgccattacagatcgtcggtctttgctgatgtggaaacacattttagaacgtgccatgaaaacacaaagaatttgctttgtctgttttgtctcaaacttttcaaaactgcaataccatacatgaatcattgttggaggcacagcagaaggagggtccttcagtgttccaagtgccggctacagtttttgacgttgaaggaggaaatagagcacaaaaccaaggaccatcaaacatttaaaaagccggagcaactgcaagggttccctcgtgaaacaaaagttattattcaaacttcagttcagccaggatcaagtggtatggcttccgttattgttagcaacactgaccctcagtcttctcctgtaaaaactaaaaagaagacggctatgaacactagagattccagactcccttgcagcaaggattctagctgaaaatatgttcgactgacttccaggagttccgaaaggcagaagtgaggctaggccatatgtgcattgtggctgtagatgctagcaagcaatgtcatcaactgtcaggttgtttttcacagtgacatctcatcagctccctattgtcaagaagtagctccaaagtctttgagccctttcccagtcaaatgctcccaacaaggcatcccttattctgacctcagaggtttttcttgtttatgaactttaaataaatggaatcacacaaa

SEQ ID NO: 242 - DNA, 4272 bp, Homo sapiens
tttgtgcctgtgattggctcagctctgcgtgtgaagagggaaaaggcttccgtttatttagcataatgatggaccaaaacaaaagaagaaatcatttcactcatgcttagggtgcgggctgcgagcgggacccgcggagctgcgctgtcctcgacgcctccgccaggcgcgggccgaggagcctccaagagctggcccggcccccggccgccgccgcccaaccccgggcatctgccccgcgccgttgtccccgcggcttcgggccggcgggaccgccccgtcccttccaggggtgacccgggggtcgcgggtgggacggcgcctgcggccgagtctggggggcgccgggtgtcgggtcgggaagcggccgccgcgactcttgcctcccgggcgtcgttgctccacgggcctgcctccacccgcggggacaggtgccccggctggggtctgttgggaagatggcgaccccgggcatgagctggcagcagcactattacggcggctcggcggccaaattcgcgccctcgccggccaccgcacagctggctgggcacagcatggactacagccaggagatgcacctgaaaatgagcaagaaaatcgcccagctcaccaaggtaatatatgctttaaacactaaaaatgatgagcatgaatctgcaattcaagccctcaaagatgctcatgaagaagaaattcaacaaattcttgctgaaacaagagaaaaaatattgcagtataaaagcaaagtaacagaggagctagaccttagaagaaagattcaagttttagaatcatcattagaagatcacataaaaatgaagcagcaggctttgacagaatttgaagcttataagcacagagttgaggacatgcaactttgtgcagaagcccagcatgtccaacgcatagtgaccatgtctagagaagtcgaagagattagaaggaaatttgaagaaaaattacggagctttggacaacttcaagtacagtttgaaaaagacaaacgattggcattggaagacttgcaagctgctcacagacgggagatacaagagctattgaagtcacagcaggatcacagtgcctcagtaaataaaggccaggaaaaggcagaggaactacacagaatggaggtggagtccctaaacaaaatgcttgaggagctaagacttgaacggaagaaactaattgaggattatgaaggcaagttgaataaagctcagtccttttatgaacgtgagcttgatactttgaaaaggtcacagctttttacagcagaaagcctacaggccagcaaagaaaaggaagctgatcttagaaaagaatttcagggacaagaagcaattttacgaaaaactataggaaaattaaagacagagttacagatggtacaggatgaagctggaagtcttcttgacaaatgccaaaagcttcagacggcacttgccatagcagagaacaatgttcaggttcttcaaaaacagcttgatgatgccaaggagggagaaatggccctattaagcaagcacaaagaagtggaaagtgagctagcagctgccagagaacgtttacaacagcaagcttcagatcttgtcctcaaagctagtcatattggaatgcttcaagcaactcaaatgacccaggaagttacaattaaagatttagaatcagaaaaatcgagagtcaatgagagattatctcaacttgaagaggaaagagcttttttgcgaagcaaaacccaaagtctggatgaagagcagaagcaacagattctagaactggagaagaaagtaaatgaagcaaagagaactcagcaagaatattatgaaagggaacttaaaaacctgcaaagtagattggaagaggaggtgactcaattaaacgaggcccattctaagactttggaagaattagcttggaagcaccatatggcaattgaagctgtccacagtaatgcaattagggataagaaaaaactgcaaatggatttggaagaacaacataacaaagataaactaaacctggaagaggataaaaatcagcttcaacaagagctagaaaacctaaaggaagtactggaagacaagttgaatacagccaatcaagagaccttactctatttacttacagattggccacctccaagatatggtaaggaaaagtgaacaaggtcttggctctgcagaaggacttattgctagtcttcaggactcccaggaaaggcttcagaatgagcttgacttgactaaagacagcctaaaggagaccaaggatgctctattaaatgtggagggtgagctagaacaagaaaggcaacagcatgaagaaacaattgctgccatgaaagaagaagagaagctcaaagtggacaaaatggcccatgacttagaaattaagtggactgaaaatcttagacaagagtgttctaaacttcgtgaagagttaaggcttcaacatgaagaggataagaagtcagcaatgtctcaacttttgcagttgaaagatcgagagaaaaatgcagcaagagattcatggcagaagaaagtagaagatctcttaaaccagatttccttgctgaaacagaatctggagatacagctttcccagtctcagacttctttgcaacaactgcaagcccagtttacgcaagaacgacagcggcttacgcaagagcttgaagaattagaggagcaacatcagcaaagacacaaatcattaaaagaagcacatgtccttgcatttcaaactatggaagaggaaaaggaaaaggagcaaagagctcttgaaaatcatttacaacagaagcattctgcagagcttcaatcactaaaagatgcacacagagagtcaatggagggcttccggatagaaatggaacaggaacttcagactcttcggtttgaattagaagatgaaggaaaggctatgcttgcttccttgcgctcagaactcaaccatcaacatgcagctgcaattgatttgttacggcataatcatcatcaagaattggcagctgctaaaatggaattagagagaagcatagacatcagcagaagacagagtaaggagcacatatgtagaattacagatctacaagaggaattaagacacagagagcatcacatctctgaattggataaggaggttcagcaccttcatgagaatataagtgccctaaccaaagaactggaatttaaggggaaagaaattctcagaatacgaagtgaatctaaccaacagataaggttgcatgaacaagatttaaacaagagacttgaaaaagagttggatgtcatgacagcagaccacctcagagagaaaaatatcatgcgggcagattttaataagactaacgagctactcaaggaaataaatgccgctttacaagtgtcattagaagaaatggaagaaaaatatctaatgagagaatcaaaaccagaagatatacagatgattacagaattaaaagccatgcttacagaaagagaccagatcataaagaaactaattgaggataataagttttatcagctggaattagtcaatcgagaaactaacttcaacaaagtgtttaactcaagtcctactgttggtgttattaatccattggctaagcaaaagaagaagaatgataaatcaccaacaaacaggtttgtgagtgttcccaatctaagtgctctggaatctggtggagtgggcaatggacatcctaaccgcctggatcccattcctaattctccagtccacgatattgagttcaacagcagcaaaccacttccacagccagtgccacctaaagggcccaagacatttttgaggtatcagtaagatgcatgtgcatgagctcaaggaacatgactactggagtttccattacacattgttgcgtgccttgtaattttccccaaagacgtcctgctcagagtgaagcttctccagtggcttctccagatccccagcgccaggagtggtttgcccggtacttcacattctgaaagaattgtgttggcacagctctgtatagactgttactaagagcatgactttatacagattgttatgtaaataggctttcctatgtcaaacactgtgaatgagaaagtatttgtctctccaacttgaaaatgcactgtatttcctgtgatatttattggaatcattctataaggtactatattatgtgtgtaattataactgttatttttatttgagatggaagagtctttaacctttgtaattactgcataataaattttgttagaatcaaac

SEQ ID NO: 243 - DNA, 6119 bp, Homo sapiens
gttcttttgttcttttctctctgcccccattttgtgggcccccaaattattatgggtcctgggcaccgtccctaatggataagccagccctgatctgagacacagagaggctgagggtctctaagaccactaagctagctacagcagagctcagacaagagcaactaggtctagacctctttctacatttgcgactatgaaaactatggagaaggctctgctcaagagcctctgccgctcctccgccccacggctcagtcaggattcgcccaaaatgaggacttccctgcaggcagtggcactctggggacagaaggcccctccccacagcatcactgccatcatgatcactgatgaccagcgaacgattgtgactggaagtcaagagggtcagctctgtctctggaatctctcacatgaactaaagatttcagcgaaagaactcctatttggtcattcagcttcggtaacatgtttggcaagagcaagggacttctctaaacagccctacattgttagtgctgctgaaaatggggagatgtgtgtttggaatgtcaccaatggacagtgcatggagaaggctacacttccttacaggcacactgcaatctgttattaccactgctcattccggatgacaggagaaggctggcttctttgttgtggagaatatcaagatgtccttataattgatgccaaaactttggctgttgttcacagttttagatcatctcagtttcctgactggatcaactgcatgtgcattgttcactccatgagaattcaagaagattctctcttggtggtatcagtagctggtgagctcaaagtatgggatctttcctcatctatcaacagcattcaggaaaagcaagatgtctatgaaaaagaatccaagtttcttgagtccttgaactgccagacaattcgattttgcacatatactgagagacttctattggtggtattttctaaatgttggaaggtttatgattattgtgatttttcccttctgctgactgaagttagtagaaatgggcagttctttgctggtggagaagtgattgctgctcacagaatcctcatctggacagaagatggtcacagttacatctatcagctgctgaacagtgggctttcaaaaagcatataccctgctgatggaagagtgcttaaagagaccatttatcctcatttactgtgctctacttctgtgcaggaaaataaggaacagagccgtccctttgttatgggctacatgaatgaaaggaaagagcctttttacaaggtacttttctctggagaagtctcaggaagaattactttgtggcacatccctgatgttcctgtatccaagtttgatggttctcctagagagataccagtaactgccacctggactcttcaagataattttgataagcatgatactatgtcacaaagtattattgactatttctctgggcttaaagatggggcaggaactgctgtagtcacttcatcagagtatattccaagtcttgataaactaatatgtggctgtgaagatgggacaattatcattacccaggctttgaatgctgccaaagcaagacttctggaaggtggttctttagtaaaagattctccccctcataaagttcttaaaggccaccaccaaagtgtcacttcattactctatccacatggtctctcttcgaaattagaccaaagttggatgttgtctggggacctggactcatgtgtgatcttgtgggatatctttactgaagaaattttgcataaattctttttggaagctggtccagtaacaagtcttttgatgtcaccagagaagtttaaactaaggggtgagcagataatttgctgtgtgtgcggtgaccattccgtggctctccttcaccttgagggaaagagttgcctcctgcatgcccggaagcacctttttcctgtgaggatgataaaatggcacccggttgagaattttttaattgttggatgtgcagatgactcagtttatatctgggaaattgaaacaggcactttggaaagacatgagacaggagaaagagcacgaattattcttaattgttgtgatgattcacagcttgtgaagtctgtacttcccattgcctcagagacacttaagcacaaaagtatagaacagagatcctccagcccctaccagcttgggccattaccttgccctggtctgcaggtggagtcttcatgtaaggttactgatgccaaattttgcccaagaccttttaatgtcttgcctgtgaagacaaaatggagtaacgttggctttcatattcttctatttgatctggaaaaccttgttgaacttttgctaccaactccactcagtgatgttgactcttccagttcattctatggtggtgaggtcctgagaagagccaagagcacagtggagaagaagacactgacactgagaaaaagtaaaactgcctgtggtcctctttcagcagaggcactagccaagcctattactgaaagcctggcccaaggagataataccatcaaattctcagaagaaaatgatggcattaaaaggcagaagaaaatgaagatctccaaaaaaatgcagcctaagccatcaagaaaagtagatgccagtctcacaatagacacagcaaaattgtttctgtcttgccttttgccatggggagtggataaagatttagattatctttgcattaagcacctcaatattttaaagcttcagggtcctatttctttgggaatttctttgaatgaagataatttctcactgatgttgccaggttgggatttatgcaatagtggaatgataaaagactattcaggagtaaatttattttccaggaaagttttggacttgtcagataaatacacagccactcttccaaatcaggttggaattccaagaggattggaaaataattgtgattctttgcgagagtcagatactatagtttatttgttgagcagactatttttagttaataaattagttaacatgcctttagaattggcatgtagagttggcagttctttcagaatggaaagtatacataataagatgagaggtgctgggaatgacattttaaatatgtcaagcttctacagttgcttacgaaatggtaagaatgaatcccatgtacctgaggctgacctttcacttttgaagctaatttcctgttggagagaccagtctgtgcaggtaactgaagcaatacaagctgttctcttggcggaagttcaacaacacatgaagagtttgggaaagatacccgtcaatagtcaaccagtgtccatggcagagaatggtaactgtgagatgaagcagatgctgccaaagctggaatggacagaagaactagagttacagtgtgttagaaacactttgcctctgcaaactccagtcagcccggtcaagcatgacagcaactcaaactcggcaaacttccaagacgtggaggacatgcctgacagatgtgccttggaagagtctgagagtccaggtgagccaaggcatcattcatggatagcaaaggtctgcccctgcaaggtgtcttaaatggaatctcatcagtaggagctgaatttggacaaattaagaaatccaaaagatgccatttgtttattactgtataaaagcattgttgttattggtcaagttattaggctgtagtggatttgctaatactttagccaacatgtattaaagtgattttaatacatgctgattacaatgcaatacatactgattgaaaatattcatattcatctaattttagaaaaatattgcctagatcattctctattcctgtttcttactttttctgttaatatttccaacagggaatgccagtccacagacacaaatttaatactgctttaaattttctcctatccttttagtccctgaattatataataaacaatgttaaaaccaatgtagtacacaatacttacttacaaatttaatactgcttcaaggtatttaatctaaaattttaccaactttgatttgtctggttaggatattttgttttagtggatatgctttaattcggatcaattactgcagtaaatctcatccctaagcatgaaatgttgtcaacaaatacccagttccatttagttatcaattagcccaaataagagatacaaagtataacagtgaccaaccttgtactgttgagttaatttgaacttctaatgacattgaggctaatgtctttagctcaaggttgatcttgttggccatatagatgtgaactagggaaggggaatcaacttacagcatatcacaattgatccttattaagtataaactcttgtaggtcttttcccagaaagaagcttgactagcaggaattctaaaactgaaatatatcaaacagcataaataggaatagacataaagtgctcttctattaaagcctttggtgatctatttactatgatttatattgtacagttcctcgatttacagaaaatcatcaaaattattaatctacatatcttatgtatataaatattgcctaatccatagaaaaaaggatataaagtattaaatatgtgatatatagctatatctatctatctatgtatctaatagggaagtccaagtcacttcaattgaagaaacatatctctgagcataggagcagcctcaggtcctatggtgggatgcagtggacaggagagggggaaattagaaaagagaactatataattgaaaaagggatataaagcattaaatatatgatatatagctatatctatgtatgtatctaacagagaagttcaagtcacttcaattaaagaaacatttttgagcatgggaccagcctcaggtcttatgctgggatgcagtagacaggagatggggaaattagaaaagagaactgtgtaattgaaatgacgtgggctgcacccttaaggaacttataattaatgatgatctgaataaacataccaggataaagatgtcaaatgagtgtgactcccttaaagtagattaaagtgtgcattctttgtttcctaaaatatgattttactgcttgaaattacatttgagttgaagtttagaaactaacatagcattaatatgaataatcatggaaaattattatcctttgaaaactgattgataaatatattccccctcctttagaaacagtcaaaagccacttcaaacaagtttcaaaataaaggaaggtagcaagttaggcgatggattatattttcttgcttgttgtataccagttgtcaaggacattataaggactcccaaaagcattttgaaggatggcaatatcaaataagtgtatgtcctctcaaatgaggcatttttaattgttaaaatctatttggacgctcaggttatgatatgtttatgaaaaataagcttcattatttttatagctacatcctattattcccttttagaaacaagaataacaataggttttaatagttgccatacttagcatttatcagttctaatgaaaccaatattgaatctctgataaatattttctgatgttactagctatgggaaattagaactggcacaaccctgacattactaagtggaaatgttaggatttttcggcatcgcatgttagaatctctaaaatttaaacattcctgttaaatgactaaggtttgcttttatcaatatgaattctgaaggccaatatcataccattaactatgaaagcttttaattcctaaaaatagttttagagatattcaagcaatgctctcctaatatccatacgcaagtgtgtttatgacacaaattcactagtctgtttaaaaatgaattctttatattgactggtgttccacatatttcagtaatttctgttatgagaggacttgaaatagcaaattgccacacagttaactggatagaccacgtacgtggtgatcataaccacttggtactacacccagaaactcaaaattgtctttctcctgatgagatatgggtgtccttttgtacgtctaggcctaggtaaccagtggagtgattatattagcaaatgtgtttgtatccggagtcttcctgtcattgtaataaaaaatttatttaaaaa

SEQ ID NO: 244 - DNA, 2116 bp, Homo sapiens
cagagcagctcctcttccatctccagcagggtctcattctgttgcccaggctggagtgcagtggtgcgatctcggctcacagcaacctctctgcctccagcagaaatgacctccaccttcaacccccgagaatgtaaactgtccaagcaagaagggcaaaactatggcttcttcctgcgaattgagaaggacaccgagggccacctggtccgggtggttgagaagtgtagcccagcagagaaggctggccttcaagatggagacagagttcttaggatcaatggtgtctttgtggacaaagaagaacatatgcaggttgtggatctggtcagaaagagtgggaattcagtgactttactagttctggatggggattcctatgagaaagcagtgaaaacacgggtggacttgaaagagttgggtcaaagtcagaaggagcaaggtttgagtgataatatactttcccctgtgatgaatggaggtgtgcaaacttggacccagccccggctctgctatctcgtgaaggaaggaggcagctatggcttctctctgaaaactgtccaaggtaaaaagggggtgtacatgactgatattacacctcaaggtgtggctatgagagctggagttctggctgatgatcacttgattgaagtgaatggagagaatgtagaggatgccagccatgaggaagtggttgaaaaggtgaagaagtcaggaagccgtgtcatgttcctgctggtggacaaagaaactgacaagcgtcatgttgagcagaagatacaattcaaaagagaaacagccagtttgaaactgttaccccaccagccccgaattgtggagatgaagaaaggaagcaatggctatggtttctatctgagggcaggctcagaacagaaaggtcaaatcatcaaggacatagattctggaagtccagcagaggaggctggcttgaagaacaatgatctggtagttgctgtcaacggcgagtctgtggaaaccctggatcatgacagtgtggtagaaatgattagaaagggtggagatcagacttcactgttggtggtagacaaagagacggacaacatgtacagactggctcatttttctccatttctctactatcaaagtcaagaactgcccaatggctctgtcaaggaggctccagctcctactcccacttctctggaagtctcaagtccaccagatactacagaggaagtagatcataagcctaaactctgcaggctggctaaaggtgaaaatggctatggctttcacttaaatgcgattcggggtctgccaggctcattcatcaaagaggtacagaagggcggtcctgctgacttggctgggctagaggatgaggatgtcatcattgaagtgaatggggtgaatgtgctagatgaaccctatgagaaggtggtggatagaatccagagcagtgggaagaatgtcacacttctagtctgtggaaagaaggcctatgattatttccaagctaagaaaatccctattgtttcctccctggctgatccacttgacacccctccagattctaaagaaggaatagtggtggagtcaaaccatgactcgcacatggcaaaagaacgggcccacagtacagcctcacattcttcttccaattctgaagatacagagatgtgatgaaaacaagtaatagctttggctgtttatttgatagctgtttctgggtatttaataggaatcctttctcaaggaatgagttgtgacctgtttactgtctctttagaagaaaaactccactggaaaccattcaccatgtgtgattgtcttctgttatcatttgtcttacaggcggctattgcagacggctaatttatgcttaacttaggaagagataaggcaagagctagatttttttcatgtgatcttttccaagcttcaacttaacttaactacatttctctgtatgatgatgtctcttacttctacaggttccttgagcaccaaagatgattcataactctgtataggtgacagctgcttataaaagcatcttagcagataagcctattaaaattgtgcttttgtaacaatgttgtggttgctagaataaataccattaacaaatgcc

SEQ ID NO: 245 - DNA, 3027 bp, Homo sapiens
acacaaagggcgaagagaggggcgtggggaggctggaaagcatggttgccccgcctggcccggcgacgcccgctcagcagcctgctgaggagtggggacgaagagcagcctaaacttagggctcgggatatttcgatgccacccaaattgccgtcctaccccaacgaggcagggaaaggagcggagcgcgcgcgcgagctgagtgagtgcttacgtcgcagcgagatctgtgctgggataattagagaggagttgggctgagccgagtcctctttcagcagcagcagccggagccgccgccgcagcccggtggggcaaccctgactcggaccgctcgggagagccccaggagaggccagcgccgcgcagcagccgccccgctgcgcccacctccccggctgctcccggagggctcacaaaggcggtggccgcccgagtggccttctccatccaggcgttcgcgtcctcctccccaccttctctcccgaaggcgaaaatggcagggccaggcgagaacctgggacagcggtggccctagccctgcgatcctcacccctcctgctaggagaggctgcgggctgcccgcggacgatgtggccgcggctgctcccgagcgcatcttcggcccgggtccccgccgccacccctcttctctgctccttccatcccgcccagaggagttgatgccgctgtcgccgccgccgccgctgctgaagccgcggctgatggatgccagggagtgccgcattgcttagcgaccccgcctctgggtttgctgatgatctctctccgccctggagctcagcgctgaagagctaccttattattaatcagaatttccatcgccacccctggcaggcgtatccttcagcagggaccgcaggaacattcacagtgcaggggctgagatgtgcgtgggggttgtttttgttacatcttggaagagaagagaagaggacagtaccaagatcagaaacacccgtgctaggtggaattaggggtgatttgttaggaaagagaaaggacaagaagaggagtgcggagcccttcaggggttcacatctctttaaaggaaaggaaagagggagccaaagtagggtgttgtattttagggggcagaggaagaagtttacaccccccggcccccccagctttgctgggggaaagcaggagcaacagggcacttgattggacaccaagattattaatttcctgtaggggagaggaagcaggcagcaggaggtctgggggctggagtctggtggtggcaaggaccaggtttgctttgggacagtcaacaaggtcttctgagggaaagctcagagataggcagaacaatgactcatttgcaagccggtctctcccctgagaccctggagaaagctcgcctggagctcaatgaaaacccagacacgctgcaccaggacatccaggaggtgagggatatggtcatcaccaggccggacattggctttctgcgcacggatgatgccttcatcttacgcttcttgcgggctaggaagtttcatcactttgaggccttccgcctcctggcgcagtactttgagtaccggcagcagaacctggacatgttcaaaagctttaaggccaccgaccctggcatcaagcaggcactgaaggatggcttccctgggggcctggccaatctggaccactatggcaggaagattctagtcctttttgctgccaattgggatcagagcaggtacacactggtggatattttgcgtgccatcttactttctttagaagccatgattgaagatcctgagcttcaagtgaatgggtttgttttgatcatagactggagtaacttcactttcaagcaagcctctaaactcacaccaagtatgctgcgattagctattgaaggcctgcaggatagtttcccagcgcgatttggaggaattcattttgtcaatcaaccatggtatatccatgccctgtacaccgtgatccggcctttcctgaaggagaaaactcggaaaaggatatttttgcatggtaacaacctgaacagtctacaccaactaattcatcctgagatcctgccctctgagtttggaggaatgctgcctccttatgacatggggacatgggcaagaacactgctagaccatgaatatgacgatgacagcgagtacaatgtagactcctacagcatgcctgtgaaggaagtagagaaggaactctccccaaagtccatgaagagatctcaatcagtagtggatcctacagtactaaaacgcatggataaaaatgaggaagaaaacatgcaaccattgctttctctggactaataacttctctacatccccttcatggattagaaatggaaagtattggttttcagcaacagggacaacactgtagaggaattaccagctggaaaccgacttattcatgttaatgtagcataatatataacaaggcatcaggctttccttggcctgaaccatgggggccctgggctggatttttaaaatgtcaataatttattctgtaagtgccaagttgtttgtaaatataatgtaatcttcatgtcaagtttgtaaatttcagtagtaactcagtttggaaaaaggttggctcaaaagtccatgccagtgttatgaactataacaaaaagcagaaaagacacagtcaaagctaattaaatgtagccctctttcctatgaagccatatttcagctctcatagtgattgtttcattgtttttctctgaaactctgtcagtattcaaacatactcttaacgggcacacacaactaagtgattccaggaaattttatgattaatgtatttcctgtctagtgattttcatttcagagaaatgtgtcttagtaactatcattggccttgcattttggaggcaaggaatggcagatgagctggtaaactgaacacttgaactcttctatgttgtttaattcttggaatcttgtgaaaagatgtgtttcctcaattaagacgtagaaatgtaaaaaagagtggattctttttaaa

SEQ ID NO: 246 - DNA, 2889 bp, Homo sapiens
aggcccgggggtcgccggggccacgacttctcggagaccgtcctgcgctctctggagacgcgctgtccgcgcccagggtggtgccatgtggggcgctcgccgctcgtccgtctcctcatcctggaacgccgcttcgctcctgcagctgctgctggctgcgctgctggcggcgggggcgagggccagcggcgagtactgccacggctggctggacgcgcagggcgtctggcgcatcggcttccagtgtcccgagcgcttcgacggcggcgacgccaccatctgctgcggcagctgcgcgttgcgctactgctgctccagcgccgaggcgcgcctggaccagggcggctgcgacaatgaccgccagcagggcgctggcgagcctggccgggcggacaaagacggccccgacggctcggcagtgcccatctacgtgccgttcctcattgttggctccgtgtttgtcgcctttatcatcttggggtccctggtggcagcctgttgctgcagatgtctccggcctaagcaggatccccagcagagccgagccccagggggtaaccgcttgatggagaccatccccatgatccccagtgccagcacctcccgggggtcgtcctcacgccagtccagcacagctgccagttccagctccagcgccaactcaggggcccgggcgcccccaacaaggtcacagaccaactgttgcttgccggaagggaccatgaacaacgtgtatgtcaacatgcccacgaatttctctgtgctgaactgtcagcaggccacccagattgtgccacatcaagggcagtatctgcatcccccatacgtggggtacacggtgcagcacgactctgtgcccatgacagctgtgccacctttcatggacggcctgcagcctggctacaggcagattcagtcccccttccctcacaccaacagtgaacagaagatgtacccagcggtgactgtataaccgagagtcactggtgggttcctttactgaagggagacgaaggcaggggtggattctcgaggtggaagtccgcacatgtcggtggtatttatggcacgattcctttggatggcttcatttgcccccagactgtatgaaaacatctccgaattagcatttctggatatgtttcatccagggtatcattgatttatgatggaaaaccggcctcagctggagatgactgtgatgttgctgatgggtgtataacaaatgcttgagtccgaagtgcccttgagatatggttgacgaaagaattttataaactgataaattaaggatttttattatgttgttattattatttcttttttgttgttgactgcacaggatcaaaatgcctgttatctcccttttacctgggactttttttttttttttttttttttttaatcagacagggtcttgctctgttgcccaggctggagtgcagtggtgcgatctcggctcactgcaacttcagcctcctggattcaggcaacactcctgcctcagcctcccacgtggctgggattacaggtgcctgcccccatggctaattttttgtattttttgtagagatggggtttcaccatgttggctgggctggtctcactctcctgacctcaagcaatctgcctgtctcagcctcccaaagtgctgggattacaggcgtgagccaccgcccccagcctgagcctttttttttttctaatgcatccaaggttaaggggaagacgcaaataacaggactattctaaaaggaaacctgtttgaactctgtgagatcagtcatcagtctcagtattccacaggcacaccttaatttcattgtaaaaagatatatatattttgtctatttttgtgcttttgggggcctattttgtgcttttttaccttatgtagagatcttattacaaagtgattttctacattaaaaagagactgaaataaattgtatagttacttaactaatgaagacatttcagaactctgggatgattttaatcttgaagtagtaggtggtatagtcataaaaccattcatccccttcttgattgtatcttaattttctggctttaaggtgacatctgagaggtaatgcattcttttttatattgaaatcataaactatcacccgctgcttctctgagttacttttaattttgccttgtggttatggtttggcgtttccttctgtttggttttcagagccccatgtctatatagtcctgagtgcaagtaattactatacttgtaaatgaagatcagtatttctgcctagatctgataaaaaaattttcttgtcttagttataaaaattcaaagaaatgtgttacaaagatacttagtatagctcctcagccataacctgagacttgggatgaaatttaaaccagatacgatttactttgcagatcataaggctttttatactcttgttatcaaaatggcttatttttcaggcactaaggattgttaagagaaaagcttttcaacgaaggattgcctttcttctcccacactgttcttgatttcctctctctttcaggcctcaacaggcactgtattcattgccaatgttccaaattatcaaattcaagtgaatttatttgtgtgttctttacttatataaaaaaagataactttaaggatgtgcaagtacatttccaactgctagcacaaccagtattttgtaattaaacaaatcgctgtatggtatggtcttctacacatttatgtctatagatatctatcgatcatctttctattctgtttcatgactgaataatgtaaaaccagtgttggcaattggtatcatcaatgatactcattttttaataaccaaaggcaggggaaaatcattttacttattaataaatattttatgatgtgaa

SEQ ID NO: 247 - DNA, 3087 bp, Homo sapiens
cacaattccctgagatctcccaggtggcagctgcctccccaagacagccaagaccttctcccccaggctcactcaccatgaccaagctgagcgcccaagtcaaaggctctctcaacatcaccaccccggggctgcagatatggaggatcgaggccatgcagatggtgcctgttccttccagcacctttggaagcttcttcgatggtgactgctacatcatcctggctatccacaagacagccagcagcctgtcctatgacatccactactggattggccaggactcatccctggatgagcagggggcagctgccatctacaccacacagatggatgacttcctgaagggccgggctgtgcagcaccgcgaggtccagggcaacgagagcgaggccttccgaggctacttcaagcaaggccttgtgatccggaaagggggcgtggcttctggcatgaagcacgtggagaccaactcctatgacgtccagaggctgctgcatgtcaagggcaagaggaacgtggtagctggagaggtagagatgtcctggaagagtttcaaccgaggggatgttttcctcctggaccttgggaagcttatcatccagtggaatggaccggaaagcacccgtatggagagactcaggggcatgactctggccaaggagatccgagaccaggagcggggagggcgcacctatgtaggcgtggtggacggagagaatgaattggcatccccgaagctgatggaggtgatgaaccacgtgctgggcaagcgcagggagctgaaggcggccgtgcccgacacggtggtggagccggcactcaaggctgcactcaaactgtaccatgtgtctgactccgaggggaatctggtggtgagggaagtcgccacacggccactgacacaggacctgctcagtcacgaggactgttacatcctggaccaggggggcctgaagatctacgtgtggaaagggaagaaagccaatgagcaggagaagaagggagccatgagccatgcgctgaacttcatcaaagccaagcagtacccaccaagcacacaggtggaggtgcagaatgatggggctgagtcggccgtctttcagcagctcttccagaagtggacagcgtccaaccggacctcaggcctaggcaaaacccacactgtgggctccgtgggtgagggccaggcgggggcagtgagggagccaggatccaggagctgggccaggagagccacttggtccaccacccaccctccttccctgacgtgcatcttcaacgaagacttttacgctggctctgggcttgtcctagcagatggggacgtggacaaactctagttgtcacaaaaagggagctgagagggctgggcatggtggcacatgcctgtaatcccagcactttgggaggctgaggcgggtggatcacctgaggtcaggagtttgagattagcctaacatggtgaaaccccgtctctactgaaaaaaagaactaataaattagccaagcatggtccaaagtggaacaggtgaagttcgatgccacatccatgcatgtcaagcctcaggtggctgcccagcagaagatggtagatgatgggagtggggaagtgcaggtgtggcgcattgagaacctagagctggtacctgtggattccaagtggctaggccacttctatgggggcgactgctacctgctgctctacacctacctcatcggcgagaagcagcattacctgctctacgtttggcagggcagccaggccagccaagatgaaattacagcatcagcttatcaagccgtcatcctggaccagaagtacaatggtgaaccagtccagatccgggtcccaatgggcaaggagccacctcatcttatgtccatcttcaagggacgcatggtggtctaccagggaggcacctcccgaactaacaacttggagaccgggccctccacacggctgttccaggtccagggaactggcgccaacaacaccaaggcctttgaggtcccagcgcgggccaatttcctcaattccaatgatgtctttgtcctcaagacccagtcttgctgctatctatggtgtgggaagggttgtagcggggacgagcgggagatggccaagatggttgctgacaccatctcccggacggagaagcaagtggtggtggaagggcaggagccagccaacttctggatggccctgggtgggaaggccccctatgccaacaccaagagactacaggaagaaaacctggtcatcaccccccggctctttgagtgttccaacaagactgggcgcttcctggccacagagatccctgacttcaatcaggatgacttggaagaggatgatgtgttcctactagatgtctgggaccaggtcttcttctggattgggaaacatgccaacgaggaggagaagaaggccgcagcaaccactgcacaggaatacctcaagacccatcccagcgggcgtgaccctgagacccccatcattgtggtgaagcagggacacgagccccccaccttcacaggctggttcctggcttgggatcccttcaagtggagtaacaccaaatcctatgaggacctgaaggcggagcttggcaactctagggactggagccagatcactgctgaggtcacaagccccaaagtggacgtgttcaatgctaacagcaacctcagttctgggcctctgcccatcttccccctggagcagctagtgaacaagcctgtagaggagctccccgagggtgtggaccccagcaggaaggaggaacacctgtccattgaagatttcactcaggcctttgggatgactccagctgccttctctgctctgcctcgatggaagcaacaaaacctcaagaaagaaaaaggactattttgagaagagtagctgtggttgtaaagcagtaccctaccctgattgtagggtctcattttctcaccgatattagtcctacaccaattgaagtgaaattttgcagatgtgcctatgagcacaaacttctgtggcaaatgccagttttgtttaataatgtacctattccttcagaaagatgataccccaaaagg

SEQ ID NO: 248 - DNA, 1925 bp, Homo sapiens
ctagcacggtcccactctgcagactcagtgccttattcagtcttctctctcgctctctccgctgctgtagccggaccctttgccttcgccactgctcagcgtctgcacatccctacaatggctaaaacagcaatgggcctacaaggaaaaaatgaaggagctgtccatgctgtcactgatctgctcttgcttttacccggaacctcgcaacatcaacatctatacttacgatgatatggaagtgaagcaaatcaacaaacgtgcctctggccaggcttttgagctgatcttgaagccaccatctcctatctcagaagccccacgaactttagcttctccaaagaagaaagacctgtccctggaggagatccagaagaaactggaggctgcagaggaaagaagaaagtctcaggaggcccaggtgctgaaacaattggcagagaagagggaacacgagcgagaagtccttcagaaggctttggaggagaacaacaacttcagcaagatggcggaggaaaagctgatcctgaaaatggaacaaattaaggaaaaccgtgaggctaatctagctgctattattgaacgtctgcaggaaaaggagaggcatgctgcggaggtgcgcaggaacaaggaactccaggttgaactgtctggctgaagcaagggagggtctggcacgccccaccaatagtaaatccccctgcctatattataatggatcatgcgatatcaggatggggaatgtatgacatggtttaaaaagaactcattataaaaaaaaaaaaacaaaaaaaatcaaaaattaaaaaaaatcaatgcggtctctttgcagaatgttttgcttgatgtttaaaaaataccttggatcttattttgtaaatacttacatttttgttaaaaaatacaagtattgcattatgcaagttatttcataatcttacatgtcctgtaacaggcttttgatgttgtgtctttccactcaaatgaatttgctaggtctgttctttttgaagctccccatgtctaactccattccaaaagaaaaatgaggtcagtagacagtctatggtgctagaaacccaccattgcctaatgacctagaaggctttgttgtctctgagcttgactaagaccatacctagatcacaggtattatgactccacatgaaccttcacatttgttcgctcataatctacttactgcctaaaaactacaaaaccaggctaagaaataccaccagtcatagcatttacttctgcttctcctggattatgtgctacaaatgtgctttggctttagaaagggatggatgagaagacagacctgagaccaatctgggtagaagcaaaaagttgaaccttttaaagtgctgaacacaaatccaaattcgaatggttcaagcagccgtgaaatcgctcttcataaagtgggcttaattctctagtttaagttcttttgatggaatgaattaattaatgtgtcaggtggcttatttgtggatgccatgattgatgatgttcattttaagctcttacctatagtacaagtacatgatgctactgaatatttttccacttggaaactgtgagctggttgttgcattaaaacacacatacaaacaaaatcaaaaacactgcggactttcactcaagctggtctttcttccccagtgtaaggcaatcctgcctactaacaacaccaacaacaaaacactccatctgtgaagctgacgcagttaagggggctaggcagggcatttgtgccaactaagaatcaccagatacccaccataagtacctatcgcagttttgaagtcgtttctccccaactcccaactcctgaaggttgctgcctgcatatttactcttcattagtgctattttcctgtatgtcattgtgagcaagctgtgattaataaagaatt

SEQ ID NO: 249 - DNA, 474 bp, Homo sapiens
aggcacagacaccaaggacagagacgctggctaggccgccctccccactgttaccaacatgaagctgctcgcagcaactgtgctactcctcaccatctgcagccttgaaggagctttggttcggagacaggcaaaggagccatgtgtggagagcctggtttctcagtacttccagaccgtgactgactatggcaaggacctgatggagaaggtcaagagcccagagcttcaggccgaggccaagtcttactttgaaaagtcaaaggagcagctgacacccctgatcaagaaggctggaacggaactggttaacttcttgagctatttcgtggaacttggaacacagcctgccacccagtgaagtgtccagaccattgtcttccaaccccagctggcctctagaacacccactggccagtcctagagctcctgtccctacccactctttgctacaataaatgctgaatgaatcca

SEQ ID NO: 250 - DNA, 1357 bp, Homo sapiens
gaagcagggcctggaactgcaggatacactcccctcctgctacctaggcaggcgtgagggtgtgacggccgcgcattcgccagacgagagcgatggctgagaacgccgcaccaggtctgatctcagagctgaagctggctgtgccctggggccacatcgcagccaaagcctggggctccctgcagggccctccagttctctgcctgcacggctggctggacaatgccagctccttcgacagactcatccctcttctcccgcaagacttttattacgttgccatggatttcggaggtcatgggctctcgtcccattacagcccaggtgtcccatattacctccagacttttgtgagtgagatccgaagagttgtggcagccttgaaatggaatcgattctccattctgggccacagcttcggtggcgtcgtgggcggaatgtttttctgtaccttccccgagatggtggataaacttatcttgctggacacgccgctctttctcctggaatcagatgaaatggagaacttgctgacctacaagcggagagccatagagcacgtgctgcaggtagaggcctcccaggagccctcgcacgtgttcagcctgaagcagctgctgcagaggcagagaacagcattgacttcgtcagcagggagctgtgtgcgcattccatcaggaagctgcaggcccatgtcctgttgatcaaagcagtccacggatattttgatccaagagagaattactctgacaaggagtccctgtcgttcatgatagacacaatgaaatccaccctcaaagaggactacttcggatacaatcacagcaaccctggcctcggccctgccctgtccctgccatgcaacttcacaactcagctggcctagacccctgggaggcctccaagtccctaagcggttccagtttgtggaagtcccaggcaatcactgtgtccacatgagcgaaccccagcacgtggccagtatcatcagctccttcttacagtgcacacacacgctcccagcccagctgtagctctgggcctggaactatgaagacctagtgctcccagactcaacactgggactctgagttcctgagccccacaacaaggccagggatggtggggacaggcctcactagtcttgaggcccagcctaggatggtagtcaggggaaggagcgagattccaacttcaacatctgtgacctcaagggggagacagagtctgggttccagggctgctgtctcctggctaataatctccagccagctggaggaaggaagggcgggctgggcccacctagcctttccctgctgcccaactggatggaaaataaaaggttcttgtattctca

SEQ ID NO: 251 - DNA, 4293 bp, Homo sapiens
gcaggcttcttcggtgcccgagagggagcgggtgcccaagggggtggtccctgtggcaggtcccggggtgggggcgcggcgctccgggaagagccttccgcaggtccccgccccgtcacgtgggcgccggccccggccgctgcggtcggtccgctggttggtcgggcgcttggtccggcagttggtcggtgggccagtggcccgtcgctcgcttctgggctctcatgtttgaaggtgggagggacacgggagcggcccgcacacctgagccgcccggagaggagcctcggccccgtacccagtaagaagaggaggaggccaggcaggcaaaaggagtcatggcttctgatgctagtcatgcgctggaagctgccctggagcaaatggacgggatcattgcaggcactaaaacaggtgcagatcttagtgatggtacttgtgagcctggactggcttccccggcctcctacatgaaccccttcccggtgctccatctcatcgaggacttgaggctggccttggagatgctggagcttcctcaggagagagcagccctcctgagccagatccctggcccaacagctgcctacataaaggaatggtttgaagagagcttgtcccaggtaaaccaccacagtgctgctagtaatgaaacctaccaggaacgcttggcacgtctagaaggggataaggagtccctcatattgcaggtgagtgtcctcacagaccaagtagaagcccagggagaaaagattcgagacctggaagtgtgtctggaaggacaccaggtgaaactcaatgctgctgaagagatgcttcaacaggagctgctaagccgcacatctcttgagacccagaagctcgatctgatgactgaagtgtctgagctgaagctcaagctggttggcatggagaaggagcagagagagcaggaggagaagcagagaaaagcagaggagttactgcaagagctcaggcacctcaaaatcaaagtggaagagttggaaaatgaaaggaatcagtatgaatggaagctaaaggccactaaggctgaagtcgcccagctgcaagaacaggtggccctgaaagatgcagaaattgagcgtctgcacagccagctctcccggacagcagctctccacagtgagagtcacacagagagagaccaagaaattcaacgtctgaaaatggggatggaaactttgctgcttgccaatgaagataaggaccgtcggatagaggagcttacggggctgttaaaccagtaccggaaggtaaaggagattgtgatggtcactcaagggccttcggagagaactctctcaatcaatgaagaagaaccggagggaggtttcagcaagtggaacgctacaaataaggaccctgaagaattatttaaacaagagatgcctccaagatgtagctctcctacagtggggccacctccattgccacagaaatcactggaaaccagggctcagaaaaagctctcttgtagtctagaagacttgagaagtgaatctgtggataagtgtatggatgggaaccagcccttcccggtgttagaacccaaggacagccctttcttggcggagcacaaatatcccactttacctgggaagctttcaggagccacgcccaatggagaggctgccaaatctcctcccaccatctgccagcctgacgccacggggagcagcctgctgaggctgagagacacagaaagtggctgggacgacactgctgtggtcaatgacctctcatccacatcatcgggcactgaatcaggtcctcagtctcctctgacaccagatggtaaacggaatcccaaaggcattaagaagttctggggaaaaatccgaagaactcagtcaggaaatttctacactgacacgctggggatggcagagtttcgacgaggtgggctccgggcaaccgcagggccaagactctctaggaccagggactccaagggacagaaaagtgacgccaatgccccctttgcccagtggagcacagagcgtgtgtgtgcatggctggaggactttggcctggctcagtatgtgatctttgccaggcagtgggtatcttctggccacaccttattgacagccacccctcaggacatggaaaaggagctaggaattaagcacccactccacaggaagaagcttgttttagcagtgaaagccatcaacaccaaacaggaggagaagtctgcactgctagaccacatttgggtgacaaggtggcttgatgatattggcttaccccagtacaaagaccagtttcatgaatctagagttgacagacgaatgctgcaatacctaactgtgaacgatttactcttcttaaaagtcaccagccaactacatcatctcagcatcaaatgtgccattcacgtgctgcatgtcaacaagttcaacccccactgcctgcaccggcggccagctgatgagagggttacttaccggggctgactccacagaggaccatggtgggacctattaagcctaacttcctcactctccttctccctctgacagagtaacctttctccttcagaagttgtacagtggtccaaccacagggtgatggagtggttacgatctgtggacctggcagagtatgcacccaatcttcgagggagtggagtccatggaggcctcattgtgagtggctctctggcctagcccacctgccttggtgcaaatgggatattcagaaacttatttattaaggacaaggcacaaaagctaacgaaaaaaaataggtacttcatctggaggtcttgcataatttgatgtctcaaagtattttgataacttgtccttgagaattaatatacctcatggaagcaagatgccttctggcagcacctccttggcatgagacttgaggattctaggtcgatgggttgcatggagaccaacgcttacaaggcgagggaacagcagggctgaggaagggacggggaagccgtaaaaatgcagcttcccacttgctgcaataggatccctatcactactcagatctgtcagtggcaaagccagaggggaaatgaggaagtgtggtggcttggatgtcatccagagaagatcctgagagacagcctcaccaaagaggtcccagttctctgctggtctgtgaaaacaaggtggtcagtcagcacatgtgctagtatgtgctcagagccaggccctgtgccagccagtgagtggagtgggactcagaacaagtgactgagctcctgtccctcctctggaggcacccccagccccaacaggccagtctctcagcatcctccccctcgagccatttgtatttgctcctggccaggcttgtctctggttccttcttagatcctggagccacgcttcactggggacaccctggctatgcttctcaacatccccccacaaaagacgctcctcaggcgccacctgaccaccaagttcaatgccttgattggtccggaggctgaacaggagaagcgagagaaaatggcctcaccagcttacacaccactgaccaccacagccaaagtccggccaaggaaactaggattttcacacttcggaaacataagaaaaaagaagttcgatgaatcgacggactacatttgcccaatggagcccagtgacggtgtcagtgatagtcacagggtctacagtggctaccggggcctcagcccccttgatgcccctgaactggatgggctggaccaggtgggacagattagctgatgcccttgtcacctgccctctgtgcaccctgagagctcacagtaacactgtgtgtgtcaccatataactgcacctcacccccgcacgtgtgcatgactcgcagagaatattccagcaattgtgtacccctgggccagtctctttgaaccctgagggtggccaggatctggagctgcatctctaaggggccaggctttggggaccattgccaaaggtggactcaggaggaaagacacttaaagacacttttacatgtctagtaattcttgatgttcatcttcagcaccagtggaaacacatgaacttcgatgcaggtccagagaccatggacactcccacgaggctcagctctcaggcaccccctacacttcagttgagggaaaagctcaagtgccttaggcccgtggaccacagtcttggctgagatcaaagggatgagcaacagggacttctgccacagtgacaatggaattgtgttgtgccttacttcagaggtggtctcttctttcttgtaataaaagcaatatttatgcggaaagcaagcagc

SEQ ID NO: 252 - DNA, 1977 bp, Homo sapiens
gcagagctctgtgctccctgcagtcaggactctgggaccgcagggggctcccggaccctgactctgcagccgaaccggcacggtttcgtggggacccaggcttgcaaagtgacggtcattttctctttctttctccctcttgagtccttctgagatgatggctctgggcgcagcgggagctacccgggtctttgtcgcgatggtagcggcggctctcggcggccaccctctgctgggagtgagcgccaccttgaactcggttctcaattccaacgctatcaagaacctgcccccaccgctgggcggcgctgcggggcacccaggctctgcagtcagcgccgcgccgggaatcctgtacccgggcgggaataagtaccagaccattgacaactaccagccgtacccgtgcgcagaggacgaggagtgcggcactgatgagtactgcgctagtcccacccgcggaggggacgcaggcgtgcaaatctgtctcgcctgcaggaagcgccgaaaacgctgcatgcgtcacgctatgtgctgccccgggaattactgcaaaaatggaatatgtgtgtcttctgatcaaaatcatttccgaggagaaattgaggaaaccatcactgaaagctttggtaatgatcatagcaccttggatgggtattccagaagaaccaccttgtcttcaaaaatgtatcacaccaaaggacaagaaggttctgtttgtctccggtcatcagactgtgcctcaggattgtgttgtgctagacacttctggtccaagatctgtaaacctgtcctgaaagaaggtcaagtgtgtaccaagcataggagaaaaggctctcatggactagaaatattccagcgttgttactgtggagaaggtctgtcttgccggatacagaaagatcaccatcaagccagtaattcttctaggcttcacacttgtcagagacactaaaccagctatccaaatgcagtgaactccttttatataatagatgctatgaaaaccttttatgaccttcatcaactcaatcctaaggatatacaagttctgtggtttcagttaagcattccaataacaccttccaaaaacctggagtgtaagagctttgtttctttatggaactcccctgtgattgcagtaaattactgtattgtaaattctcagtgtggcacttacctgtaaatgcaatgaaacttttaattatttttctaaaggtgctgcactgcctatttttcctcttgttatgtaaatttttgtacacattgattgttatcttgactgacaaatattctatattgaactgaagtaaatcatttcagcttatagttcttaaaagcataaccctttaccccatttaattctagagtctagaacgcaaggatctcttggaatgacaaatgataggtacctaaaatgtaacatgaaaatactagcttattttctgaaatgtactatcttaatgcttaaattatatttccctttaggctgtgatagtttttgaaataaaatttaacatttaatatcatgaaatgttataagtagacatacattttgggattgtgatcttagaggtttgtgtgtgtgtacgtatgtgtgtgttctacaagaacggaagtgtgatatgtttaaagatgatcagagaaaagacagtgtctaaatataagacaatattgatcagctctagaataactttaaagaaagacgtgttctgcattgataaactcaaatgatcatggcagaatgagagtgaatcttacattactactttcaaaaatagtttccaataaattaataatacctacctaaatggtcaatatttttcggacaaggaagaaaatcatccacaaaaataatactccaaagtacttggtgattggcaggaacaggatgtgtgcccataaatacagttaacaaatacatgcagattttgtaccaaacaaaataatttgcagtatcttgagtactactgcatg

SEQ ID NO: 253 - DNA, 4247 bp, Homo sapiens
agtcttcggggaggagctgcattacacacaggcttcggaggcttccgtggagaagcttggaggtaatggctgtcgtaaatgctagttattttcagagagttctcgaagatttggaataaagccgagccccagaaagacaggtcaaccacagaagtgctgagccaggtaaagaccctgctggacaagcagctggagtgagaatcaagacagctggaccacaggaccagacccagcagtatccatgtaacatttcaagaggctgcagctgacaagaagcttcaaggtgacatttcaccaggctgcagctgacaagaagcttcaagcataggttaatatcagagaagcacatgacctgggcaatctgcatgtgatgccaaccaagccttggaaagacagtgcaaccacagaagtgccgagctgggtaaaggccctgctggacaagcagttggagtgagaatcaagacagccggaccacaggaccagacccaccaggatccacatgacagtggtatcttccggtatcatcctattcaaacaacgtgttcaagcatccttggaaaattgaggtggagaacaggccacacaagctgtaaaccctttgtagtcataagacgaaagaggatttgttaagagtattgttttgggtagaacttgcattagcagtgacaaagatagccacctcaacctttggtaataacccttggcacacaaatataaaccataatggagtctgagtatgtcctatgcaactggaaagaccagttgtggccagcaaaagttttgtccagatctgaaacttcatcaaacagtaagaggaaaaaggcattttctctagaagttcaaatactctcactagatgaaaaaattaaattggacagcacagaaacaaagatcctaaataaatctcaaattgaagccattgctgcctcattaggactacagtcagaggacagtgctccacctacagaggaaactgcctatggaagatcactaaaagtggcactgggtattctgaatgagagaacaaatttgagtcaagcaagcacttcagatgaagaggagatcactatgctgtctcaaaatgtaccacaaaaacagtccgattcaccccctcataaaaaataccggaaggatgaaggtgacttaccagggtgtcttgaggaaagggaaaactcagcatgcttgttagcatcttcagagagtgatgattccctgtatgatgataaatcacaagcacccacaatggtcgatactattccaagtgaagtggaaacaaagtcattacaaaactctagctggtgcgagactttcccttcactttcggaagataatgatgaaaaagagaacaagaataagattgatatctcagcagttatgtctgtgcattctgcagtcaaagaggaaagtgcatgtgttaaagatgaaaagtttgctccacctttgtcacctttgtcatcagatatgctcattatgcccaaagctttgaaagaagagagcgaggatacctgcctagagaccctggctgttccctctgaatgctctgctttctcagagaatattgaggatcctggagagggtccctcaaatccatgcttagataccagccagaatcaaccttccatggaatcagagatgggggctgcagcatgccctgggagttgttcaagggaatgcgaggtttcatttagtgcctctaaccctgtctgggattattcacatcttatgagtagtgaaagaaattttcagagactggattttgaagaacttgaggaagaaggtcaagcctctgacaagtcattgcttccaagtcgcattaatctttctctattagatgatgatgaggaagacgaagaacttccacgcttcattttacattatgagacacatccgtttgaaacaggaatgatagtctggtttaaatatcagaaatatccattttggccagcagtgataaaaagtatcagacgaaaagagaggaaagcaagtgtgctttttgttgaggcaaacatgaattctgaaaagaagggcattagagtaaattttagaagattaaagaaatttgattgtaaagagaaacaaatgctagtggacaaagccagggaggattatagtgagagtattgactggtgcatctcactaatttgtgactacagagttagaataggttgtggttctttcacgggctctttgcttgagtattatgctgctgatattagttacccagttaggaaagaaacaaaacaggatactttcaggaacaaatttccaaagctgcataatgaagatgccagggaaccgatggctgtaacttcccagaccaagaaaatgtccttccaaaaaattctccctgaccggatgaaggctgctcgggaccgagccaacaagaacctggtggacttcattgtgaatgcaaagggaacagagaaccatcttctggccattgtaaatggcacaaaaggatccagatggctgaaatcatttttgaatgcaaataggttcacaccctgtattgaaacatactttgaggatgaagatcagttggatgaagtggtgaaatatttacaagaagtctgcaatcaaatagatcaaataatgccaacttggataaaagatgataaaattaaatttatcctagaagttcttctgccagaagcaattatttgttcaatttctgctgttgatgggttagattacgaggcagctgaagcaaagtatctaaaaggaccatgtctaggctacagggaaagagaattatttgatgcaaaaataatatatgaaaagagacgaaaagcaccaacaaatgaagctcactaaatgtgctgaaagttgaaaccatgacagggagctctcatagatactagttgaaaaaagtctctgaacaattctctctaatacatattttctgcaaatgggagcatggataatgtgttcacttttttttgagatctctaggatctgtggttataattacatctttatttccttttcttgcgcttcttcaaagttaattttgtcaacatatttcagcagttctactttcccgtacattttttagaaagcataattcctaaatgattttgaagggaaagtactattttgttttatgacacttttgagtctatgctgtattgttaaatatattgtgcacaattattttaatgttaaaattgcactggtgttagatattaacgaagatgattggaaaaaagtctgaaagatacatcatttctatattccttgcttaatttttataaaatattgggttttcccttaagatagttgaagtatttttcttgccatgcctatttatttttgcaaaaaaattatctgctatatagaaccaaagatagattcgctttgctatatattataactatacttgcttttgcaataaaacaacttgtaattcaaaaatgaagattatctgcatatagtatttatgtgtgtgaataacatcttggcatgcagaaaataattttggctgctttgaacaggattgttcattctacacttccctgaaattccatttttgggagtgtctatccttcaatggctgaatagttccttaaatcagacaagctcctggctatcttcataaccagcagtgagtagatcttcttaatatagctgtctgaccacatgtggaaggcagctagacttattgtatttacagcctggccactctagacatatgaatccaggctgactgcttaagtgcccatctcgtttgatataaactgtagaaaaggcaagcactttgttctgagtcttttatctccaaatacatagttgtctcaaaccaagcaagctttatcaaaatggcttatttgcagaatagttccaatgatataaatgccaactggcaagtcattccaaactgcttgaaggagtagatgaaccagaatctgagaatttggaaataggtcacagaaaaagcctccatttggctaaatatgacaattatctgagtatggttaaatacatacaattaaatgtctgaagccaatgagttgtttattctaacttgaaatatatttttgtgagaataaatgttagaaaagttagtttattttggaaacctgccgtgaaaggaaattctaaaggcttaacatgaaactgtctgcatttctacctgttagacaatggttgctcttgggctcttgttatacagtcatatggctacacgtttatgtaaagtttgcaaaagtttggtgttttgatttataataaaactgttatattattca

SEQ ID NO: 254 - DNA, 6238 bp, Homo sapiens
tagtctctttggaaacttctgcaggggaaaagagctaggaaagagctgcaaagcagtgtgggctttttcccttttttgctccttttcattacccctcctccgttttcacccttctccggacttcgcgtagaacctgcgaatttcgaagaggaggtggcaaagtgggagaaaagaggtgttagggtttggggtttttttgtttttgtttttgttttttaatttcttgatttcaacattttctcccaccctctcggctgcagccaacgcctcttacctgttctgcggcgccgcgcaccgctggcagctgagggttagaaagcggggtgtattttagattttaagcaaaaattttaaagataaatccatttttctctcccacccccaacgccatctccactgcatccgatctcattatttcggtggttgcttgggggtgaacaattttgtggctttttttcccctataattctgacccgctcaggcttgagggtttctccggcctccgctcactgcgtgcacctggcgctgccctgcttcccccaacctgttgcaaggctttaattcttgcaactgggacctgctcgcaggcaccccagccctccacctctctctacatttttgcaagtgtctgggggagggcacctgctctacctgccagaaattttaaaacaaaaacaaaaacaaaaaaatctccgggggccctcttggcccctttatccctgcactctcgctctcctgccccaccccgaggtaaagggggcgactaagagaagatggtgttgctcaccgcggtcctcctgctgctggccgcctatgcggggccggcccagagcctgggctccttcgtgcactgcgagccctgcgacgagaaagccctctccatgtgcccccccagccccctgggctgcgagctggtcaaggagccgggctgcggctgctgcatgacctgcgccctggccgaggggcagtcgtgcggcgtctacaccgagcgctgcgcccaggggctgcgctgcctcccccggcaggacgaggagaagccgctgcacgccctgctgcacggccgcggggtttgcctcaacgaaaagagctaccgcgagcaagtcaagatcgagagagactcccgtgagcacgaggagcccaccacctctgagatggccgaggagacctactcccccaagatcttccggcccaaacacacccgcatctccgagctgaaggctgaagcagtgaagaaggaccgcagaaagaagctgacccagtccaagtttgtcgggggagccgagaacactgcccacccccggatcatctctgcacctgagatgagacaggagtctgagcagggcccctgccgcagacacatggaggcttccctgcaggagctcaaagccagcccacgcatggtgccccgtgctgtgtacctgcccaattgtgaccgcaaaggattctacaagagaaagcagtgcaaaccttcccgtggccgcaaacgtggcatctgctggtgcgtggacaagtacgggatgaagctgccaggcatggagtacgttgacggggactttcagtgccacaccttcgacagcagcaacgttgagtgatgcgtccccccccaacctttccctcaccccctcccacccccagccccgactccagccagcgcctccctccaccccaggacgccactcatttcatctcatttaagggaaaaatatatatctatctatttgaggaaactgaggacctcggaatctctagcaagggctcaacttcgaaaatggcaacaacagagatgcaaaaagctaaaaagacaccccccccctttaaatggttttctttttgaggcaagttggatgaacagagaagggaagagaggaagaacgagaggaagagaagggaaggaagtgtttgtgtagaagagagagaaagacgaatagagttaggaaaaggaagacaagcaggtgggcaggaaggacatgcaccgagaccaggcaggggcccaactttcacgtccagccctggcctggggtcgggagaggtgggcgctagaagatgcagcccaggatgtggcaatcaatgacactattggggtttcccaggatggattggtcagggggagaaaggaaaaggcaaaacactccaggacctctcccggatctgtctcctcctctagccagcagtatggacagctggacccctgaacttcctctcctcttacctgggcagagtgttgtctctccccaaatttataaaaactaaaatgcattccattcctctgaaagcaaaacaaattcataattgagtgatattaaatagagaggttttcggaagcagatctgtgaatatgaaatacatgtgcatatttcattccccaggcagacattttttagaaatcaatacatgccccaatattggaaagacttgttcttccacggtgactacagtacatgctgaagcgtgccgtttcagccctcatttaattcaatttgtaagtagcgcagcagcctctgtgggggaggataggctgaaaaaaaaaagtgggctcgtatttatctacaggactccatatagtcatatataggcatataaatctattctttttctttgtttttttctttcttcctttctttcaaaggtttgcattaacttttcaaagtagttcctataggggcattgaggagcttcctcattctgggaaaactgagaaaacccatattctcctaatacaacccgtaatagcatttttgcctgcctcgaggcagagtttcccgtgagcaataaactcagcttttttgtggggcacagtactggatttgacagtgattccccacgtgtgttcatctgcacccaccgagccaggcagaggccagccctccgtggtgcacacagcacgcgcctcagtccatcccattttagtctttaaaccctcaggaagtcacagtctccggacaccacaccacatgagcccaacaggtccacgatggatccaccagtcccaccccagccttttcctttcatctgaacagaatgtgcatttttggaagcctccctcactctccatgctggcagagcaggagggagactgaagtaagagatggcagagggagatggtggcaaaaaggtttagatgcaggagaacagtaagatggatggttccggccagagtcgatgtggggaggaacagagggctgaagggagagggggctgactgttccattctagctttggcacaaagcagcagaaagggggaaaagccaatagaaatttccttagcttccccaccatatgtattttctaggatttgagaggaaagagaggaaaatgggggaatgggttgcaaaatagaaatgagcttaatccaggccgcagagccagggaaggtgagtaactttaggagggtgctagactttagaagccagataggaagaatcagtctaaactggccatgctttggaagggacaagactatgtgctccgctgcccaccttcagcctgcaatgagggactgaggcccacgagtctttccagctcttcctccattctggccagtccctgcatcctccctggggtggaggatggaaggaaagctgggacaagcagggaacgcatgattcagggatgctgtcactcggcagccagattccgaaactcccattctccaatgacttcctcaaccaatgggtggccttgtgactgttctttaaggctgaagatatccaggaaagggggcttggacactggccaaggagaccccttcgtgctgtggacacagctctcttcactctttgctcatggcatgacacagcggagaccgcctccaacaacgaatttggggctacgaagaggaatagcgaaaaagcaaatctgtttcaactgatgggaaccctatagctatagaacttgggggctatctcctatgcccctggacaggacagttggctggggacaggagaagtgctcaatcttcatgagacaaaggggcccgatagggccagcagccacaaggccttgacctgccgagtcagcatgccccatctctctgcacagctgtcccctaaacccaactcacgtttctgtatgtcttaggccagtatcccaaacctcttccacgtcactgttctttccacccattctccctttgcatcttgagcagttatccaactaggatctgccaagtggatactggggtgccactcccctgagaaaagactgagccaggaactacaagctccccccacattcctcccagcctggacctaattcttgagaggggctctctcttcacggactgtgtctggactttgagcaggcttctgccccttgcgttggctctttgctgccagccatcaggtgggggattagagcctggtgtaagtgcgccagactcttccggtttccaaagttcgtgcctgcgaacccaaacctgtgagtctcttctgcatgcaggagtttctcctgggcagctggtcactccccagagaagctgggccttcatggacacatggaactaagcctcccaaatgggagttctggctgagcccagggtggggagatcctgggaagggaggcactggaggaagacggcacctcttcccccatggcagggtgtgagggaggcaggtttggaatggtgcgagtatggcaatctaagcaggggtctggtctctttgactccaggctggcctttggccgactgtctgctcacccagagaccttggactccggactatccatggctccgaatctaagtgctgcccactcccatgctcacacccacagaaggtcttcccatcccctttagattcgtgcctcactccaccagtgaggaagatgcctctgtctttcccacgactgccaggagatagggaagcccagccaggactgaccctccttcctccagcctgccctgacccacctggcaaagcagggcacatggggaggaagagactggaacctttctttgacagccaggcctagacagacaggcctggggacactggccccatgaggggaggaaggcaggcgcacgaggtccagggaggcccttttctgatcatgccccttctctcccaccccatctccccaccaccacctctgtggcctccatggtacccccacagggctggcctcccctagagggtgggcctcaaccacctgctcccgccacgcaccggttagtgagacagggctgccacggcaaccgccaagcccccctcaaggtgggacagtaccccggacccatccactcactcctgagagggctccggcccagaatgggaacctcagagaagagctctaaggagaagaaaccccatagcgtcagagaggatatgtctggcttccaagagaaaggaggctccgttttgcaaagtggaggagggacgagggacaggggtttcaccagccagcaacctgggccttgtactgtctgtgtttttaaaaccactaaagtgcaagaattacattgcactgtttctccactttttattttctcttaggcttttgtttctatttcaaacatactttcttggttttctaatggagtatatagtttagtcatttcacagactctggcctcctctcctgaaatccttttggatggggaaagggaaggtggggagggtccgaggggaaggggaccccagcttccctgtgcccgctcaccccactccaccagtccccggtcgccagccggagtctcctctctaccgccactgtcacaccgtagcccacatggatagcacagttgtcagacaagattccttcagattccgagttgcctaccggttgttttcgttgttgttgttgttgtttttctttttctttttttttttgaagacagcaataaccacagtacatattactgtagttctctatagttttacatacattcataccataactctgttctctcctcttttttgttttcaactttaaaaacaaaaataaacgatgataatctttactggtgaaaaggatggaaaaataaatcaacaaatgcaaccagtttgtgagaaaaaaaaaaaaaagccgaaaaaaaaaaaaaaaacacctgaatgcggaagagctcggctcccgtttagcattttgtacttaaggaaataaaaaaccaacaaaggatctcacattttcttaaaaagtgaagattgctgtatactatttattcaacttataatttatgttactccttgatctttgtcttttgtcatgacaaagcatttatttaataaagttatgcattcagtta

SEQ ID NO: 255 - DNA, 1889 bp, Homo sapiens
gggacgtcagcggacggggcgctcgcgggccggggctgtatggggctcccgcgcgggtcgttcttctggctgctgctcctgctcacggctgcctgctcggggctcctctttgccctgtacttctcggcggtgcagcggtacccggggccagcggccggagccagggacaccacatcatttgaagcattctttcaatccaaggcatcgaattcttggacaggaaagggccaggcctgccgacacctgcttcacctggccattcagcggcacccccacttccgtggcctgttcaatctctccattccagtgctgctgtggggggacctcttcaccccagcgctctgggaccgcctgagccaacacaaagccccgtatggctggcgggggctctctcaccaagtcatcgcctccaccctgagccttctgaacggctcagagagtgccaagctgtttgccccgcccagggacacccctccaaagtgtatccggtgtgccgtggtgggcaacggaggcattctgaatgggtcccgccagggtcccaacatcgatgcccatgactatgtattcagactcaatggagctgtgatcaaaggcttcgagcgcgatgtgggcaccaagacttccttctatggtttcactgtgaacacgatgaagaactccctcgtctcctactggaatctgggcttcacctccgtgccacaaggacaggacctgcagtatatcttcatcccctcagacatccgcgactatgtgatgctgagatcggccattctgggcgtgcctgtccctgagggcctagataaaggggacaggccgcacgcctattttggaccagaagcctctgccagtaaattcaagctgctacatccggacttcatcagctacctgacagaaaggttcttgaaatcaaagttgattaacacacattttggagacctatatatgcctagtaccggggctctcatgctgctgacagctttgcatacctgtgaccaggtcagtgcctatggattcatcacaagcaactactggaaattttccgaccactatttcgaacgaaaaatgaagccattgatattttatgcaaaccacgatctgtccctggaagctgccctgtggagggacctgcacaaggccggcatccttcagctgtaccagcgctgaccccaatgcactgagccctttgcttcttcaagagttgcggccctgatcctctcaagtggccaaaagcttttttaacttttcaatcttcaccttcccttgccaacagagggcactggggtgaattcaagattttcatcgaggtctgttcaatataggacaccccagcttgtccttggctcatccaagaactcttctgtatctaaaacaatacatctcaatcttggccaagggaaaatggactgctttgctggattggcactgagcaactttaggaaatgtcggtggagtgttcagcaagatcagacagcagtccaggtcaaaggcaaacacacacgctccagcccaaatcctcctggtggcacatcctaccccagatgctaaagtgattcaaggactccaggacacctcttaagagcctttctaagaacatgataggcttacttctgctccataataaagtgggagaaaaaagccagaatataacttaagactagataactgcgtacatgatggaccatttttttttttttggctgggtagagaaatcatataaaacgcaggctgtttagcatggagatgactctcagaacactgggagggtctggcacttgatgggggttagttgcttggcagcctgcctgccactgagggaagtcccattagagatgtatcaccaccttgtcaccaacaggatgatgtcaccaggtaataaaccttcatcctca

SEQ ID NO: 256 - DNA, 4463 bp, Homo sapiens
gacgtcggcggttgccgtggagagacccgctcggtcccgaccgagagctggcgtcaggagccgcagggtcacagcgtgtctttgaagctgcctccgccgccaccatgagcggccgaagtcggggtcgaaagtcctcccgcgccaaaaaccggggcaaaggccgcgccaaagcccgagtccgccctgctccggacgacgccccgcgcgacccggacccttcacagtaccagagtctcggggaagacacccaggcggcacaggtgcaggctggcgcggggtggggtggcctggaagccgctgcgtccgcgcagctcctccggctcggggaggaggccgcctgccggctccccctggactgtggcctcgcgctgcgggcccgagctgcgggggaccacgggcaggccgcggccaggcccggcccggggaaggccgcatctctctcggagcgcctggccgcagacactgtcttcgtgggaacagcgggaaccgtgggaaggccgaaaaatgccccccgcgttggaaaccggcgtggccctgccgggaagaaggccccagaaacctgtagcaccgcggggagggggcctcaggtcatagctggtgggaggcagaagaaaggggcggcaggggagaatacctcggtgtcagctggggaggaaaagaaggaagagagggatgcagggtcggggcccccagcgacggaaggcagcatggatacgctggagaacgtgcagctgaagctggagaacatgaacgcccaggcggacagggcctaccttcggctctccaggaagtttgggcagttgcgactgcagcacttggagcgcaggaaccacctcatccaaaatatcccgggcttctgggggcaagcatttcagaaccatccccagctagcatcctttctgaatagccaagagaaagaggtactgagctacttaaacagcttggaagtggaagagctcggccttgccagattgggctacaaaatcaagttctacttcgatcgcaacccgtatttccaaaataaggtgctcatcaaggaatatgggtgtggtccttctggccaggtggtgtctcgttctactccaatccagtggctcccagggcatgatctccagtccctaagccagggaaacccagaaaacaaccgtagtttctttgggtggttttcaaaccacagctccattgagtctgacaagattgtggagataatcaacgaagaattgtggcccaatcccttgcagttctaccttttgagtgaaggggctcgtgtagagaaaggaaaggaaaaagaaggcaggcaaggtccaggaaagcagccaatggagactactcagcctggggtgagccaatccaactgatcctgcacaagtctccctgctacctcctgctgggctgctcctggttgactacatatttggctctctgccttctcttcatgttggcctctgtgtactatagaccctttggactttagttacaagaatatggcatttatgatcatgttcttttgcctcccatagcctcttgcttttctacgttagtgtcacatgttatgtgatcgcacccggactgttcatatgttaagcacacatactttagatgtgtgctccctgttatctacattgcctggaccttgttcttggctctggcctttcctacttgtctttaacatggacactcatgagtcatcctccaggacgaccagtgcatcctcaagctctgctccttcagggccagtgacttgctgggcttcgtgttcatgctggccatgcatgtcatctatgcaagcgtttccattgccactgcagaatgaagccagtgcacatggtattagtcatcagccagaacttcctgttctgtgggtctggggtcaccagctgagatgtcacctgctttatttctggctttggcctgtggtctgtgatacccatcctgcttgatgttctgcagaatggcacttgactgctgggcatgcatgaagttaagggcaagaaacagtatgccatgtgttctgtaccatcatgtgtctcttcttgcttctgggcccttctactggtgaactttcatcaagatctgcgccatgccgtgtcactatcaagccattaagttttgtctgggttgctgtcagccccagttggcttcctggtcaacaaggacctcaagaactgcctgtggaccgaggccccctaccagtgcatgagacacacacctaccctccccagctttccaggaaccctactggctgccagactgatgggcgggctggtatgtgtggacatgtgttcactgtcattatgctgtggctccaggtgagggtgaggactgggcctatatagaatccagataccattgtcaacttcccttattcccgtctaagatgtgagcagagtgccatagtaggggttctgggaagaggtatttctgatttgtgggcctctgcttgcttgacttcaggtcacttatacttcttattttgcttgcctgccttcatccctcatttcctccctctcattcttctttcctccctccctttcctggtagcctcctttcctcctcttctgccttccccttccttctttccttattcttttttattttgtttaaatagtaccacagagaaaacaactgaaaaaccacatttttctacatacagctggggaggtagctgagaacttggcactgcgcacacatactaggttgaaagagagttgaggaaaccagaaggccaagtggatctgctggcaaaccctgaacctgtctcctgcgcttgctctacagttctgaagttgaaaatccttttcatgcctagcatctgcttgagttataaaccccaaggcagccatgtcatagactagtgtttactcttgttttgactttgttttaatgcttcctaagacccaagtgcctcctgctgtttcctcctttgtggtagcctctggccatctggacctcaatccccagctttcccactttcagcagtcctttgctctctttgcttctacctcaaatagccccaggagtgggctttagtctccaatatggagcatctcaagcttctcctgggggatggggattgggatgggcagaatctgttttggatctccgggttatttccagtgggtgtaaaagcagagctgggcctttccctctcttatccctgagggtgggtaagaaggactgtatctacacctgttcttccctaccttctcttttgttagggaggcctcattctaagttcctcaagagagtccttggcttaaagctgtagcaagggtgtgctaggtgggggatttggagcaaaaccgtcgagtaggcatgatactggtatggagtgggcctgcaaaatcagacagaaatggcttgagaagccgcagggggagcatgcctgtctctcagtgatagagtatgggagggacctccctagcttggaaaatgagaattgaaggggttatgaacaaataggatgcctagttgaggatgttcccaaagttttgtccaatcttatcattagtagattttataagccacagagacaaaccagaaacggaataatgttactttggatgctttatttttttgttctaggtgtggctttgtacatgcagaagaatgctatatgctgcacattttgcctttaaagtcttacgactttccccattttagtctaatgggaagatacagatgtgcaagtctgcttttttgttttttgttattatttttttttttttgctctgtgttatggacattttcagacatgcacagaagtggagaggatggtccttggaccccatgtgtccatcacctagctgcatcacttatcagctatggtcaacctggtttcatctgtatctctctcttttcacctgtattgtttattgaaaatccaagacactatgccaatgcaaccgtgactactttgggagattggtagtctcttttgatggtgatagtgatggggtgcactatcataatcacatcaggtctgctttttgcttttaatgttaactaatgaagttccagagatgggccttagaaatgtgttttaagaattaacaaggagtctcaaaaagaaatgagagggatgcttcctttcccttgcatctacaaaacaagagagagactgttctgttgtaaaactctttcaaaaattctgatatggtaaggtacttgagacccttcaccagaatgtcaatctttttttctgtgtaacatggaaacttgtgtgaccattagcattgttatcagcttgtactggtctcataactctggttttggaagaataatttggaaattgttgctgtgttctgtgaaaataacctccccaaaataattagtaactggttgttctacttggtaatttgacaccctgttaataacgcaattatttctgtgttcttaaacagtataaatagttgtaagtttgcatgcatgatggaaaaataaaaacctgtatctctgttata

SEQ ID NO: 257 - DNA, 3883 bp, Homo sapiens
cagtttgcaaaagccagaggtgcaagaagcagcgactgcagcagcagcagcagcagcggcggtggcagcagcagcagcagcggcggcagcagcagcagcagcggaggcaccggtggcagcagcagcatcaccagcaacaacaacaaaaaaaaatcctcatcaaatcctcacctaagctttcagtgtatccagatccacatcttcactcaagccaggagagggaaagaggaaaggggggcaggaaaaaaaaaaaacccaacaacttagcggaaacttctcagagaatgctccaaaactcagcagtgcttctggtgctggtgatcagtgcttctgcaacccatgaggcggagcagaatgactctgtgagccccaggaaatcccgagtggcggctcaaaactcagctgaagtggttcgttgcctcaacagtgctctacaggtcggctgcggggcttttgcatgcctggaaaactccacctgtgacacagatgggatgtatgacatctgtaaatccttcttgtacagcgctgctaaatttgacactcagggaaaagcattcgtcaaagagagcttaaaatgcatcgccaacggggtcacctccaaggtcttcctcgccattcggaggtgctccactttccaaaggatgattgctgaggtgcaggaagagtgctacagcaagctgaatgtgtgcagcatcgccaagcggaaccctgaagccatcactgaggtcgtccagctgcccaatcacttctccaacagatactataacagacttgtccgaagcctgctggaatgtgatgaagacacagtcagcacaatcagagacagcctgatggagaaaattgggcctaacatggccagcctcttccacatcctgcagacagaccactgtgcccaaacacacccacgagctgacttcaacaggagacgcaccaatgagccgcagaagctgaaagtcctcctcaggaacctccgaggtgaggaggactctccctcccacatcaaacgcacatcccatgagagtgcataaccagggagaggttattcacaacctcaccaaactagtatcattttaggggtgttgacacaccagttttgagtgtactgtgcctggtttgatttttttaaagtagttcctattttctatcccccttaaagaaaattgcatgaaactaggcttctgtaatcaatatcccaacattctgcaatggcagcattcccaccaacaaaatccatgtgaccattctgcctctcctcaggagaaagtaccctcttttaccaacttcctctgccatgtttttcccctgctcccctgagaccacccccaaacacaaaacattcatgtaactctccagccattgtaatttgaagatgtggatccctttagaacggttgccccagtagagttagctgataaggaaactttatttaaatgcatgtcttaaatgctcataaagatgttaaatggaattcgtgttatgaatctgtgctggccatggacgaatatgaatgtcacatttgaattcttgatctctaatgagctagtgtcttatggtcttgatcctccaatgtctaattttctttccgacacatttaccaaattgcttgagcctggctgtccaaccagactttgagcctgcatcttcttgcatctaatgaaaaacaaaaagctaacatctttacgtactgtaactgctcagagctttaaaagtatctttaacaattgtcttaaaaccagagaatcttaaggtctaactgtggaatataaatagctgaaaactaatgtactgtacataaattccagaggactctgcttaaacaaagcagtatataataactttattgcatatagatttagttttgtaacttagctttatttttcttttcctgggaatggaataactatctcacttccagatatccacataaatgctccttgtggccttttttataactaagggggtagaagtagttttaattcaacatcaaaacttaagatgggcctgtatgagacaggaaaaaccaacaggtttatctgaaggaccccaggtaagatgttaatctcccagcccacctcaacccagaggctactcttgacttagacctatactgaaagatctctgtcacatccaactggaaattccaggaaccaaaaagagcatccctatgggcttggaccacttacagtgtgataaggcctactatacattaggaagtggcagttctttactcgtcccctttcatcggtgcctggtactctggcaaatgatgatggggtgggagactttccattaaatcaatcaggaatgagtcaatcagcctttaggtctttagtccgggggacttggggctgagagagtataaataaccctgggctgtccagccttaatagacttctcttacattttcgtcctgtagcacgctgcctgccaaagtagtcctggcagctggaccatctctgtaggatcgtaaaaaaatagaaaaaaagaaaaaaaaaagaaagaaagagggaaaaagagctggtggtttgatcatttctgccatgatgtttacaagatggcgaccaccaaagtcaaacgactaacctatctatgaacaacagtagtttctcagggtcactgtccttgaacccaacagtcccttatgagcgtcactgcccaccaaaggtcaatgtcaagagaggaagagagggaggaggggtaggactgcaggggccactccaaactcgcttaggtagaaactattggtgcttgactctcactaggctaaactcaagatttgaccaaatcgagtgatagggatcctggtgggaggagagagggcacatctccagaaaaatgaaaagcaatacaactttaccataaagcctttaaaaccagtaacgtgctgctcaaggaccaagagcaattgcagcagacccagcagcagcagcagcagcacaaacattgctgcctttgtccccacacagcctctaagcgtgctgacatcagattgttaagggcatttttatactcagaactgtcccatccccaggtccccaaacttatggacactgccttagcctcttggaaatcaggtagaccatattctaagttagactcttcccctccctcccacacttcccacccccaggcaaggctgacttctctgaatcagaaaagctattaaagtttgtgtgttgtgtccattttgcaaacccaactaagccaggaccccaatgcgacaagtagttcatgagtattcctagcaaatttctctctttcttcagttcagtagatttccttttttcttttctttttttttttttttttttttggctgtgacctcttcaaaccgtggtacccccccttttctccccacgatgatatctatatatgtatctacaatacatatatctacacatacagaaagaagcagttctcacaatgttgctagttttttgcttctctttcccccaccctactccctccaattcccccttaaacttccaaagcttcgtcttgtgtttgctgcagagtgattcgggggctgacctagaccagtttgcatgattcttctcttgtgatttggttgcactttagacatttttgtgccattatatttgcattatgtatttataatttaaatgatatttaggtttttggctgagtactggaataaacagtgagcatatctggtatatgtcattatttattgttaaattacatttttaagctccatgtgcatataaaggttatgaaacatatcatggtaatgacagatgcaagttattttatttgcttatttttataattaaagatgccatagcataatatgaagcctttggtgaattccttctaagataaaaataataataaagtgttacgttttattggtttcccccca

SEQ ID NO: 258 - DNA, 4722 bp, Homo sapiens
cacaagggtcaagtagtccagcattctacagtttgtgtgtttgagagaaaaataagcccataaaaacattctaaccttcagattaagtgttttctgcattctctcccagcggatctgattcctgttctgaagaattgaagttgagcatcgttagttaaattcagctgctgcctgactgtataccacagcaaaggctttggaaacatttttcagttaaaacaataatgactttcttggagtgtaatcccagtggaggctgttctacgtatagcctgaaagaatacttaactaccatacgcaattctgcagagaccttgtaaaaatcacactttacaccaaacaactgagtgattctgaattggttgggggaatcttagttgtagatatcaattcaccttcttgaagattcaaccactgctactcagagctgctgctgaaataccatgtctaagaactcagagttcatcaatctgtcatttttattagatcatgagaaggaaatgatcctgggcgtcctaaagagagatgaatatttgaaaaaagtggaggacaagagaataaggaagctgaaaaatgaactcttagaagcaaaacgtagaagtgggaaaactcaacaagaggccagcagagtttgtgttcactgtcacagaaacctgggcctaatctttgaccggggagacccttgtcaggcttgctcactgagggtatgcagggagtgtcgagttgcaggccccaatggcagctggaagtgcactgtctgtgacaaaatcgcgcagctaaggattataactggtgagtggttttttgaagaaaaggcaaaacgtttcaagcaagtcaatgttctcggcactgatgttgtccgacagtccattttaagaagaagtccaggagctgaagaagtacagagccaagagcaaacccgccaggatgcagaaaagtcagacacttcacctgttgctgggaagaaggccagccatgatgggcccaagagaaagggatttcttcttagcaagttcagatcggcaaccagaggagaaatcataactcccaaaactgacactgggcggagctatagcttggacttagacggtcaacattttcggagtttaaaatcacctcctggttcagacaggggaagcactggctcatcagatctcaatgaccaggaacctggtcctaggaccccgaagagcagtcggagcaatggtgtgaccccaggcactcagagttcaccagccccaagcacacgaactgtgacctcagtcatcagtagagagtatggttttgaaaattccatggatttggctgctattgaaggtacctctcaggagctcacaaagagtcaccgcagaaacacttctggcacaccttccatagcagtgtctggaacctctctctcctcagatcagagtcgatctgagttagatttgagtgagtcatttacagaagactcagaggatactgtaagcataagaagcaagtctgtccctggggctttagacaaggactccttggaagagactgaagaaagcattgatgccttagtgtcctcgcagttatctacaaacactcaccgtctggcaagtggcctatcaactaccagccttaacagcatgatgagcgtttacagtgaaacgggagactatggcaacgtgaaagtcagtggtgaaatccttctccatatcagctactgctacaaaactggtgggctgtacatttttgtcaagaattgcagaaatctggccataggagatgaaaagaaacagaggacagatgcttatgtcaagtcatatcttcttcctgacaagtcccggaacaacaagcgtaagaccaaaatcagaacaggcaccaatccagaattcaatgaaacactaaagtacactatcagccatacccagctggaaacaagaactctgcagctctcagtctggcactatgatcgatttggacgtaatagcttcctcggggaagtagagattccttttgactcatggaactttgaaaatccaactgatgagtggtttgtgcttcaacccaaggtggagtttgctcctgatattggccttcaatacaaaggagagctgacagttgttttacgttacattcccccagaagagaacctgatgcttccaccagaacaactccaaggaaataagacttttaaaaagggaaagaagaaggagtcacctgtaatctctggaggaatactagaagtgttcatcaaagaggcaaagaatttgacagcagtgaagtcaggaggcacttctgatagctttgtgaagggctacctgctccctgatgatagcaaagccaccaagcacaaaactctggtaataaaaaagagtgttaaccctcagtggaatcatacattcatgttcagtggcatccatccccaggatataaagaatgtttgcctagaacttactatctgggacaaggaggccttttccagcaacatctttctgggaggagttcgtttgaattctggaagtggtgtgagccatgggaagaacgtggattggatggactctcagggggaagagcagcgcctttggcagaagatggccaacaaccctggaactccctttgagggtgtactcatgcttcgttccagcatgggaaaatgtaggctctaaagggaccagttctccaagaatgaggccaccaggacctatctggctgtcttttcctaccattagcaaactgagacctgggattctgcttccctgccatttctcacctgacagtgttgggacatgaggggagagatgtcagtagtatgaacatttagggtcttgctgagtgcctaaaaaacatatatttccatccaatcaaggccttcttgattggatgatagaaagtgtactacttgtcctgtcaacaagcaaattgtgcaaaggcttatagggtttatgccataaaagaaatggcacaagcctccatttgctaattataagttactttagatttcctcaaatcctttgaagagaaagaggaccactgagaaggtagatcacttgaaaagtcagaagaaaggatactggccaacttttactcaccctaggaatccacatgatctcaagaaggcatggtggagatggttgcttgagcaaggggattgtcctgttattgcagcaaacttgtggattaaccaagtagtatttcaagatggattgacagggctttctatgattactatagaatttatcatctaaatcagtttactttttagaacaaagagagctaaataactacatcagaacgattgatgttgattagaattgacctgggaaaattgggatgtagggtcaccctactgatgacctaagagagctctgttttaaacatttattttataaaatgttctaagccattaactaaaaggaaatgagatataatggtcaattgatataccttttcacattgtgttcactgacgagactagtttaatgaaaaaggaggtactctacctgctattttacttctgttcctcttctgccctgttatgggagagaatcaaagactccatctgctctcttcccccttgttttctccttcactgagtttttcttatctccttttgcagtggttaactattgtcacaataatgctgaatgaaaaaacacaccaaatgtcagtggcttaaaatgaccatcctttttctcacagttatgaagattggctatggcacctctgcttcctgctataggcctgaggttctagggcttcttatgcctcatcctctttaagccaaagggatagccagagcatcttgatggcagaagtgcaataagatgagccccactgctcgggtacattttcagcccctggttgtgtcatgtctactgatatctcattggtcaaaggaagtcagagggccaagatgaagaggcagggaaatatgcactgcccacagtgaagccatgacaagagtgaggatgcaggaaggcatgaagaattggggccaacagttcaatctaccataccttctctcacctggaattccagatgcttgagctacgaaacttagatgcaaagaaagttaaagctagaaggaacctcaggcccagttgctcattttgcagattccaaatgtgaatttcagagagctgagataacttgcccaaggccatatagaggctgtgactaaatctggacttaaatccagactatcaatcttaggccagtgttcttttttcaatatagtccttggcataatgctatgcttattaggtagataaaagggcttatgtcaagaaatttggagcagagtctgattacttgagcatgaacatacccgaccaaggtatgttctggagtcatattctagcctctgagctcattttttcatgcgagttcatataaaatcctcgaaagtttagaaactaggttttagtagtaacggagctagaatcatcttcgggcttattcctgctagttgttccatatttctagatttcatcttgaattttgaaaactgatttaagaatatatttagtattattattagtaagggaatacgcaatccagtttcaattttattcagaagtaggtcacctaattctagaaaatggttattagtctagtgtcgcttagcaaggtacttaaaagaaaatctgcacatatccttgtgctgcccttcttaaaaacagaaaacaaaaagtgtaagatcatcattgcttcccacataggaaaaataaaatgtcttcagacttgatgtga

SEQ ID NO: 259 - DNA, 3170 bp, Homo sapiens
atcttgagactcgctaagcgtcccagccgcatccctcccgcagcgacggcggcccgggacccgcgggctgtgaaccatgaacacccgcaatagagtggtgaactccgggctcggcgcctcccctgcctcccgcccgacccgggatccccaggacccttctgggcggcaaggggagctgagccccgtggaagaccagagagagggtttggaggcagcccctaagggcccttcgcgggagagcgtcgtgcacgcgggccagaggcgcacaagtgcatacaccttgatagcaccaaatataaaccggagaaatgagatacaaagaattgcggagcaggagctggccaacctggagaagtggaaggagcagaacagagctaaaccggttcacctggtgcccagacggctaggtggaagccagtcagaaactgaagtcagacagaaacaacaactccagctgatgcaatctaaatacaagcaaaagctaaaaagagaagaatctgtaagaatcaagaaggaagctgaagaagctgaactccaaaaaatgaaggcaattcagagagagaagagcaataaactggaggagaaaaaaagacttcaagaaaaccttagaagagaagcatttagagagcatcagcaatacaaaaccgctgagttcttgagcaaactgaacacagaatcgccagacagaagtgcctgtcaaagtgctgtttgtggcccacaatcctcaacatggaaacttcctatcctgcctagggatcacagctgggccagaagctgggcttacagagattctctaaaggcagaagaaaacagaaaattgcaaaagatgaaggatgaacaacatcaaaagagtgaattactggaactgaaacggcagcagcaagagcaagaaagagccaaaatccaccagactgaacacaggagggtaaataatgcttttctggaccgactccaaggcaaaagtcaaccaggtggcctcgagcaatctggaggctgttggaatatgaatagcggtaacagctggggttctctattagttttttcgaggcacctaagggtatatgagaaaatattgactcctatctggccttcatcaactgacctcgaaaagcctcatgagatgctttttcttaatgtgattttgttcagcctcactgtttttaccttaatttcaactgcccacacacttgaccgtgcagtcaggagtgactggcttctccttgtcctcatttatgcatgtttggaggagctgattcctgaactcatatttaatctctactgccagggaaatgctacattatttttctaattggaagtataattagagtgatgttggtagggtagaaaaagagggagtcacttgatgctttcaggttaatcagagctatgggtgctacaggcttgtctttctaagtgacatattcttatctaattctcagatcaggttttgaaagctttgggggtctttttagattttaatccctactttctttatggtacaaatatgtacaaaagaaaaaggtcttatattcttttacacaaatttataaataaattttgaactccttctgtataaatgggtcatttttatttttaatgaaaagttattggggttttctctcttgaagggtctcattttaattcccttttccaggccgtatagatcaaatatagtactgtcattactgttggctcttgttttggtcttgacttactaatagtgttaccctgattttcagagggggacagtttatctccagaaaggccaatgtttgtatacacatcagctagacacaaatatagacatcatatgtagtttgtacatgtttcagaaacttgttttttctttgctctgtgtaacctatttcctattgctagttcagttggctttcttattcacttctgtgaccctgaaccagttctcagaccctagagtgtaagagcattgattttctacgctgtgtaatctagctcaatccctctgtcccctccgcctcaccgtcccccagccaccacattgtatagcaaaagcattacattcaatcctagaataaaggtaaatacaacaaatcatctttgcagctggacaactaataatactttgcagcattaagagatcttctgtgttaccagtcactctgttgaaatgaactttccgaatctctttattcaggaaaacatggggttttgaaattcttgggccaagagacataactgaggggttcgcagagctaggcaagggtgcactaggaaagggccacattggtgggtggggggtaacagagaacagatggtgtcaggaagtttctctggagtaaataatgtggatattcttggtttccctctcctccgccagctgaagctgtgttagtgctgttgacactaatataaaatgtttggtccatttgaaatccttgtcattgccttatatgggggaaactcaatcccccagcctgtgttggaaatatcaccaaactgattgtaaatgtgcggctgtagcagacattttagtgtggtggtgtgcagccatttcggccctacacctgccagcctggctaccttacagttgtgttccgatttttgcgtctatgcttggtgtgcctcacttgctgcattttccagcatgcaaccaggagttgacgtaggaaaaagggatgctttcttactttggaagctctcagggaagttggtgtcaatttctcctccactgcctggcctaccctgcactcccaaagattttgtgcagatgggtagttccattttttaaaaattgtgcagatatggaaaattgtgacttacttcatgaccagaactatctagaatatgtgtgggggtataaacatcttgcttaaccaaatatctatgtaggcagaggtaaccaggagagaagcaagacttgctgcctaaaggagcccaccattttacttttcacatttaatctgccacgttgaatcaattggaataaaacctgactcgcaggtgactggacaggaaatcccaaagttccaccatttctatgcttaattttaatgtccccccgcttttttttttgtagaaaataaaaacaagaaaatcgttccaatgtaagatgtttgttatagaaactttaggcaatacaggtgtgtaataaaatgtttaataaacttctaaacacttttgtatttggattt

SEQ ID NO: 260 - DNA, 1979 bp, Homo sapiens
acatattcagcagggttagcttgtcctcccctccctcttcagcttcccagacactgagtctggaatgaaaattcacctgcctctgagttggctcctaatgggggtgggagtgttacttcggttcccaggttggaagattatctcacccggccccagctatataagctgaccggtgtggaggggcccagcagggccaactccagggattccttccacgacagaaaaacatacaagactccttcagccaacatgatggtactgaaagtagaggaactggtcactggaaagaagaatggcaatggggaggcaggggaattccttcctgaggatttcagagatggagagtatgaagctgctgttactttagagaagcaggaggatctgaagacacttctagcccaccctgtgaccctgggggagcaacagtggaaaagcgagaaacaacgagaggcagagctcaaaaagaaaaaactagaacaaagatcaaagcttgaaaatttagaagaccttgaaataatcattcaactgaagaaaaggaaaaaatacaggaaaactaaagttccagttgtaaaggaaccagaacctgaaatcattacggaacctgtggatgtgcctacgtttctgaaggctgctctggagaataaactgccagtagtagaaaaattcttgtcagacaagaacaatccagatgtttgtgatgagtataaacggacagctcttcatagagcatgcttggaaggacatttggcaattgtggagaagttaatggaagctggagcccagatcgaattccgtgatatgcttgaatccacagccatccactgggcaagccgtggaggaaacctggatgttttaaaattgttgctgaataaaggagcaaaaattagcgcccgagataagttgctcagcacagcgctgcatgtggcggtgaggactggccactatgagtgcgcggagcatcttatcgcctgtgaggcagacctcaacgccaaagacagagaaggagataccccgttgcatgatgcggtgagactgaaccgctataagatgatccgactcctgattatgtatggcgcggatctcaacatcaagaactgtgctgggaagacgccgatggatctggtgctacactggcagaatggaaccaaagcaatattcgacagcctcagagagaactcctacaagacctctcgcatagctacattctgaggcaaacgacagactcttaatcagtaaatgttcactggcattttgaaggcatggcccaagagaagagacactagccataaaatctagtttctatttatcaacgtgttgtgaagatgtacctaatgaagttttgagaaagcacagggttataggtgtttaaatttcctttagtgaaactcttatttatttttatgtattcctgtttatttatttactgccacgctactgatattcagaccttcatgatcatccatctggtgagcagagcttcatttgtatataacactttcagagccttcccacccataggtagttcttaaaccaggtgaaagagcaaagttcaagtgcctacttatgtgtcattcgctcatgtaagagtttttaagagagggctgattatcacagccctcttttctcctgaatttttaatgcagaagtttgaatgaagcaagggaaggcatgtagggacaggaaaggaaacaatggaaggaaagtgattctgtgaaaaggacagtgaagccagctattttacccccaggctggattttttttttttttttttttttttttttttaccgagtacacagagtacccaagtgaagagaacgtcatgagtgtaagtgcaaatcagtggaaggagcggcaaactgggacatgcagaattgaatttgctcaaaaaagatgaaaggaaatgcaaactgtaaatgtataaatgtatattgtattgtatgtacattttatattcataataaaggcaatcaaactctaaa

SEQ ID NO: 261 - DNA, 5895 bp, Homo sapiens
acattcacacacaatcaccctttctaacttctgggactctttgcgcaactgctaggatttctcaagtgcatgtggcaacacagcccagctccgggtggaaaccagcagggctctggaggggctcggagaccaggggagctgtcaaggctgcggcggggaccagagaggagcctggcgggggtggctgggtggctgggggaatccccccaacttcccatcgcaggcgcagctctctcggccgcctatttcctccgaaacccgcgctgcggagcagcccagtgcatagagttcaacacttccccttgttgtggaaagtaaaggagcctcactaccacctttttttctttgcgttttcttactgctggtcctgggagccttttccttcggagcagcagccctgtccggcatctgtcttgagctcccagcaaggaaagtccatcagcttgataatggaggagaacaatgactccacggagaacccccaacaaggccaagggcggcagaatgccatcaagtgtgggtggctgaggaagcaaggaggctttgtcaagacttggcatactcgctggtttgtgctcaagggggatcagctctattatttcaaagatgaagatgaaaccaagcccttgggtactatttttctgcctggaaataaagtttctgagcatccctgcaatgaagagaacccagggaagttcctttttgaagtagttccaggtaagatattttcctagaatatatgggatgggaggatactgactaagtctgagaaggaggagaaagaaaattagctacaggaagagtttatatccccttctacaagaaaacttaaatatagctaccaccgctttgaaaggaatggtttgtgtccaaacagcattttccagacaagctctgtacttttttgccaaaagaattaactttaaactgaaggcagtggacagttaaacaagagtcggcactgggaacagctgtgcgtagaccagaccagtgacttataaggaggcgatcgagatcggatgacagcaaatcatgaaagctacctcctcatggcaagcacccagaatgatatggaagactgggtgaagtcaatccgccgagtcatatggggacctttcggaggaggggagtttgaagacagaaaggaaaggggagaaacctgcagagagcatcaaaggatggggggtgctataaaagaagcaggggggtcctttgaaagaaatctatcatgcactgaaatgctttctggagaaggtgccattattttcctcccctcttgctcagatgaaaggagccagcaaggacagtcctgaaatattcctcaggggactttttgtcattgttcctctttcctcttgcacagagctatttgctgacctttccagaggaatctcagtccagctgagaagacagttcttaataaaaacaaaaaaatgcaaaaaccaattcctgctgtttgaatgggaatggtagcttgcttgctgcagttcttttcctgtgacattttggaatgtctgcagaaacttaaaaaaaagaaaaaaaaaaccttaaaaactccctggattaggcaagagaaaaggaagtttttttttgctaaacaggagtaaatgagaggtggtaacttatccctaagccaggacctggatgatcaaaaccttcaaattctagggatcagcacttcaaaaataacaagtaaacaagcatgaggagtggctgttgggtttcgctcagaggcaggttttaaaggaagccaaaaccgggttcagaacttcaggcctgtacgatgcctgaagaccggaattctggggggtgcccggctggtgccttagcctcaactcctttcatccctaaaactacatacagaagaatcaaacggtgttttagttttcggaaaggcatttttggacagaaactggaggatactgttcgttatgagaagagatatgggaaccgtctggctccgatgttggtggagcagtgcgtggactttatccgacaaagggggctgaaagaagagggtctctttcgactgccaggccaggctaatcttgttaaggagctccaagatgcctttgactgtggggagaagccatcatttgacagcaacacagatgtacacacggtggcatcacttcttaagctgtacctccgagaacttccagaaccagttattccttatgcgaagtatgaagattttttgtcatgtgccaaactgctcagcaaggaagaggaagcagtaagttgatgcatttatttccaaataagcttttgtttggaatttttttctgtgttcttagtcttaaatctgtaaatttccattgccctatcccggtgttactctccactatcctttgaattgacctcacacacactgagactttccgtatacagctcaagcaccatttccgatcccctctctgatcaaaaaaaaaggtgttaaggaattagcaaagcaggtgaagagtttgccagtggtaaattacaacctcctcaagtatatttgcagattcttggatgaagtacagtcctactcgggagttaacaaaatgagtgtgcagaacttggcaacggtctttggtcctaatatcctgcgccccaaagtggaagatcctttgactatcatggagggcactgtggtggtccagcagttgatgtcagtgatgattagcaaacatgattgcctctttcccaaagatgcagaactacaaagcaagccccaagatggagtgagcaacaacaatgaaattcagaagaaagccaccatggggcagttacagaacaaggagaacaataacaccaaggacagccctagtaggcagtgctcctgggacaagtctgagtcaccccagagaagcagcatgaacaatggatcccccacagctctatcaggcagcaaaaccaacagcccaaagaacagtgttcacaagctagatgtgtctagaagcccccctctcatggtcaaaaagaacccagcctttaataagggtagtgggatagttaccaatgggtccttcagcagcagtaatgcagaaggtcttgagaaaacccaaaccacccccaatgggagcctacaggccagaaggagctcttcactgaaggtatctggtaccaaaatgggcacgcacagtgtacagaatggaacggtgcgcatgggcattttgaacagcgacacactcgggaaccccacaaatgttcgaaacatgagctggctgccaaatggctatgtgaccctgagggataacaagcagaaagaacaagctggagagttaggccagcacaacagactgtccacctatgataatgtccatcaacagttctccatgatgaaccttgatgacaagcagagcattgacagtgctacctggtccacttcctcctgtgaaatctccctccctgagaactccaactcctgtcgctcttctaccaccacctgcccagagcaagacttttttggggggaactttgaggaccctgttttggatgggcccccgcaggacgacctttcccaccccagggactatgaaagcaaaagtgaccacaggagtgtgggaggtcgaagtagtcgtgccaccagtagcagtgacaacagtgagacatttgtgggcaacagcagcagcaaccacagtgcactgcacagtttagtttccagcctgaaacaggaaatgaccaaacagaagatagagtatgagtccaggataaagagcttagaacagcgaaacttgactttggaaacagaaatgatgagcctccatgatgaactggatcaggagaggaaaaagttcacaatgatagaaataaaaatgcgaaatgccgagcgagcaaaagaagatgccgagaaaagaaatgacatgctacagaaagaaatggagcagtttttttccacgtttggagaactgacagtggaacccaggagaaccgagagaggaaacacaatatggattcagtgagcctgctttcgcctgctgtctctgatggctctggcaaggactccagggattctggtgggatatgacttagaaccaggtggctggtcacctggatgtacagaagtctaactggtgaaggaatatcatttacagacattaaacatccatatctgcaatgtgtaccaaagttatatcatgccccataatgctactgtcaagtgttacaactggatatgtgtatatagagtagtttttcaaaagtaaactaaaaatgagaagcatatttcaagaattattttattgcaagtcttgtatttaaatgttaaatcaatatgttgttgcaatttagcttgctttcaagcttcaccccttgcacttaacataagctatttttggcattgtgttatcatcggcttattttatagatcaatatttttatttcccttttttgctgaggaaatgaagataagcaaaaatataaatatatatataaatatatgagttattaaaatcagaagaatactttgtggctgtgctgtttgtgccaatagactttgtcatgaccaaaaagagaaatgtaaatagttttataaaatacagtcgaatcaccaggaacctttgagctgcttttaaaattcttcccctggcaccactcagttttgcttttgcgaggcgatttgacataggaactttgagactccatgagaaagtccctttctgaggcccactgtctaccttgccagatcctcagtgcgtatcgccaatgcaggatgctccttagaaaagaaaaaatggtaaagaatggcatttaacgattcaggctttgaattactctgtccctctggaccgaatctctttaactgctggatagttttagaggaattctcctgctacttaggtactgggaaacaatgcttgctaaaccatgcccacgtgagcacctgtctcccactcaaacctctcccatctcccaacaactgcactttagaataccagcagtgaaatggtattactgtttccctctgagtgaaactgctagagtatatgtcacgtagtgacatttttttctcactcaggctattgccatctgggattctctccctactacagctggcaaagttggtttgcagcaagaagatagtgggagggggccaggctgcaggagaaggagaaaagtttagaagaaacaaaccattttgcttctaattttgacagtatcactttcctgttaaaacatacaataattttaaaaggtgaatgcctaaagttccaattttagcaaatatgggaacctcagcaatgctaattttctagaaaaacccagggctctttggagctagagttttgggagaacagttcttcacaataaggcaatggttttgagaggccaggcaaataatctttctcaccgtagaacaaaaagttacaaaaggcataatcggaaatagagactacatacttgagtttatggggtttgtgttgtttgaaggttcaatgcttgcatgtgtttatttattttcaagagggaaagtggtctgtactgctttcatccttgccactgtcttgcttttattttttactctcccactgagcaagcgtctgtggtcctatggtatcaaccagtatctttatagcaataatttctttaattcccttttctctctctttccaattatttaaccagttacttccacctggacatacgataggaaattcaaactcaaaatatgaaaattgatcttaataactctcccttcatatcttttcacctatttccagtccttatcatagttgataaaaacctcagactcatccagaaagctatatgatgcactagtaaaaaaaacaaagatattcaaactgcttgggttcaaatggtatacaatttgccagctgttactgaaccttctatgcataactttttttttcctctgtgcaattggaataataaaaatactactcccataga

SEQ ID NO: 262 - DNA, 96 bp, Homo sapiens
agaggagctggacaagtacgggtctcagcagactgaggagagcaccacaatggtcaccacacagtccgccgaggttggagctgctgagatggcgct

SEQ ID NO: 263 - DNA, 1028 bp, Homo sapiens
agattgcaaggacaacagtgaggctgcataaaaagaacctatgacaggatgcacatgagagagacaaatgtcttcacattgaagaaggggaggagtgcgccattggttttccatcctccagaggcactgaatgcacatgagagagacaaatatcttcacattgaagaaggggaggagtgcaccattggttttccatcctccagatgcactgaacactctaccaccatgaatctacttctgatccttacctttgttgcagctgctgttgctgccccctttgatgatgatgacaagatcgttgggggctacatctgtgaggagaattctgtcccctaccaggtgtccttgaattctggctaccacttctgcggtggctccctcatcagcgaacagtgggtggtgtcagcaggtcactgctacaagtcccgcatccaggtgagactgggagagcacaacatcgaagtcctggaggggaatgaacagttcatcaatgcagccaagatcatccgccaccccaaatacaacagccggactctggacaatgacatcctgctgatcaagctctcctcacctgccgtcatcaattcccgcgtgtccgccatctctctgcccactgcccctccagctgctggcaccgagtccctcatctccggctggggcaacactctgagttctggtgccgactacccagacgagctgcagtgcctggatgctcctgtgctgagccaggctgagtgtgaagcctcctaccctggaaagattaccaacaacatgttctgtgtgggcttcctcgagggaggcaaggattcctgccagggtgattctggtggccctgtggtctccaatggagagctccaaggaattgtctcctggggctatggctgtgcccagaagaacaggcctggagtctacaccaaggtctacaactatgtggactggattaaggacaccatagctgccaacagctaaagcccctggtccctctgcagtctctataccaataaagtgaccctgctctcacccaaaaa

SEQ ID NO: 264 - DNA, 5566 bp, Homo sapiens
cgcgcgggcggctcctttgtgtccagccgccgccaccggagctcccggggcctccgcggggagcgcgtcccccgcatccgcccgacccccggggctggcacgtgctgcgcccggtccgctgagggggcggaggccccgatctccccgaccccccttctctgcttagaggaggaggagcagcggcagcggcagcaggaggcgacagctgccagccgaggaggcgcggcggagaggggactgcggtcagctgcgtccacttggggctgtgcggcggtcccgcgcccggcgatgttcccgggcactccctgagtagcggcagcttatcccccgcccgctagcccgccctggtccccggctcgctcgctggctggcgcggccccggccccgctctgcgtcggccccgccgcggtggaggcgcgcgagggggacgcggccggggatgagcggattgcgggtgaactcgccgcccgggggccccgcgaagccgtgagccgctgcttttctccgagtcgccgccctgcccttggatttgagatcatgtccatccacatcgtggcgctggggaacgagggggacacattccaccaggacaaccggccgtcggggcttatccgcacttacctggggagaagccctctggtctccggggacgagagcagcttgttgctgaacgcggccagcacggtcgcgcgtccggtgttcaccgagtatcaggccagtgcgtttgggaatgtcaagctggtggtccacgactgtcccgtctgggacatatttgacagtgattggtacacttctcgaaatctaattgggggcgctgacatcattgtgatcaaatacaacgttaatgacaagttttcattccatgaagtaaaggataattatattccagtgataaaaagagcattaaattcagttccagtaattattgctgctgttggtaccagacaaaatgaagagttaccttgtacatgcccactatgtacctcagacagagggagctgtgttagtacaactgaagggatccaacttgcaaaagaactaggagcgacctatcttgaactccacagccttgatgacttctacataggaaagtattttggaggagtgttggagtattttatgattcaagccttaaatcagaagacaagtgaaaaaatgaagaaaagaaaaatgagcaactcctttcatggaattagaccacctcaacttgaacaaccagaaaaaatgcctgtcttaaaggctgaagcgtcacattataactctgacttaaataacttgctgttctgctgccagtgtgtggacgtggtattttacaaccccaatttaaagaaagttgtagaggcccacaagatcgttctctgcgctgtaagccatgttttcatgctgcttttcaatgtgaagagtcccactgacattcaggattccagtatcatccgaactacccaggatctttttgctataaacagagatactgcatttccaggtgctagccatgaatcttcaggcaacccaccattacgagtcattgttaaagacgccctcttctgttcttgtttatcagacatccttcgcttcatttattcaggtgcttttcagtgggaagaattggaagaagatatcaggaagaagttgaaagattctggggatgtttcaaatgtaatcgagaaagttaaatgcattttaaaaacaccaggaaagattaattgcctaaggaattgcaaaacctatcaagccagaaaacctttgtggttttataacacttccctcaagtttttccttaataagccgatgcttgccgatgttgtcttcgaaattcaaggtacgacagtgccagcccacagggccatcctggtggcccgttgtgaagtgatggcagccatgtttaatggtaattacatggaagcaaagagtgtcctgattcccgtttatggtgtttccaaagagactttcttgtcatttttagaatacctgtacacagactcctgctgcccagctggcatattccaggccatgtgtctcctgatctgtgccgagatgtaccaagtgtccagactgcagcacatctgtgagctgttcatcattacccagctgcagagcatgccaagcagggaactggcatccatgaaccttgatatagttgacctgcttaaaaaggccaagtttcaccactctgattgcctttcaacctggctacttcatttcattgctactaactacctcatcttcagtcaaaagcctgaatttcaggatctttcagtggaagaacgcagttttgttgaaaagcacagatggccgtcgaatatgtacttgaagcagcttgcggaatacaggaagtatattcactcccggaaatgtcgttgcttagtaatgtaacctggagcttttatacactacatttcttttttattattatgaagaatgggatacctccaggttccagtaaaattcttctgaccgaaaccaatgtgggtgttagaaaaattaccatatagcttaatatgtttattagttctctttggaaaaaaactaccactgtggtcttaaaagggaacaaaatataccataggctaaaactaaggctttcactctagaatgcaaagctgttttgcagctgttttcccttaaagatgtcctgttgctttagtgatatttagacccctctcagttaagaaatgcttagattaaaaaaaaaaaattacgtaggattaatacagaaatttaatcatgtctgattaattgctctattaaaataaggggcatttaaagacccagcataaccatttgtataatgagaaatctaggggaaaaccaatcagtccaacatgagattttaggaatagaaatttgccggccatttggaaagtgaaatgccacttagttctcaattgatgacagtgtttgaatcatcataaaaaaaatacctgcttttcatctggacaacccaattgagccactttatctccttttggcaatctgagtaggcggggaacctaggcagggctggctttcttagcgtgtaacttgtgtagcagcacagggcccacacttagaaggaccccacacttggttcaaggctctgctatagcggaaattcttaataatgtttgaagaagggccccatgatttcattttgtgctgagccctcaaaattatgtctgtttcgtggtgggaaatatcctatgttttcttgctcaaacacctttctctctgaaagcagaaaaaggcactgatataaagggaagagaaggaggctcaccggagggaagagaacatagtgaagattcccgcctttggggaggtctggaccacccagggcctccactgccaccttggctggcaagggagaaatgtgttgtgttgtcttagctttaaaacagtcacagttcttgctctatcatagatgaacaaatactttcttgatcattctgtaagaccaggaggttggtaagagtgactaaccagcctaactttaatacacatgtataaagatgttcacagagaaagatgctctgtagagaatttgctaccgaagttggctcaagaatttgtttttagtgttatttaccaagattaggacgtcagtggcttaaattctttgaattcttttcaaggactgcaagattatttgataaagagtagcatgaatcttgtgctctaatattacacagtaagttcaaagaaaggatgtaagtcaaagacttgttacatagagggaaaatggactgggatagaggacagactgatagtttctttctttcatatcacatgtatagagaaataattatatcagaaactcacaaacctagacatggaaaaacagattactgtctattgtcagcatcattttcatctgtaagtcactactggaatatatttttcttttaatttccagtgactttagaatacacacagtttttccgacttttcaaaaatttgattaaatggttttatagtataatattgggaccccataccgttagcccttgtatgtataccaacactgccaaagtaaaacattaggtcaggcatggtggctcaggcctgtaatcccagcattttgggaggctgaggcaagtggataacttgaggtcatgagttcgaaaccagcctggccaaaacagtgaaaccccgtctctactaaaaatacaaaattagccagatgtggtggcgcacacctgtaatcccagctactcaggaagctgaggcaggaaaatcgcttgaacctgggaggtggaagttgcagtgagccgagatcgcaccactgcactccagcctgggtgacaagagcgaaactccatctcaaaaaaaaaaaaaaaaccaaagtgaaacactaaaaattccctatagatatattccaggaaatattttaattgggctgattttaattaggctgtatcattgatgattactggaatcgattttatgtcttttgtattttaatcacttgagttaatcaaccactggcaaatcccatttgacaaagattagcattgtaaaaaacagatactgtggtagatttctagaaattcattcacatttaagacttctaaaatggaataatagccttttgtttttcatgagcatattcgcacccctatatgaattacagcatttaaagttcaaaatcagtaacttttaatctaggaaattgaaaaatattaagttgcaaagcaaaaaaaggtattttcttgaaaatactatttaatgtttaactagactataggtagttccttaaggttgtttgacctgaagtggagttgggtttggaagctggtgcccagttggtgtggagtgtgtagttttgttatgaaagttctctaccacctacctgtgtgagtgacaccaacatccagatgtcacagctctccagagctagtcagaagagaaatcaaattagtgtttaaacccatttgcatattgacttgtcagtacctttaactcaatttaatataacaagaaatcgtaaaatacttataacctatcttagagaaatgagtgctggttttgagagttgttttttaactgaaagattatttctagatgggtagtgctttgtgctggtttctgcttccatatatttcccagtcattttaattagagaagatactctatggtagaactaaggcctttcctttcttggccaaagtctttaccctatttaaccctttgtatatttctgactgctcactgttcatattataggggaccagatttgtaatatagaattctccataacatgaatgaaattaattctgtccaagccagcatggtggcttcatattaagtagtaacagaagtctgaacaattggataaatttgacttccaagacagctaaacttttcaactgcaattttaaaaactacactacactgttatagttaatctgacaaaaatgtcctcaaagagtactttattttatttaaagcatctgtttaattcaacctttaataattttgcaaagaagggtatgtgtgtattttaatatagcctgacctgaatttatatgtttttagctttagtatttaactttttgtaacaaataaaccttttttaaaacaagtttaa

SEQ ID NO: 265 - DNA, 2035 bp, Homo sapiens
gttgggaaagagcagcctgggcggcaggggcggtggctggagctcggtaaagctcgtgggaccccattgggggaatttgatccaaggaagcggtgattgccgggggaggagaagctcccagatccttgtgtccacttgcagcgggggaggcggagacggcggagcgggccttttggcgtccactgcgcggctgcaccctgccccatcctgccgggatcatggtctgcggcagcccgggagggatgctgctgctgcgggccgggctgcttgccctggctgctctctgcctgctccgggtgcccggggctcgggctgcagcctgtgagcccgtccgcatccccctgtgcaagtccctgccctggaacatgactaagatgcccaaccacctgcaccacagcactcaggccaacgccatcctggccatcgagcagttcgaaggtctgctgggcacccactgcagccccgatctgctcttcttcctctgtgccatgtacgcgcccatctgcaccattgacttccagcacgagcccatcaagccctgtaagtctgtgtgcgagcgggcccggcagggctgtgagcccatactcatcaagtaccgccactcgtggccggagaacctggcctgcgaggagctgccagtgtacgacaggggcgtgtgcatctctcccgaggccatcgttactgcggacggagctgattttcctatggattctagtaacggaaactgtagaggggcaagcagtgaacgctgtaaatgtaagcctattagagctacacagaagacctatttccggaacaattacaactatgtcattcgggctaaagttaaagagataaagactaagtgccatgatgtgactgcagtagtggaggtgaaggagattctaaagtcctctctggtaaacattccacgggacactgtcaacctctataccagctctggctgcctctgccctccacttaatgttaatgaggaatatatcatcatgggctatgaagatgaggaacgttccagattactcttggtggaaggctctatagctgagaagtggaaggatcgactcggtaaaaaagttaagcgctgggatatgaagcttcgtcatcttggactcagtaaaagtgattctagcaatagtgattccactcagagtcagaagtctggcaggaactcgaacccccggcaagcacgcaactaaatcccgaaatacaaaaagtaacacagtggacttcctattaagacttacttgcattgctggactagcaaaggaaaattgcactattgcacatcatattctattgtttactataaaaatcatgtgataactgattattacttctgtttctcttttggtttctgcttctctcttctctcaacccctttgtaatggtttgggggcagactcttaagtatattgtgagttttctatttcactaatcatgagaaaaactgttcttttgcaataataataaattaaacatgctgttaccagagcctctttgctggagtctccagatgttaatttactttctgcaccccaattgggaatgcaatattggatgaaaagagaggtttctggtattcacagaaagctagatatgccttaaaacatactctgccgatctaattacagccttatttttgtatgccttttgggcattctcctcatgcttagaaagttccaaatgtttataaaggtaaaatggcagtttgaagtcaaatgtcacataggcaaagcaatcaagcaccaggaagtgtttatgaggaaacaacacccaagatgaattatttttgagactgtcaggaagtaaaataaataggagcttaagaaagaacattttgcctgattgagaagcacaactgaaaccagtagccgctggggtgttaatggtagcattcttcttttggcaatacatttgatttgttcatgaatatattaatcagcattagagaaatgaattataactagacatctgctgttatcaccatagttttgtttaatttgcttccttttaaataaacccattggtgaaagtc

SEQ ID NO: 266 - DNA, 5103 bp, Homo sapiens
atgaccaccagcggccacgcatgtccggtcccagcagtgaacggacacatgactcactatccagccacaccctacccgttactctttccacctgtcatcggaggactttccctgcctcccctccatggccttcatggacatccgcctccgagtggatgcagcaccccgtcgccggcaagtgccccctgacaggcttttaaaaggcccggatgccaatgcacattccaacactatccacaaaaaggagactggagcagtgctcttccctgcattgggcaaggagactctccctccctgcctaaccacttgcctgccctgttttgtgggagaattacaagtaaatgctacagaggcagtggagaaaaaagggtgttttaattcctctccagagtttcctttatttgatgtatgttgcatcctttaaacaagttgtgcaaaatggctgcagggtagattggctctcccttttaaagctctccatccggctgggtttatttgtaaatactgcatctatccttcttagtgttttaggactggctggaaagactcttcttcctgtaggttgggtcagtgtgagagatctaaaaaatcattttcccttaaaattactgtattttaataaaaggattgggcaggggctggaatgagagaaaactggtccttcaaaatgtaaaactgtcatacttaaaccagtttacaaaatatgcgtttaattatgtggtgggatgtgtgtaggtgtatgatgagagaggcaaccaacatggctatttggggtgcaaggatgtgggaacaggcaagtaattttcacattggactttcatcctagggagctgggttctagtcacagctctgagctgtgtgaccttgggtaggtctcatctccccggggttttgtttcaccagttgaacagtatgaggatgagtcacagctaacatttgttccatgatatttacccagcaccatacaagtgttatttctgtcctcccagttaacactgacgtgggtagtattatatgcccattttacagatgaggaaactgaagcctgaagaagttaaatacttatcccagaacacacagctggtaagtggcagacctggaattggaatctagttcagtttgattccccaacccatgctcttgaccactatactgttttttcaagtccagatctgaaatctcattttctgtgtggctgtgtgtttgggacaggggtaaccaattcctgactactctatatgctgcatagaacctggagaggatttttcaaagtaaatgaatctcgaaagctggattgcagagcaaacgagtgcagtcaattcagccaggggcttgcaagagggagaaagagaaaaagactgtggaatggaaagtttcccaacccaagcctttcccaaggggtagccattctctgttctacagtttagggcttgcatgtgctttttctggagtggaaaaatacataagttataaggaatttaacagacagaaaggcgcacagaggaatttaaagtgtgggctggggggcgaggcggtgggcgggaggcgagcgggcgcaggcggaacaccgttttccaagctaagccgccgcaaataaaaaggcgtaaagggagagaagttggtgctcaacgtgagccaggagcagcgtcccggctcctcccctgctcattttaaaagcacttcttgtattgtttttaaggtgagaaataggaaagaaaacgccggcttgtgcgctcgctgcctgcctctctggctgtctgcttttgcagggctgctgggagtttttaagctctgtgagaatcctgggagttggtgatgtcagactagttgggtcatttgaaggttagcagcccgggtagggttcaccgaaagttcactcgcatatattaggcaattcaatctttcattctgtgtgacagaagtagtaggaagtgagctgttcagaggcaggagggtctattctttgccaaaggggggaccagaattcccccatgcgagctgtttgaggactgggatgccgagaacgcgagcgatccgagcagggtttgtctgggcaccgtcggggtaggatccggaacgcattcggaaggctttttgcaagcatttacttggaaggagaacttgggatctttctgggaaccccccgccccggctggattggccgagcaagcctggaaaatggtaaatgatcatttggatcaattacaggcttttagctggcttgtctgtcataattcatgattcggggctgggaaaaagaccaacagcctacgtgccaaaaaaggggcagagtttgatggagttgggtggacttttctatgccatttgcctccacacctagaggataagcacttttgcagacattcagtgcaagggagatcatgtttgactgtatggatgttctgtcagtgagtcctgggcaaatcctggatttctacactgcgagtccgtcttcctgcatgctccaggagaaagctctcaaagcatgcttcagtggattgacccaaaccgaatggcagcatcggcacactgctcaatatagaaaaaaattctggaaggtcgtacacagtgaatttctctgagtgaaaagattgtggcaattgaaacacagagcaccagctctgaggaactcgtcccaagccccccatctccacttcctccccctcgagtgtacaaaccctgcttcgtctgccaggacaaatcatcagggtaccactatggggtcagcgcctgtgagggatgtaagggctttttccgcagaagtattcagaagaatatgatttacacttgtcaccgagataagaactgtgttattaataaagtcaccaggaatcgatgccaatactgtcgactccagaagtgctttgaagtgggaatgtccaaagaatctgtcaggaatgacaggaacaagaaaaagaaggagacttcgaagcaagaatgcacagagagctatgaaatgacagctgagttggacgatctcacagagaagatccgaaaagctcaccaggaaactttcccttcactctgccagctgggtaaatacaccacgaattccagtgctgaccatcgagtccgactggacctgggcctctgggacaaattcagtgaactggccaccaagtgcattattaagatcgtggagtttgctaaacgtctgcctggtttcactggcttgaccatcgcagaccaaattaccctgctgaaggccgcctgcctggacatcctgattcttagaatttgcaccaggtataccccagaacaagacaccatgactttctcagacggccttaccctaaatcgaactcagatgcacaatgctggatttggtcctctgactgaccttgtgttcacctttgccaaccagctcctgcctttggaaatggatgacacagaaacaggccttctcagtgccatctgcttaatctgtggagaccgccaggaccttgaggaaccgacaaaagtagataagctacaagaaccattgctggaagcactaaaaatttatatcagaaaaagacgacccagcaagcctcacatgtttccaaagatcttaatgaaaatcacagatctccgtagcatcagtgctaaaggtgcagagcgtgtaattaccttgaaaatggaaattcctggatcaatgccacctctcattcaagaaatgctggagaattctgaaggacatgaacccttgaccccaagttcaagtgggaacacagcagagcacagtcctagcatctcacccagctcagtggaaaacagtggggtcagtcagtcaccactcgtgcaataagacattttctagctacttcaaacattccccagtaccttcagttccaggatttaaaatgcaagaaaaaacatttttactgctgcttagtttttggactgaaaagatattaaaactcaagaaggaccaagaagttttcatatgtatcaatatatatactcctcactgtgtaacttacctagaaatacaaacttttccaattttaaaaaatcagccatttcatgcaaccagaaactagttaaaagcttctattttcctctttgaacactcaagattgcatggcaaagacccagtcaaaatgatttacccctggttaagtttctgaagactttgtacatacagaagtatggctctgttctttctatactgtatgtttggtgctttccttttgtcttgcatactcaaaataaccatgacaccaaggttatgaaatagactactgtacacgtctacctaggttcaaaaagataactgtcttgctttcatggaatagtcaagacatcaaggtaaggaaacaggactattgacaggactattgtacagtatgacaagataaggctgaagatattctactttagttagtatggaagcttgtctttgctctttctgatgctctcaaactgcatcttttatttcatgttgcccagtaaaagtatacaaattccctgcactagcagaagagaattctgtatcagtgtaactgccagttcagttaatcaaatgtcatttgttcaattgttaatgtcactttaaattaaaagtggtttattacttgtttaatgacataactacacagttagttaaaaaaaatttttttacagtaatgatagcctccaaggcagaaacacttttcagtgttaagtttttgtttacttgttcacaagccattagggaaatttcatgggataattagcaggctggtctaccacctggaccatgtaactctagtgtccttcctgattcatgcctgatattgggatttttttttccagccttcttgatgccaaggggctaattaatattaacaactcccaaagaaacaggcatagaatctgcctcctttgaccttgttcaatcactatgaagcagagtgaaagctgtggtagagtggttaacagatacaagtgtcagtttcttagttctcatttaagcactagtggaattttttttttttgatatattagcaagtctgtgatgtactttcactggctctgtttgtacattgagattgtttgtttaacaatgctttctatgttcatatactgtttacctttttccatggagtctcctggcaaagaataaaatatatttattttaaa

SEQ ID NO: 267 - DNA, 7820 bp, Homo sapiens
tgggggcagcggagggaggggtgggaagcaccatgcagtttgtatcctgggccacactgctaacgctcctggtgcgggacctggccgagatggggagcccagacgccgcggcggccgtgcgcaaggacaggctgcacccgaggcaagtgaaattattagagaccctgagcgaatacgaaatcgtgtctcccatccgagtgaacgctctcggagaaccctttcccacgaacgtccacttcaaaagaacgcgacggagcattaactctgccactgacccctggcctgccttcgcctcctcctcttcctcctctacctcctcccaggcgcattaccgcctctctgccttcggccagcagtttctatttaatctcaccgccaatgccggatttatcgctccactgttcactgtcaccctcctcgggacgcccggggtgaatcagaccaagttttattccgaagaggaagcggaactcaagcactgtttctacaaaggctatgtcaataccaactccgagcacacggccgtcatcagcctctgctcaggaatgctgggcacattccggtctcatgatggggattattttattgaaccactacagtctatggatgaacaagaagatgaagaggaacaaaacaaaccccacatcatttataggcgcagcgccccccagagagagccctcaacaggaaggcatgcatgtgacacctcagaacacaaaaataggcacagtaaagacaagaagaaaaccagagcaagaaaatggggagaaaggattaacctggctggtgacgtagcagcattaaacagcggcttagcaacagaggcattttctgcttatggtaataagacggacaacacaagagaaaagaggacccacagaaggacaaaacgttttttatcctatccacggtttgtagaagtcttggtggtggcagacaacagaatggtttcataccatggagaaaaccttcaacactatattttaactttaatgtcaattgtagcctctatctataaagacccaagtattggaaatttaattaatattgttattgtgaacttaattgtgattcataatgaacaggatgggccttccatatcttttaatgctcagacaacattaaaaaacttttgccagtggcagcattcgaagaacagtccaggtggaatccatcatgatactgctgttctcttaacaagacaggatatctgcagagctcacgacaaatgtgataccttaggcctggctgaactgggaaccatttgtgatccctatagaagctgttctattagtgaagatagtggattgagtacagcttttacgatcgcccatgagctgggccatgtgtttaacatgcctcatgatgacaacaacaaatgtaaagaagaaggagttaagagtccccagcatgtcatggctccaacactgaacttctacaccaacccctggatgtggtcaaagtgtagtcgaaaatatatcactgagtttttagacactggttatggcgagtgtttgcttaacgaacctgaatccagaccctaccctttgcctgtccaactgccaggcatcctttacaacgtgaataaacaatgtgaattgatttttggaccaggttctcaggtgtgcccatatatgatgcagtgcagacggctctggtgcaataacgtcaatggagtacacaaaggctgccggactcagcacacaccctgggccgatgggacggagtgcgagcctggaaaggcaaataattcactgcaagtatggattttgtgttcccaaagaaatggatgtccccgtgacagatggatcctggggaagttggagtccctttggaacctgctccagaacatgtggagggggcatcaaaacagccattcgagagtgcaacagaccagaaccaaaaaatggtggaaaatactgtgtaggacgtagaatgaaatttaagtcctgcaacacggagccatgtctcaagcagaagcgagacttccgagatgaacagtgtgctcactttgacgggaagcattttaacatcaacggtctgcttcccaatgtgcgctgggtccctaaatacagtggaattctgatgaaggaccggtgcaagttgttctgcagagtggcagggaacacagcctactatcagcttcgagacagagtgatagatggaactccttgtggccaggacacaaatgatatctgtgtccagggcctttgccggcaagctggatgcgatcatgttttaaactcaaaagcccggagagataaatgtggggtttgtggtggcgataattcttcatgcaaaacagtggcaggaacatttaatacagtacattatggttacaatactgtggtccgaattccagctggtgctaccaatattgatgtgcggcagcacagtttctcaggggaaacagacgatgacaactacttagctttatcaagcagtaaaggtgaattcttgctaaatggaaactttgttgtcacaatggccaaaagggaaattcgcattgggaatgctgtggtagagtacagtgggtccgagactgccgtagaaagaattaactcaacagatcgcattgagcaagaacttttgcttcaggttttgtcggtgggaaagttgtacaaccccgatgtacgctattctttcaatattccaattgaagataaacctcagcagttttactggaacagtcatgggccatggcaagcatgcagtaaaccctgccaaggggaacggaaacgaaaacttgtttgcaccagggaatctgatcagcttactgtttctgatcaaagatgcgatcggctgccccagcctggacacattactgaaccctgtggtacagactgtgacctgaggtggcatgttgccagcaggagtgaatgtagtgcccagtgtggcttgggttaccgcacattggacatctactgtgccaaatatagcaggctggatgggaagactgagaaggttgatgatggtttttgcagcagccatcccaaaccaagcaaccgtgaaaaatgctcaggggaatgtaacacgggtggctggcgctattctgcctggactgaatgttcaaaaagctgtgacggtgggacccagaggagaagggctatttgtgtcaatacccgaaatgatgtactggatgacagcaaatgcacacatcaagagaaagttaccattcagaggtgcagtgagttcccttgtccacagtggaaatctggagactggtcagaggtaagatgggagggctgttatttcccctaggtcatctcttacattctagttctggtgctctctatctgtttaagacaaacccttgtgcacctttctcccacctctccctttctcccttgtctcccttgagaaaacaactccagttctctgcctgcaccatgactgtcgtactggatgtaactagtctaccagtgacctcagggcactttgggcttggctagatcactcactgttgtagcttctgttgtgattttgaagttgcagtccatcaccttccctcctctttgagccctagctaagtcactgaaaggaaatcatggatttattaatcataaagctatactagctcacatctgaagtcaacatgaagtttcctacttccttgtctttgaaataagagaattagaccccagggagtgacctctctgacttacccatccaactgcaagaaaaaaaaataaaactcggaaaaaaaaaaatgcttggtcacctgtggaaaagggcataagcaccgccaggtctggtgtcagtttggtgaagatcgattaaatgatagaatgtgtgaccctgagaccaagccaacatctatgcagacttgtcagcagccggaatgtgcatcctggcaggcgggtccctggggacagtgcagtgtcacttgtggacagggataccagctaagagcagtgaaatgcatcattgggacttatatgtcagtggtagatgacaatgactgtaatgcagcaactagaccaactgatacccaggactgtgaattaccatcatgtcatcctcccccagctgccccggaaacgaggagaagcacatacagtgcaccaagaacccagtggcgatttgggtcttggaccccatgctcagccacttgtgggaaaggtacccggatgagatacgtcagctgccgagatgagaatggctctgtggctgacgagagtgcctgtgctaccctgcctagaccagtggcaaaggaagaatgttctgtgacaccctgtgggcaatggaaggccttggactggagctcttgctctgtgacctgtgggcaaggtagggcaacccggcaagtgatgtgtgtcaactacagtgaccacgtgatcgatcggagtgagtgtgaccaggattatatcccagaaactgaccaggactgttccatgtcaccatgccctcaaaggaccccagacagtggcttagctcagcaccccttccaaaatgaggactatcgtccccggagcgccagccccagccgcacccatgtgctcggtggaaaccagtggagaactggcccctggggagcatgttccagtacctgtgctggcggatcccagcggcgtgttgttgtatgtcaggatgaaaatggatacaccgcaaacgactgtgtggagagaataaaacctgatgagcaaagagcctgtgaatccggcccttgtcctcagtgggcttatggcaactggggagagtgcactaagctgtgtggtggaggcataagaacaagactggtggtctgtcagcggtccaacggtgaacggtttccagatttgagctgtgaaattcttgataaacctcccgatcgtgagcagtgtaacacacatgcttgtccacacgacgctgcatggagtactggcccttggagctcgtgttctgtctcttgtggtcgagggcataaacaacgaaatgtttactgcatggcaaaagatggaagccatttagaaagtgattactgtaagcacctggctaagccacatgggcacagaaagtgccgaggaggaagatgccccaaatggaaagctggcgcttggagtcagtgctctgtgtcctgtggccgaggcgtacagcagaggcatgtgggctgtcagatcggaacacacaaaatagccagagagaccgagtgcaacccatacaccagaccggagtcggaacgcgactgccaaggcccacggtgtcccctctacacttggagggcagaggaatggcaagaatgcaccaagacctgcggcgaaggctccaggtaccgcaaggtggtgtgtgtggatgacaacaaaaacgaggtgcatggggcacgctgtgacgtgagcaagcggccggtggaccgtgaaagctgtagtttgcaaccctgcgagtatgtctggatcacaggagaatggtcagaggtaccgtcctgggaactgtaatgctcagtgacctgtggaaaaggctacaaacaaaggcttgtctcgtgcagcgagatttacaccgggaaggagaattatgaatacagctaccaaaccaccatcaactgcccaggcacgcagccccccagtgttcacccctgttacctgagggactgccctgtctcggccacctggagagttggcaactgggggagctgctcagtgtcttgtggtgttggagtgatgcagagatctgtgcaatgtttaaccaatgaggaccaacccagccacttatgccacactgatctgaagccagaagaacgaaaaacctgccgtaatgtctataactgtgagttaccccagaattgcaaggaggtaaaaagacttaaaggtgccagtgaagatggtgaatatttcctgatgattagaggaaagcttctgaagatattctgtgcggggatgcactctgaccaccccaaagagtacgtgacactggtgcatggagactctgagaatttctccgaggtttatgggcacaggttacacaacccaacagaatgtccctataacgggagccggcgcgatgactgccaatgtcggaaggattacacggccgctgggttttccagttttcagaaaatcagaatagacctgaccagcatgcagataatcaccactgacttacagtttgcaaggacaagcgaaggacatcccgtcccttttgccacagccggggattgctacagcgctgccaagtgcccacagggtcgttttagcatcaacctttatggaaccggcttgtctttaactgaatctgccagatggatatcacaagggaattatgctgtctctgacatcaagaagtcgccggatggtacccgagtcgtagggaaatgcggtggttactgtggaaaatgcactccatcctctggtactggcctggaggtgcgagttttatagctaaggtgctttgaagaggaagccattatggatggatgaaggatagtaatgcaatacctccaccttaatttgggtgcatgtgtatgtgtgtgtgtgtttgtgtgtgacttgtatgcttgtgtgtgtaaatgtgtgtacatatacatatatacatatctacacatacatatatacacatatatgtgtgtatgtagatatgtagactatcctaatgatgtaaagtttaatatttatgtttgaaattatttattgtgatgtaatatttttgtacgtaaaatgattctattatgactgcctttgcatgtagtaatatgacaaagtgatccttcattatcacggtacactattgtttacttttcatctgtaaatgttttattgttacttttttaaaatgaatttttttaaaacaatctagccatcatcaaggtgctataagagttgtataaaagatatttttggcatttctaggcaagtatcagccaataagtatgttagtgatatcacagattgtaccaactattaactatgttaaataagtattcagtttcatgtgatctctgggaaaaaaatatgctgccttggtgctaatattgtatgtatttaaatgatcatccgactcagaaatataaacacttttaatgaaagggaggaacggaaggacaatttccagtgcacagaatcacttggatgaaataagaccagctctttacccttatttttggatatgccttttttggaagagacttagactttatccttattgttgttagtgttgttaatattcgttgcttcagcccacggtgccttggtctctccacaatcaaatggaggatcccccaagcagcttcattacagagtgatattgggaaagtgagatcctctcaccattttgccaagatactctaaaatgacatccaagtttaccagtagaaagacacaggatgcacagaatgggcatgaccttcagctcacgagcacacctggagaaattcagaaccaggttctgaatcatcacgattgccttttgcatgaaaacatcggctggtgatgtgacttctcttcaggccatgagcctaacaccctgccggttttcatgcccgctgcagtaatggacgtttgtgtgaagaaatgaactgtggagtacaaaatgctttgagtctttccgattgctcattaattcacttttttgttacttctttccaaaatggaagtgctgaagccatggtctttctgcccctccaagctgatgaagggaagcctttgccaatggcccatggaagacacttggtttgagaaaccctgcccacttccaaagaccaaagagattaggaaaagcctggcagtattctccaactccaaacaagctctagagtgctccaggaaaagttatattcagtatatgaataagtgttattctccattattaatgtgttctgaaaatatattatgaataaatacatcaccacaccc

SEQ ID NO: 268 - DNA, 1585 bp, Homo sapiens
ggctctgcagaggcagcggttggaggcgcggtgggtgtctgcgggggtctcgcggggcggctgcggtgtttcaccgggaaaggctcgaggagagcgcggctcacgagagataacccagctgtgctccctggaaccttcaatttcaaggcctccctgcctctactaggcgccttagctcactatggggaaccacttgactgagatggcgcccactgcctcctccttcttgccccacttccaagccctgcatgtcgtggtcattgggctggactctgctggaaagacctccctcctttaccgcctcaagttcaaggagtttgtccagagtgtccccaccaaaggcttcaacaccgagaagatccgggtgcccctcgggggatcgcgtggcatcaccttccaagtgtgggacgtcggggggcaggagaagctgcgaccactgtggcgctcttatacccgccggacagacggtctagtgtttgtggtggacgctgcggaggctgagcggctggaggaagccaaggtggagttgcaccgaatcagccgggcctcggacaaccagggcgtgccagtgctggtgctggccaacaagcaggaccagcccggggcactgagcgctgctgaggtggagaagaggctggcagtccgagagctagcagccgccactctcactcatgtgcaaggctgcagcgctgtggacggtctgggcctgcagcagggccttgagcgcctctatgagatgatcctcaagaggaagaaggcagctcggggtggcaagaagagacggtgacccaagccccccctccctttcctcccacctagtaggggtctgcacacttggacagcagggtgggaccagcctgtgacctctcagtcagactggggtgcaggacctgtccacctcaatgaaggagagaggagcatggggtgtcccgttttggtgccacactggggtggggatgggagatgggatgtctttgcatatctctctcatcctctctggagaagtgggcgctgcaggactgtggagacgtaaatgtaaactgtgactctacctcgaccctgtttcttatttttcttctctggctaaaaatttttaattggatgtgtttgggggcggggggatggaagtgacttggagaatgtgtttgggatgaaataactatctccccttcctctgtcccccaactggggagtctccccaggctgcttttctaggaataccagtcacatagtttttatttttgtgtctgtgaaagtgccaagaacccctccccacatttgtagatccatgaccctttttataagctgtgtgtgtcctctgtattattgttattaactattttttagcatttgcctgtaagttattaaagactgataactgtagctcttaccttggtctggggcattttcctctccttatcttgccccagagacaattcaagatttctatatggggttgtggcgcagggggagggagatttatcttgaagctgaatttgcaaagcaagcacttataaaaattagattgtgtgttacgggatggcttgtgaaaattataggggggagtggaaaacccctcaagcta

SEQ ID NO: 269 - DNA, 6361 bp, Homo sapiens
gggaagccagacggttaacacagacaaagtgctgccgtgacactcggccctccagtgttgcggagaggcaagagcagcgaccgcggcacctgtccgcccggagctgggacgcgggcgcccgggcggccggacgaagcgaggagggaccgccgaggtgcgcgtctgtgcggctcagcctggcgggggacgcggggagaatgtggactgggtagagatgaacgagacttttctcagatgttggatatttgcttggaaaaacgtgtgggtacgaccttggctgcccccaagtgtaactccagcactgtgaggtttcagggattggcagaggggaccaaggggaccatgaaaatggacatggaggatgcggatatgactctgtggacagaggctgagtttgaagagaagtgtacatacattgtgaacgaccacccctgggattctggtgctgatggcggtacttcggttcaggcggaggcatccttaccaaggaatctgcttttcaagtatgccaccaacagtgaagaggttattggagtgatgagtaaagaatacataccaaagggcacacgttttggacccctaataggtgaaatctacaccaatgacacagttcctaagaacgccaacaggaaatatttttggaggcagtagcatcgcccatttgccattcactgcagtagcaaaagtagtactctgtggtgggttaatcggtttgaggcagctccttaaatgaacatttgtgtttcatttttctgttattttcccgaacatgaaaagacgataaaactgaaatggaaaagatctattccagaggggagcttcaccacttcattgacggctttaatgaagagaaaagcaactggatgcgctatgtgaatccagcacactctccccgggagcaaaacctggctgcgtgtcagaacgggatgaacatctacttctacaccattaagcccatccctgccaaccaggaacttcttgtgtggtattgtcgggactttgcagaaaggcttcactacccttatcccggagagctgacaatgatgaatctcagtaagtggattacagaacaaaaaaataaaaaatgccagtaatgtcggttctgcccctttgaactaataacatgttgtttaattatacggctttgtcatgtgttggatgaagtaggtggcttaagctagggactaggaagaggaaaaacattttttgagtccctattaactattaggaaacttgatcatttaaaagtatatatatatatgaggagctaccttgagttttgaattcaggatgttacaggaagaaatatatgtccaattctaatttatccaaaagcagttgggagaattacagggattggtccagacatgctgcgtatgcaaggtatagccctcatctgtggtactttggcagggcttagactgcatcaaaatatttatagatgtacatttgagtgtacagttaggatctgatgtggaacattgtaagatcattgctagaaaaactttgtcataatttttcaatattattctaagtgaataaccgtaaagattttacatcttagcttccttccttacagtaaaaaaactatctgatctcttgatcagtattatagtagccacctatcactttatcttaacaaattctcaattccttaggtttatgtgcttttacttcttttatttgattaaaattgctgtcatgacctctctctgcagagggctgcatcattttggtcattctcaagtgatctctttgagcaatttaagaattgccataagattctaacctctgctgtaactatggttgtgtgttcttggttagaccactaaatcttattagcagttttaaaaattattccttttggtttagaagttaagactaaatgctgaagtttttgtaacttttggttttgatatcatttcaaacttaagaaaacatttgaagaaaaggacaaagaatttccacttaccctttacccaggtttaccagttattgataagtatatccatttgctttaccagaaggctaacttgttttagttctcattttcacctttgagacatttggaataaatatcaatgttaacataaacacaaacacagagcagtctaaagcaaccgagcactgagaaaaatgaactctgcccaaagaatgtcccaaagagagagtacagcgtgaaagaaatcctaaaattggactccaacccctccaaaggaaaggacctctaccgttctaacatttcacccctcacatcagaaaaggacctcgatgactttagaagacgtgggagccccgaaatgcccttctaccctcgggtcgtttaccccatccgggcccctctgccagaagactttttgaaagcttccctggcctacgggatcgagagacccacgtacatcactcgctcccccattccatcctccaccactccaagcccctctgcaagaagcagccccgaccaaagcctcaagagctccagccctcacagcagccctgggaatacggtgtcccctgtgggccccggctctcaagagcaccgggactcctacgcttacttgaacgcgtcctacggcacggaaggtttgggctcctaccctggctacgcacccctgccccacctcccgccagctttcatcccctcgtacaacgctcactaccccaagttcctcttgcccccctacggcatgaattgtaatggcctgagcgctgtgagcagcatgaatggcatcaacaactttggcctcttcccgaggctgtgccctgtctacagcaatctcctcggtgggggcagcctgccccaccccatgctcaaccccacttctctcccgagctcgctgccctcagatggagcccggaggttgctccagccggagcatcccagggaggtgcttgtcccggcgccccacagtgccttctcctttaccggggccgccgccagcatgaaggacaaggcctgtagccccacaagcgggtctcccacggcgggaacagccgccacggcagaacatgtggtgcagcccaaagctacctcagcagcgatggcagcccccagcagcgacgaagccatgaatctcattaaaaacaaaagaaacatgaccggctacaagacccttccctacccgctgaagaagcagaacggcaagatcaagtacgaatgcaacgtttgcgccaagactttcggccagctctccaatctgaaggtccacctgagagtgcacagtggagaacggcctttcaaatgtcagacttgcaacaagggctttactcagctcgcccacctgcagaaacactacctggtacacacgggagaaaagccacatgaatgccaggtctgccacaagagatttagcagcaccagcaatctcaagacccacctgcgactccattctggagagaaaccataccaatgcaaggtgtgccctgccaagttcacccagtttgtgcacctgaaactgcacaagcgtctgcacacccgggagcggccccacaagtgctcccagtgccacaagaactacatccatctctgtagcctcaaggttcacctgaaagggaactgcgctgcggccccggcgcctgggctgcccttggaagatctgacccgaatcaatgaagaaatcgagaagtttgacatcagtgacaatgctgaccggctcgaggacgtggaggatgacatcagtgtgatctctgtagtggagaaggaaattctggccgtggtcagaaaagagaaagaagaaactggcctgaaagtgtctttgcaaagaaacatggggaatggactcctctcctcagggtgcagcctttatgagtcatcagatctacccctcatgaagttgcctcccagcaacccactacctctggtacctgtaaaggtcaaacaagaaacagttgaaccaatggatccttaagattttcagaaaacacttattttgtttcttaagttatgacttggtgagtcagggtgcctgtaggaagtggcttgtacataatcccagctctgcaaagctctctcgacagcaaatggtttcccctcacctctggaattaaagaaggaactccaaagttactgaaatctcagggcatgaacaaggcaaaggccatatatatatatatatatatatctgtatacatattatatatacttatttacacctgtgtctatatatttgcccctgtgtattttgaatatttgtgtggacatgtttgcatagccttcccattactaagactattacctagtcataattattttttcaatgataatccttcataatttattatacaatttatcattcagaaagcaataattaaaaaagtttacaatgactggaaagattccttgtaatttgagtataaatgtatttttgtcttgtggccattctttgtagataatttctgcacatctgtataagtacctaagatttagttaaacaaatatatgacttcagtcaacctctctctctaataatggtttgaaaatgaggtttgggtaattgccaatgttggacagttgatgtgttcattcctgggatcctatcatttgaacagcattgtacataacttgggggtatgtgtgcaggattacccaagaataacttaagtagaagaaacaagaaagggaatcttgtatatttttgttgatagttcatgtttttcccccagccacaattttaccggaagggtgacaggaaggctttaccaacctgtctctccctccaaaagagcagaatcctcccaccgccctgccctccccaccgagtcctgtggccattcagagcggccacatgacttttgcatccattgtattatcagaaaatgtgaagaagaaaaaaatgccatgttttaaaaccactgcgaaaatttccccaaagcataggtggctttgtgtgtgtgcgatttgggggcttgagtctgggtggtgttttgttgttggtttttgttgctttttttttttttttttttttaatgtcaaaattgcacaaacatggtgctctaccaggaaggattcgaggtagataggctcaggccacactttaaaaacaaacacacaaacaacaaaaaacgggtattctagtcatcttggggtaaaagcgggtaatgaacattcctatccccaacacatcaattgtattttttctgtaaaactcagattttcctcagtatttgtgtttttacattttatggttaatttaatggaagatgaaagggcattgcaaagttgttcaacaacagttacctcattgagtgtgtccagtagtgcaggaaatgatgtcttatctaatgatttgcttctctagaggagaaaccgagtaaatgtgctccagcaagatagactttgtgttattctatcttttattctgctaagcccaaagattacatgttggtgttcaaagtgtagcaaaaaatgatgtatatttataaatctatttataccactatatcatatgtatatatatttataaccacttaaattgtgagccaagccatgtaaaagatctactttttctaagggcaaaaaaaaaaaaaaaaaaaaaagaacactcctttctgagactttgcttaatacttggtgacctcacaatcacgtcggtatgattgggcacccttgcctactgtaagagaccctaaaaccttggtgcagtggtggggaccacaaaacaaccagggaggaagagatacatcattttttagtattaaggaccatctaagacagctctattttttttttgccactttatgattatgtggtcacacccaagtcacagaaataaaaaactgactttaccgctgcaatttttctgttttcctccttactaaatactgatacattactccaatctattttataattatatttgacattttgttcacatcaactaatgttcacctgtagaagagaacaaatttcgaataatccagggaaacccaagagccttactggtcttctgtaacttccaagactgacagctttttatgtatcagtgtttgataaacacagtccttaactgaaggtaaaccaaagcatcacgttgacattagaccaaatacttttgattcccaactactcgtttgttctttttctccttttgtgctttcccatagtgagaatttttataaagacttcttgcttctctcaccatccatccttctcttttctgcctcttacatgtgaatgttgagcccacaatcaacagtggttttattttttcctctactcaaagttaaaactgaccaaagttactggctttttactttgctagaacaacaaactatcttatgtttacatactggtttacaatgttatttatgtgcaaattgtcaaaatgtaaattaaatataaatgttcatgctttaccaaaat

SEQ ID NO: 270 - DNA, 1553 bp, Homo sapiens
agatgccccacagcactgctcttccagaggcaagaccaaccaagatgaggtgtatgcatgtgtgtgtgtgtgtgtgtacatgcatgtgtgtgtggatgcatgcatgtgctgtgaagcagggagactagctttccactcctccttgtcttctctctgcagtgccctgggagctgtcattgccctcctgctctggggacagctttttgcagtggactcaggcaatgatgtcacggatatcgcaggaaggagatatgacggctgcccgaagccccccgagattgcacatggctatgtggagcactcggttcgctaccagtgtaagaactactacaaactgcgcacagaaggagatgggagtatacaccttaaatgataagaagcagtggataaataaggctgttggagataaacttcctgaatgtgaagcagatgacggctgcccgaagccccccgagattgcacatggctatgtggagcactcggttcgctaccagtgtaagaactactacaaactgcgcacagaaggagatggagtgtacaccttaaacaatgagaagcagtggataaataaggctgttggagataaacttcctgaatgtgaagcagtatgtgggaagcccaagaatccggcaaacccagtgcagcggatcctgggtggacacctggatgccaaaggcagctttccctggcaggctaagatggtttcccaccataatctcaccacaggtgccacgctgatcaatgaacaatggctgctgaccacggctaaaaatctcttcctgaaccattcagaaaatgcaacagcgaaagacattgcccctactttaacactctatgtggggaaaaagcagcttgtagagattgagaaggttgttctacaccctaactactcccaggtagatattgggctcatcaaactcaaacagaaggtgtctgttaatgagagagtgatgcccatctgcctaccttcaaaggattatgcagaagtagggcgtgtgggttatgtttctggctgggggcgaaatgccaattttaaatttactgaccatctgaagtatgtcatgctgcctgtggctgaccaagaccaatgcataaggcattatgaaggcagcacagtccccgaaaagaagacaccgaagagccctgtaggggtgcagcccatactgaatgaacacaccttctgtgctggcatgtctaagtaccaagaagacacctgctatggcgatgcgggcagtgcctttgccgttcacgacctggaggaggacacctggtatgcgactgggatcttaagctttgataagagctgtgctgtggctgagtatggtgtgtatgtgaaggtgacttccatccaggactgggttcagaagaccatagctgagaactaatgcaaggctggccggaagcccttgcctgaaagcaagatttcagcctggaagagggcaaagtggacgggagtggacaggagtggatgcgataagatgtggtttgaagctgatgggtgccagccctgcattgctgagtcaatcaataaagagctttcttttgacccattt

SEQ ID NO: 271 - DNA, 6564 bp, Homo sapiens
tgctgccatgtgccgctgccacgggtacccagcctgtcgctaaactttccgggcgccagcccggctctgagtcgcgcttctcagcggagtgacccagggacggaggacccaggctggctggggactgtctgctcttctcggcgggatccgtggagagtcctttccctggaatccgagccctaaccgtctctccccagccctatccggcgaggagcggagcgctgccagcggaggcagcgccttcccgaagcagtttatctttggacggttttctttaaaggaaaaagcaaccaacaggttgccagccccggcgccacacacgagacgccggagggagaagccccggcccggattcctctgcctgtgtgcgtccctcgcgggctgctggaggcgaggggagggagggggcgatggctcggcctgacccatccgcgccgccctcgctgttgctgctgctcctagcgcagctggtgggccgggcggccgccgcgtccaaggccccggtgtgccaggaaatcacggtgcccatgtgccgcggcatcggctacaacctgacgcacatgcccaaccagttcaaccacgacacgcaggacgaggcgggcctggaggtgcaccagttctggccgctggtggagatccaatgctcgccggacctgcgcttcttcctatgctctatgtacacgcccatctgtctgcccgactaccacaagccgctgccgccctgccgctcggtgtgcgagcgcgccaaggccggctgctcgccgctgatgcgccagtacggcttcgcctggcccgagcgcatgagctgcgaccgcctcccggtgctgggccgcgacgccgaggtcctctgcatggattacaaccgcagcgaggccaccacggcgccccccaggcctttcccagccaagcccacccttccaggcccgccaggggcgccggcctcggggggcgaatgccccgctgggggcccgttcgtgtgcaagtgtcgcgagcccttcgtgcccattctgaaggagtcacacccgctctacaacaaggtgcggacgggccaggtgcccaactgcgcggtaccctgctaccagccgtccttcagtgccgacgagcgcacgttcgccaccttctggataggcctgtggtcggtgctgtgcttcatctccacgtccaccacagtggccaccttcctcatcgacatggaacgcttccgctatcctgagcgccccatcatcttcctgtcagcctgctacctgtgcgtgtcgctgggcttcctggtgcgtctggtcgtgggccatgccagcgtggcctgcagccgcgagcacaaccacatccactacgagaccacgggccctgcactgtgcaccatcgtcttcctcctggtctacttcttcggcatggccagctccatctggtgggtcatcctgtcgctcacctggttcctggccgccggcatgaagtggggcaacgaggccatcgcgggctacgcgcagtacttccacctggctgcgtggctcatccccagcgtcaagtccatcacggcactggcgctgagctccgtggacggggacccagtggccggcatctgctacgtgggcaaccagaacctgaactcgctgcgcggcttcgtgctgggcccgctggtgctctacctgctggtgggcacgctcttcctgctggcgggcttcgtgtcgctcttccgcatccgcagcgtcatcaagcagggcggcaccaagacggacaagctggagaagctcatgatccgcatcggcatcttcacgctgctctacacggtccccgccagcattgtggtggcctgctacctgtacgagcagcactaccgcgagagctgggaggcggcgctcacctgcgcctgcccgggccacgacaccggccagccgcgcgccaagcccgagtactgggtgctcatgctcaagtacttcatgtgcctggtggtgggcatcacgtcgggcgtctggatctggtcgggcaagacggtggagtcgtggcggcgtttcaccagccgctgctgctgccgcccgcggcgcggccacaagagcgggggcgccatggccgcaggggactaccccgaggcgagcgccgcgctcacaggcaggaccgggccgccgggccccgccgccacctaccacaagcaggtgtccctgtcgcacgtgtaggaggctgccgccgagggactcggccggagagctgaggggaggggggcgttttgtttggtagttttgccaaggtcacttccgtttaccttcatggtgctgttgccccctcccgcggcgacttggagagagggaagaggggcgttttcgaggaagaacctgtcccaggtcttctccaaggggcccagctcacgtgtattctattttgcgtttcttactgccttctttatgggaaccctctttttaatttatatgtatttttcttaatttgtaactttgttgcattttggcaacaatttacctttgctttgggggctttacaatcctaaggttggcgttgtaatgaagttccacttggttcaggtttctttgaactgtgtggtctcaattgggaaaatatatttcctatacgtgtgtctttaaaaaaaaatgtgaacagtgaacgtttcggttgctgtgactgggaagttgttgggtgtgctttttcagccagcttctccttccactgcttaaagtgtccatgattctttaaggtgagctgcagtttatagccccaggtcatacctaggaggggagcataatgagctcagggcctccccaaagtgacaaggttagggagtgcttagcggttttgtgttcagccttagctttgtttatagagggaggttcagtttcttttctgtagtgcttgtaataattctcactcctaacagcaccatcgttgtgtcttgaataagttagaggtagcattatagaggatctggcataaatatttgcagtagtgagagcctaagcgatggtgattggtggagcttgaattttaggctggtgagatggcagctttgtgcctgagaggtagtgggtggttcttaagcttcagtgatcccctttttttttttttttttttttttttaaggaacttgtgttataattttggtaaaagtataaacccactccctctggacaatacttagcgacagttgctaaagggggctcctttttaaatgtaaggactgaaatggatatacttctaataagtaaatttccaacacttatttgctccaccccctcccccctcccccctccccctttatcatgttaaacagcctttttgcttttcttattcctcctctcctggagagctgtgattagaaaccacacccacccttgaatgaagtgcttgaactgggggagggaggctggctacctgtgaacaaacattggcccaaataagggaaaataagtgttcctggactttggactagtttatagccagatattccaagagcagcaagacgttgctctctgccgtctctgaaaacaaaagagatgcataacatgcttgcacaaccttttaaaatatagatcagtatagtgctacctctatagttttcttcctcttctgagaaagcctgtatattgatgatcacacacacacacactttgcaattagagaatttggtttgctttactaatctgtttaactattccttcattcattatgaacgcttatattgatgaacatacacacagaggtttctttgctattagaaaattctgtttgctttcctaatctgtttaagcattcattcatgaagagtgtggggccattactggggaaggggggtgacagtgcctcagccagcaaaataccaatgaccaggattggggactaaatttaggaagctaaaatggccagagcaattaacatttgagaaaatcctgtctaggaaaacaacttgagtgtaggcatttgtaattcacttataccaaagttggaaaagtaaaatttaagcctaggacaatttttacttcatggatgttaaatagacaaatgcatagttcccagggggaatttaaacactttactggtgggaagaaacctagtattaaagttgtaaggactctcaaaaacttcacatttattaaaatgcactgctcttacccaatttatcctctgaattaaaatttcagtggattctacaaaacctcgtacaaatagctacagaactttgtgcctattttattcctctatttattcttctaggaagaagcctcttcctagaatcttgaaatagatcccttgactgaatgccaattcctctcctgtttttcaaatgagagaaccttttctgatcaccttgaccttttccctcatttcatatgtcttcccagaaagtagacagactgctctgctgccttcagtcattgtgcctcatttgggttgtccctccttctttgtggagaaatctggaaatgatgcacagtgtatccaaaagttgtgggatgaagtggatgaaagtgatttaattcatttttagaatttttttttgttttgttttagcaacatgctgaacaactaatttactttaaaaataagccagttaaaacaaaggacgctaagcccaagtggggggcaatattagtcaggatctttggggtctaattccagaccaactttcagaagcacttctttgtctctgttctcacctctgctgtccctctcttccctcatcccctaagagagacaaagataaaagcccacctgcatccctaagtcttactgagatcagccaccccaggggagagaaactggatctacttacagccaccccctgtttccatccatatagttacttcccccaatttgcatgtgattatggaaacaagtcatgctcatgaaagcaactgtaaaataaaaggttatggagtagttcagcaacttcttcacagccagctttgtggagctggggaggacttagggcccattggagtctcttatgtgtacagcttcagggctgtccctttcagtttgattttaagcaatgcctcacttcatagcttagggggtaaggattccattcaggtaggttgtctaaaggaactaatgggacctctcagtgaattagctgaccagattttaggaaatctttttaatttctatgattttccttctcacattttgaaatggtaaaattgactggaaataatttttcttggtgccttattggttttccttgcaaacctttctcatattttctcatgaccattgccagtgaccaaggcccatgtgtgtgttgtgtgtaattgtgggcatgtacaagcttaaataacgtgccgacagcactgtttcaaagttggtattcattaggctgttgcctcctgggctggagctgcgctaatcctgacaccggctgccaggagaaaacctcatggatcacacaccaaaccttaataacagcatccgtgacctgcactctccagtacagaatgggaaccccagagctaggaaatgtagttgtatattttaatgaactgctaccccagccaaagaagcttctttcacttttgtgctctacagaaagcccaaggggggtaggagggacagagctttgaataactgctttctaacactaaatgtggccaacaggacagagcacatcacacgtataggcaggtgtgagggacagtggctaagaattgcctgctccctctgcatgctctttcttgtttccaaagtccaatcaagtgatcctgggaaacaaatctgtctggattgcggagggtggttctgaaagaactgccaagacgttaaagaagggtgaagagtaggcagaatataagtagctaacctgagtcaagactctcaaaagctagcagcctgatgacaataggatttatttcagccaggatagtgtctgtctgtgagtgcatcattttaagacagtatgacttcatgttgttacaaactatgtatagtatgtatgttttgtgggttgtatatatacataatatatattatatatatatatgagagatttggtgacttttgatacgggtttggtgcaggtgaatttattactgagccaaatgaggcacataccgagtcagtagttgaagtccagggcattcgatactgtttatgatttccatatatgtatagtgcctatcccatgctgtagtcactgttatgttaaatccagaagttacactagagccagcgatactttatttgtagacaatcaatttgaatccatatgttattactggcagatgatacatgattacagttctgaatctgtaacacttacaaaaggaaacccagagcagcttgatgagtttttgtttctgcttcgttcctgggagtcagtagaaacagcagttgtatgtggttatgttagtctcaagatacttaatttgttgaccttacttcagaaaaattttgtatgtattatatttgtgggaaggtaaaataatcatttgagatttttatcaaatatgaagattagttatttatgaaaaacaaagaaatgtctatttttctttgttcccaattaatgtagataaattttaaaatgcattaaagtaatggtaaagacaataaaaagatgctgtagaa

SEQ ID NO: 272 - DNA, 539 bp, Homo sapiens
atccaggtgagactgggagagcacaacatcgaagtcctagaggggaatgaacagttcatctatgcggtcaagatcatccgccaccccaaatacaacagctggactctggacaatgacatcctgctgatcaagctctccacacctgccatcatcaatgcccatgtgtccaccatctctctgcccaccacccctccagctgctggcactgagtgcctcatctctggctggggcaacactctgagttctggcgccgactacccagacgagctgcagtgcctggatgctcctgtgctgagccaggctgagtatgaagcctcctaccctggaaagattaccaacaacgtgttttgtgtgggtttccttgagggaggcaaggattcctgccagggtgactctggtggcccagtggtctgcaatagacagctccaaggaattgtctcctggggctatggctggcccagaaaaacaggcctggagtctacaccaaggtctacaactatgtggactggattaaggacaccatagctgccaacagctaa

SEQ ID NO: 273 - DNA, 2379 bp, Homo sapiens
gctagtgcaaatcttcaggggccgtccaggactacagagctgtttcaccctaccttggcttcaatctcttcccccatgctcgaaggtgcggagctgtacttcaacgtggaccatggctacctggagggcctggttcgaggatgcaaggccagcctcctgacccagcaagactatatcaacctggtccagtgtgagaccctagaagacctgaaaattcatctccagactactgattatggtaactttttggctaatcacacaaatcctcttactgtttccaaaattgacactgagatgaggaaaagactatgtggagaatttgagtatttccggaatcattccctggagcccctcagcacatttctcacctatatgacgtgcagttatatgatagacaatgtgattctgctgatgaatggtgcattgcagaaaaaatctgtgaaagaaattctggggaagtgccaccccttgggccgtttcacagaaatggaagctgtcaacattgcagagacaccttcagatctctttaatgccattctgatcgaaacgccattagctccattcttccaagactgcatgtctgaaaatgctctagatgaactgaatattgaattgctacgcaataaactatacaagtcttaccttgaggcattctataaattctgtaagaatcatggtgatgtcacagcagaagttatgtgtcccattcttgagtttgaggccgacagacgtgcttttatcatcactcttaactcctttggcactgaattgagcaaagaagaccgagagaccctctatccaaccttcggcaaactctatcctgaggggttgcggctgttggctcaagcagaagactttgaccagatgaagaacgtagcggatcattacggagtatacaaacctttatttgaagctgtaggtggcagtgggggaaagacattggaggacgtgttttacgagcgtgaggtacaaatgaatgtgctggcattcaacagacagttccactacggtgtgttttatgcatatgtaaagctgaaggaacaggaaattagaaatattgtgtggatagcagaatgtatttcacagaggcatcgaactaaaatcaacagttacattccaattttataacccaagtaaggttctcaaatgtagaaaattataaatgttaaaaggaagttattgaagaaaataaaagaaattatgttatattatctagactacacaaaagtaagccacactatatcttcatgagttgcaaatccatggaaacacagtaaaccagccctgaaacaaagcatttccttgttttcagtggtattagatcttgtttccacatgtctgtctcattcttcactgggccttacaggttagttttaattaactctatggtatttttcttattcttgtttgatcatgttaaaaattggacctaataaaagtattttattcttgcttttccatgcttctctacaggtccaaatactgaatgtctcctttactttttctcttttaaatttttttctagacagggtctcactctgtcacctaggctacagtgcagtggtgtgatcacagctcactgcagcctcgacttcccaggctcaagtgatcctcccagctctcagcctccaaagtagctggcactacaagtgtacacccccacacaaggctaagttttgtattttttgtagagacagggtttcaacatattatccaggctggtgtcgaattcctgggctccagggatccacagtcccccttggcctcccaaagtgttgggattacatgcatgagccactgtgctgggcttcatttacattttaactgtctgttccttgcctagattcacagaaatccaaagctgtatgtagtcaacatggttcacaagtgttggaaaatgtgttttttgttttgttttgttttgtttcgttttgttttgagacagagtttccctctgtcgcccaggctagagtgcaatggcgtgatctcggctcactgcaacctccacctcccagattcaagcaactctctgcctcagcctcccgagtagctgggattacaagcacccaccactacactcagctaattttttgtatttttagtagagccggggtttcaccatcttggccaggctgatcttgaactcctgagctcatgatccacccgcctcagcctcccaaagtgctgggattacaggccccttgttcagccactgcacctggccccttattttgtttttgttttctaatatactttgatgtaatcagcttgagaaagcaacacaatttcaaatcctatcttctagatgcaagcagtgttaaatttgttaataaatttgcttttcacacctttctttaaataaaaggtatatctctcttt

SEQ ID NO: 274 - DNA, 5416 bp, Homo sapiens
ctggttggagggcaggcattctgctctgatttttcctgttgcctggctagtgaccccctacaggaagataacggctaagccaggagggcggagcagcccactacacatgtctggctgctcttatcaacttatcatataaggaaaggaaagtgattgattcggatactgacactgtaggatctggggagagaggaacaaaggaccgtgaaagctgctctgtaaaagctgacacagccctcccaagtgagcaggactgttcttcccactgcaatctgacagtttactgcatgcctggagagaacacagcagtaaaaaccaggtttgctactggaaaaagaggaaagagaagactttcattgacggacccagccatggcagcgtagcagccctgcgttttagacggcagcagctcgggactctggacgtgtgtttgccctcaagtttgctaagctgctggtttattactgaagaaagaatgtggcagattgttttctttactctgagctgtgatcttgtcttggccgcagcctataacaactttcggaagagcatggacagcataggaaagaagcaatatcaggtccagcatgggtcctgcagctacactttcctcctgccagagatggacaactgccgctcttcctccagcccctacgtgtccaatgctgtgcagagggacgcgccgctcgaatacgatgactcggtgcagaggctgcaagtgctggagaacatcatggaaaacaacactcagtggctaatgaagcttgagaattatatccaggacaacatgaagaaagaaatggtagagatacagcagaatgcagtacagaaccagacggctgtgatgatagaaatagggacaaacctgttgaaccaaacagcggagcaaacgcggaagttaactgatgtggaagcccaagtattaaatcagaccacgagacttgaacttcagctcttggaacactccctctcgacaaacaaattggaaaaacagattttggaccagaccagtgaaataaacaaattgcaagataagaacagtttcctagaaaagaaggtgctagctatggaagacaagcacatcatccaactacagtcaataaaagaagagaaagatcagctacaggtgttagtatccaagcaaaattccatcattgaagaactagaaaaaaaaatagtgactgccacggtgaataattcagttcttcagaagcagcaacatgatctcatggagacagttaataacttactgactatgatgtccacatcaaactcagctaaggaccccactgttgctaaagaagaacaaatcagcttcagagactgtgctgaagtattcaaatcaggacacaccacgaatggcatctacacgttaacattccctaattctacagaagagatcaaggcctactgtgacatggaagctggaggaggcgggtggacaattattcagcgacgtgaggatggcagcgttgattttcagaggacttggaaagaatataaagtgggatttggtaacccttcaggagaatattggctgggaaatgagtttgtttcgcaactgactaatcagcaacgctatgtgcttaaaatacaccttaaagactgggaagggaatgaggcttactcattgtatgaacatttctatctctcaagtgaagaactcaattataggattcaccttaaaggacttacagggacagccggcaaaataagcagcatcagccaaccaggaaatgattttagcacaaaggatggagacaacgacaaatgtatttgcaaatgttcacaaatgctaacaggaggctggtggtttgatgcatgtggtccttccaacttgaacggaatgtactatccacagaggcagaacacaaataagttcaacggcattaaatggtactactggaaaggctcaggctattcgctcaaggccacaaccatgatgatccgaccagcagatttctaaacatcccagtccacctgaggaactgtctcgaactattttcaaagacttaagcccagtgcactgaaagtcacggctgcgcactgtgtcctcttccaccacagagggcgtgtgctcggtgctgacgggacccacatgctccagattagagcctgtaaactttatcacttaaacttgcatcacttaacggaccaaagcaagaccctaaacatccataattgtgattagacagaacacctatgcaaagatgaacccgaggctgagaatcagactgacagtttacagacgctgctgtcacaaccaagaatgttatgtgcaagtttatcagtaaataactggaaaacagaacacttatgttatacaatacagatcatcttggaactgcattcttctgagcactgtttatacactgtgtaaatacccatatgtcctgaattcaccatcactatcacaattaaaaggaagaaaaaaactctctaagccataaaaagacatattcagggatattctgagaaggggttactagaagtttaatatttggaaaaacagttagtgcatttttactccatctcttaggtgctttaaatttttatttcaaaaacagcgtatttacatttatgttgacagcttagttataagttaatgctcaaatacgtatttcaaatttatatggtagaaacttccagaatctctgaaattatcaacagaaacgtgccattttagtttatatgcagaccgtactatttttttctgcctgattgttaaatatgaaggtatttttagtaattaaatataacttattaggggatatgcctatgtttaacttttatgataatatttacaattttataatttgtttccaaaagacctaattgtgccttgtgataaggaaacttcttacttttaatgatgaggaaaattatacatttcattctatgacaaagaaactttactatcttctcactattctaaaacagaggtctgttttctttcctagtaagatatatttttatagaactagactacaatttaatttctggttgagaaaagccttctatttaagaaatttacaaagctatatgtctcaagattcacccttaaatttacttaaggaaaaaaataattgacactagtaagtttttttatgtcaatcagcaaactgaaaaaaaaaaaagggtttcaaagtgcaaaaacaaaatctgatgttcataatatatttaaatatttaccaaaaatttgagaacacagggctgggcgcagtggctcacacctataatcccagtacattggtaggcaaggtgggcagatcacctgaggtcaggagttcaagaccagcctggacaacatggtgaaaccctgtctctactaaataatacaaaaattagccaggcgtgctggcgggcacctgtaatcccagctactcgggaggctgaggcagggagaattgcttgcaccagggaggtagaggttgcagtgagccaagatcgcaccactgcactccagccggggcaacagagcaagactccatctcaaaaaaaaaaaaaaaaaaagaaagaaaagaaaatttgagaacacagctttatactcgggactacaaaaccataaactcctggagttttaactccttttgaaattttcatagtacaattaatactaatgaacatttgtgtaaagctttataatttaaaggcaatttctcatatattcttttctgaatcatttgcaaggaagttcagagtccagtctgtaactagcatctactatatgtctgtcttcaccttacagtgttctaccattattttttctttattccatttcaaaatctaatttattttaccccaacttctccccaccacttgacgtagttttagaacacacaggtgttgctacatatttggagtcaatgatggactctggcaaagtcaaggctctgttttatttccaccaaggtgcacttttccaacaactatttaactagttaagaacctccctatcttagaactgtatctactttatatttaagaaggttttatgaattcaacaacggtatcatggccttgtatcaagttgaaaaacaactgaaaataagaaaatttcacagcctcgaaagacaacaacaagtttctaggatatctcaatgacaagagtgatggatacttaggtagggaaacgctaatgcaggaaaaactggcaacaacacaatttatatcaattctctttgtaggcaggtgataaaaaattcaaggacaaatctcattatgtcattgtgcatcatatataatctcttatgagcgagaatggggggaatttgtgtttttactttacacttcaattccttacacggtatttcaaacaaacagttttgctgagaggagcttttgtctctccttaagaaaatgtttataaagctgaaaggaaatcaaacagtaatcttaaaaatgaaaacaaaacaacccaacaacctagataactacagtgatcagggagcacagttcaactccttgttatgttttagtcatatggcctactcaaacagctaaataacaacaccagtggcagataaaaatcaccatttatctttcagctattaatcttttgaatgaataaactgtgacaaacaaattaacatttttgaacatgaaaggcaacttctgcacaatcctgtatccaagcaaactttaaattatccacttaattattacttaatcttaaaaaaaattagaacccagaacttttcaatgaagcatttgaaagttgaagtggaatttaggaaagccataaaaatataaatactgttatcacagcaccagcaagccataatctttatacctatcagttctatttctattaacagtaaaaacattaagcaagatataagactacctgcccaagaattcagtcttttttcatttttgtttttctcagttctgaggatgttaatcgtcaaattttctttggactgcattcctcactactttttgcacaatggtctcacgttctcacatttgttctcgcgaataaattgataaaaggtgttaagttctgtgaatgtctttttaattatgggcataattgtgcttgactggataaaaacttaagtccacccttatgtttataataatttcttgagaacagcaaactgcatttaccatcgtaaaacaacatctgacttacgggagctgcagggaagtggtgagacagttcgaacggctcctcagaaatccagtgacccaattctaaagaccatagcacctgcaagtgacacaacaagcagatttattatacatttattagccttagcaggcaataaaccaagaatcactttgaagacacagcaaaaagtgatacactccgcagatctgaaatagatgtgttctcagacaacaaagtcccttcagaatcttcatgttgcataaatgttatgaatattaataaaaagttgattgagaaaaa

SEQ ID NO: 275 - DNA, 4866 bp, Homo sapiens
ggggctagggggtggggctgcagccgggacggggccttcggcagggcctgcgggggcgggacggagcggacccgagtgatacccgggagactagcttggccacaggagacaacgttgaggtacagacagaacaggattattcaagatcaggttgtagccattttcaacaaggatcactgatcaaaattttctttttacaaagagatttacaagttaaacatgaagggaaaatactggaatcatttggattctgacaggataaagaatacaatatttcacatttacttgtaatggaacctttgtaagattcatcacttgtcattcacccagttgggaacatggatgttggtttttctcgtactactgttcagacactgtcaagaagccactgcaaaaacatcaaacaaaaaatttctcaatgggaaggaagggctaatggtatatctaatccagaaaagtggtgtccaaaggactttggagtgagatataactgtcaccaagagatccgtcttaagaaaaatcctatagctgagagaaagagcaaaaacttggatgtaaccagccgtgaaaatgtgggtctagatataaatgaaaataccaaaagccatgatcaaagtgagaatgaaaataagaaacatgaatatgacgatacacacttctttaaaaatgaatcagaatccaactgggtatgttctcgggtcaaagaaattgaaagctgtaaagaagatgtcttagatccagagacttcattacctccaggaaacttctatacctcacaaatactgtggaagaaaatagaagcacttcccccagataaactcttaaatttggctttagaacattgtgactcttcagaaaaagaactgaacttcagagttctggatagttcatacggaataaccaagagcttagaaaatatttactctgaacctgaggggcaagaatgtggaccttccataaatcctttgccaaaacctcgtaggacattcagatatttatccgaatctggtgttacgccgtataaagaaagaaactgtgacaaaaaatactgtgaaaataactcttgtgcacaatcttctttggcctcttctcaggaacctgaaccaaagaaatatggtggaaaaatcagaggaagatctaaaaggaaatcctttgaatttgaggatattcagcactttcgaaatcggaactcacagacgattcgtgaagaacttggaagaaattctgggtcagcactttattacacacagtctgaggacaatatctatgaagatatcatatatcccaccaaagaaaatccatatgaagatattccagtgcagcctttacctatgtggagatccccttcagcatggaagctaccacccgctaaaagtgcttttaaagcacccaagctccctccaaaacctcagttccttcaccggaagactatggaagtaaagaactcacaggcttatttgcggtcaaagcttacaaaagatacaactttgccggtcactttaacggaatggaagcttttccgagctggtgaagttgcaaacacgaaaaggaaaaatcttccaaggcttgtattgaaaatagatgacatatttgaatctaaaagagggaagaagaaggtaaagttacattcttacactggaaaggaattacctccgacaaaaggtgaaaccagtgggaacgaaagtgatgccgagtatctgccaaagaatcgccataaacgcttagcacaactgcaaccgtcttccaagaggaatcctcactaccagaccttggagcgggatcttattgaattacaggagcagcagctgtttgaactttttgtggtggtgtctctacagaagaaaccatcaggaataagctatattccccaggtcatacaacaattccctggcaaggatgatcatggctataagcagtccaaagacatggaagagagacttaaagttattccaaaattttgttttcctgattcaaaggactggatgccaacctcagaactcaagagtgaaacattctcctttgtcttgactggtgaagatggaagccggtggtttggttactgtaagaagctcttgccagtaggcaaaggaaagcgactccctgaggtatactgcatggttagtcgcctaggctgcttcaatcttttttcaaagattctggatgaagtagagaagagaagagaaatgtctccagcccttgtttacccattcatgcgaagtgtcatggaagctcctttcccagctcctggacgcaccatcacagttaagagttacctccctggggctggagatgagtccattgaactctgccgaccactagattcccgattggaacatgttgattttaaatgtctctttaagtgcctgagtgtgtgtcatctcatccgggtctgtgcctctctccttttggagcgtagggtaatctttgttgccaacagcctaagcaccctgtcaaaatgtggccatgctgtggtagctacactgtatccgttcacctggcagcatacctatatcccagtcctgccagcatctatgattgacatcgtgtgctcacctacaccattccttattggaatcctgtcttgctccttaccacagctccaggacctacccattgaagaggtgctgatagttgatctctgtgcagacaagttcttacaggaggtatctgatgaggatgaaattctaccaccaaaacttcaagctgccctgatgcagattttggaagaacgaaatgaaatcttgactcaggagcagaatttttcacaagatgtgacactcaactctctggtgtccgaagcatttgtcaggttttttgtggagttggtaggacattattctttgaacatgactgtcactgagcgtggggagcgtgttttccaaagggaaccattccgtaagtcccacacctcccgaagtgtacgccacttcctggatctcttcatggaaactcagatgtttgcaggattcatccaggaccgagagcttcggaaaagtggagttaaaggtttgtttgagatccgggccatccagtatttggaaacaattcctgagtcggagcccagtgggatgaatagaattttgcggagtcttggttagaagcaaaatgaaatttctgcaaaagaaatgaaatctctgattgtctccatcctgaatatacaacagaaagtgccaaagaaaatatttttctaagggtcaggatcccatgaagtattctacaaaattcttgaaattttaaaaggttaaagagcgagtcaggctgttagaggaggattctcctgttgctgctgtagtaatcactggagaattgttgggaatggtctggcaccatgccatctttactctgtctccattttttttttatagcagccttttctatgtgattcttgggctcattctctgttttgtgctttgtctgtgaaagtagttgtgtttcacaaggaaaagccttgttgttgttacatttaaaaaatagctcaaagatgagaataatgagagaaatgctgagtttaaggtagtagagagacatgatggaaatggagaacactagccttatacacataattctcatcactgaactatcatggcccctttaaacccatgggctgtttgacctgggctaaggaatagactcatcacatatctccattgttttgccttatattatatctaggggaatctcacttaggaggaagccctacttgtaatattataaggtactgttattaagtaccttataaaattagacatcttgcaactcctcctccaaattatgtggcatttgagtagtttgcttgtgcctcacatgtcaacattaaactttgtggaggctggatgcagtggctcacacctgtaatctccaccactttgggaggctaaggcaggagtttgagggtgggagtttgagactagcctgggcaacatagcaagatcccatctctacaaaaacattttaaaaataagtaaataaatttaaactttgtgaaattatagctaatatgaaaatgtcctttcaagggcatgggagccacctttattttttagtgtccaccatgtgccatgcactgtggtatatgtatgcatatcatctcaaccaatccttaaatcaaccttatgagatagatatttgcatctccattttactaataaactgaggctgggattacaggcatgagtcactgcacccggcctgtgtgtgtgtgtgtgtgtgtgtgtgtgtgttttcaaactcatgggcaaattcaagttcagatggtgcacttttcattgattaatgttatagcaaatgtcagtttgttttcttcagtttctgctgatggttttaactggcacagaaagtatttattcaaccttacaaaactgtgtaagttgtattgtgatacagtttattgacttgtacagtattgtcattacaacccattcaggtatgcatgaatctgaagcagaacaccatttaagactggtgctgtataatataattcctacagatgtgggtccagggaatagaactgagcctgtcttttttttaatgttaagcaggttacccccagtggggcttctactagacatctctccatttggtctcttcttacactccaacccagcaggaacagttaataattggatgtttataaaatgggggtaaaagggtttactgtgatggatcctggctatccctctaggaggagacctttgcttcagcaatggtgtcttcatcctcgcagcctgaagctgcttcatttccttaggtctgttgtgttttctgtaaagtgttaggaattctggatatttttgtaaaagaatcaagatttgtataaaatgttgtttacagatcttttaatgaataaatacataaaccccccacaga

SEQ ID NO: 276 - DNA, 3965 bp, Homo sapiens
ctcttgaagagggctggtatatttgtgcctgctggaggtggaattaacagtaagaaggagaaagggattgaatggacttacaggaaggatttcaagtaaattcagggaaacacatttacttgaatagtacaacctagagtattattttacactaagacgacacaaaagatgttaaagttatcaccaagctgccggacagatatatattccaacaccaaggtgcagatcagcatagatctgtgattcagaaatcaggatttgttttggaaagagctcaagggttgagaagaactcaaaagcaagtgaagattactttgggaactacagtttatcagaagatcaacttttgctaattcaaataccaaaggcctgattatcataaattcatataggaatgcataggtcatctgatcaaataatattagccgtcttctgctacatcaatgcagcaaaaactcttaacaactgtggataattggaaatctgagtttcagctttcttagaaataactactcttgacatattccaaaatatttaaaataggacaggaaaatcggtgaggatgttgtgctcagaaatgtcactgtcatgaaaaataggtaaatttgttttttcagctactgggaaactgtacctcctagaaccttaggttttttttttttttaagaggacaagaaggactaaaaatatcaacttttgcttttggacaaaaatgcatctgactgtatttttacttaagggtattgtgggtttcctctggagctgctgggttctagtgggttatgcaaaaggaggtttgggagacaatcatgttcactccagttttatttatagaagactacggaaccacgaaagacgggaaatacaaagggaaattctctctatcttgggtttgcctcacagacccagaccattttcacctggaaaacaagcgtcctctgcacctctctttatgctggatctctacaatgccatgaccaatgaagaaaatcctgaagagtcggagtactcagtaagggcatccttggcagaagagaccagaggggcaagaaagggatacccagcctctcccaatgggtatcctcgtcgcatacagttatctcggacgactcctctgaccacccagagtcctcctctagccagcctccatgataccaactttctgaatgatgctgacatggtcatgagctttgtcaacttagttgaaagagacaaggatttttctcaccagcgaaggcattacaaagaatttcgatttgatcttacccaaattcctcatggagaggcagtgacagcagctgaattccggatatacaaggaccggagcaacaaccgatttgaaaatgaaacaattaagattagcatatatcaaatcatcaaggaatacacaaatagggatgcagatctgttcttgttagacacaagaaaggcccaagctttagatgtgggttggcttgtctttgatatcactgtgaccagcaatcattgggtgattaatccccagaataatttgggcttacagctctgtgcagaaacaggggatggacgcagtatcaacgtaaaatctgctggtcttgtgggaagacagggacctcagtcaaaacaaccattcatggtggccttcttcaaggcgagtgaggtacttcttcgatccgtgagagcagccaacaaacgaaaaaatcaaaaccgcaataaatccagctctcatcaggactcctccagaatgtccagtgttggagattataacacaagtgagcaaaaacaagcctgtaagaagcacgaactctatgtgagcttccgggatctgggatggcaggactggattatagcaccagaaggatacgctgcattttattgtgatggagaatgttcttttccacttaacgcccatatgaatgccaccaaccacgctatagttcagactctggttcatctgatgtttcctgaccacgtaccaaagccttgttgtgctccaaccaaattaaatgccatctctgttctgtactttgatgacagctccaatgtcattttgaaaaaatatagaaatatggtagtacgctcatgtggctgccactaatattaaataatattgataataacaaaaagatctgtattaaggtttatggctgcaataaaaagcatactttcagacaaacggggaatttcctaaaattagtctggctcattttgactcttttcctatgtacaatatcatgtatatagtcatttttatttatttaaacgtatatattctcttctgtggaggctttatcaataaaatctatttcataggccactacattatacaatagatcatctagtataattttcaatgggttatgctgagtccattcaattccatttcaacatttttttctaatacaattttacataattttctgagattagacagaactcctttgactgtttaatattgtggaaggaaattgaataatttagttatattgtgccaatgaaaaccatgatagaatatttatttagaaataagacttaaaaaaataacaacccaaacaaaaattcttggataaacacaatttctcttttagagttcctgcttcattagataaagtgaaatgttgaactggatttgaataaataaacggtaggcagaacatagaagctgaaagattgcacagaattgttttaactgtttgctttaacagaagtggtgtaactgtaggagcatgttcctttttggcttgtggattgtagattttgcaaagagctcaaagcttcaggagacaggcttgagcctgtgtccatagctttccaagttaacactaattgtagtacaaccttcttacctcaaataaatcatgtctgcctattatctagaacactactgctgcagaatttttttttcagatttaaaaacctagtccaaaataaagaaacatttacatgtgctccactttcctccccacaggcaagagtcactgcatgcgtaaaatgtacaagagcagaagatgccgaaagaaccattttctttagctctcctttataactgagtttgctgattgatgtgatgcaagggattttatttagaagtaaaagcactgaaactaaactggaggaaattaccaaaagtcccagaatggctttgacagaattgccatttctaaagaacagctgaaattcatttttcatatctttgagagtgagctcaatgaaaaccttattttgtaaaggcattttgtaaaccttcttccaagcacaaataattccaaacaggaaggttctgttgtgtgtgtgtgtgtgtgtgtgtctgtgtgtgcatgtgtgttcttccctctaaaattaatttattttctctatctattagaatgccctctaaggcctttctttaacacacactgactttttgaagaatgatctttagattgataacttgctatttatggtgactctgtggttaggcttatttaccgttaatctaaagtattcataaagcaccatttattaatcatccttttggatctttcaaaccaaacgtataccaaaaatgtcttcaaaaatgttatggctttgtttgtaattcgggtatattaaaatgttgttttgaaatacagtttatcttaaagaaaatttgacagtaactatattaaggggtacattaagtaatatatttttaattaatggtgtaccattgagagaataagaaatggaagtctattgttttattctttaaatgtgctgtttaaatatatttccatattttaaaatatattaaacagatgctaatttctgctgttcttgatttggttctttatttaaaaggaatacaaaatgtaagtatatcataaattgagacaataagaatatttatcaaatgtaaactgtttgtggatcacatgattctttatgttgttcttaattgccaaaattgttttttgtgttgttaataattatctcactattaaatgtgcaaagcaacaatccatgaa

SEQ ID NO: 277 - DNA, 2612 bp, Homo sapiens
tcggccgctgctagaggggctgcttgcgccaggcgccggccgccccactgcgggtccctggcggccggtgtctgaggagtcggagagccgaggcggccagaccgtgcgccccgcgcttctcccgaggccgttccgggtctgaactgtaacagggaggggcctcgcaggagcagcagcgggcgagttaaagcccgcccacttccaactaccgcctccggcctgcccagggagagagagggagtggagcccagggagagggagcgcgagagagggagggaggaggggacggtgctttggctgacttttttttaaaagagggtgggggtggggggtgattgctggtcgtttgttgtggctgttaaattttaaactgccatgcactcggcttccagtatgctgggagcggtgaagatggaagggcacgagccgtccgactggagcagctactatgcagagcccgagggctactcctccgtgagcaacatgaacgccggcctggggatgaacggcatgaacacgtacatgagcatgtcggcggccgccatgggcagcggctcgggcaacatgagcgcgggctccatgaacatgtcgtcgtacgtgggcgctggcatgagcccgtccctggcggggatgtcccccggcgcgggcgccatggcgggcatgggcggctcggccggggcggccggcgtggcgggcatggggccgcacttgagtcccagcctgagcccgctcggggggcaggcggccggggccatgggcggcctggccccctacgccaacatgaactccatgagccccatgtacgggcaggcgggcctgagccgcgcccgcgaccccaagacctacaggcgcagctacacgcacgcaaagccgccctactcgtacatctcgctcatcaccatggccatccagcagagccccaacaagatgctgacgctgagcgagatctaccagtggatcatggacctcttccccttctaccggcagaaccagcagcgctggcagaactccatccgccactcgctctccttcaacgactgtttcctgaaggtgccccgctcgcccgacaagcccggcaagggctccttctggaccctgcaccctgactcgggcaacatgttcgagaacggctgctacctgcgccgccagaagcgcttcaagtgcgagaagcagctggcgctgaaggaggccgcaggcgccgccggcagcggcaagaaggcggccgccggagcccaggcctcacaggctcaactcggggaggccgccgggccggcctccgagactccggcgggcaccgagtcgcctcactcgagcgcctccccgtgccaggagcacaagcgagggggcctgggagagctgaaggggacgccggctgcggcgctgagccccccagagccggcgccctctcccgggcagcagcagcaggccgcggcccacctgctgggcccgccccaccacccgggcctgccgcctgaggcccacctgaagccggaacaccactacgccttcaaccacccgttctccatcaacaacctcatgtcctcggagcagcagcaccaccacagccaccaccaccaccaaccccacaaaatggacctcaaggcctacgaacaggtgatgcactaccccggctacggttcccccatgcctggcagcttggccatgggcccggtcacgaacaaaacgggcctggacgcctcgcccctggccgcagatacctcctactaccagggggtgtactcccggcccattatgaactcctcttaagaagacgacggcttcaggcccggctaactctggcaccccggatcgaggacaagtgagagagcaagtgggggtcgagactttggggagacggtgttgcagagacgcaagggagaagaaatccataacacccccaccccaacacccccaagacagcagtcttcttcacccgctgcagccgttccgtcccaaacagagggccacacagataccccacgttctatataaggaggaaaacgggaaagaatataaagttaaaaaaaagcctccggtttccactactgtgtagactcctgcttcttcaagcacctgcagattctgatttttttgttgttgttgttctcctccattgctgttgttgcagggaagtcttacttaaaaaaaaaaaaaaattttgtgagtgactcggtgtaaaaccatgtagttttaacagaaccagagggttgtactattgtttaaaaacaggaaaaaaaataatgtaagggtctgttgtaaatgaccaagaaaaagaaaaaaaaagcattcccaatcttgacacggtgaaatccaggtctcgggtccgattaatttatggtttctgcgtgctttatttatggcttataaatgtgtattctggctgcaagggccagagttccacaaatctatattaaagtgttatacccggttttatcccttgaatcttttcttccagatttttcttttctttacttggcttacaaaatatacaggcttggaaattatttcaagaaggagggagggataccctgtctggttgcaggttgtattttattttggcccagggagtgttgctgttttcccaacattttattaataaaattttcagacat

SEQ ID NO: 278 - DNA, 3008 bp, Homo sapiens
gaagtcaagacgtctggaaagaattacccagtcctggcttcgagcagcccattgaaccagagacttgaaacagccccagccaaagacttttctcccaattctgcgcttcctgggttctgctgagtcttccacaggctttttttttttttttttttttttttaagacgaaaaagagattttctgttatcgggggcagaaagactgaagcccaaaaaaaaaaaaaaaaaaaaaagaaaagaaaagaaaaaagaaaagttaatttatttttaaagcataatttttttaagaattagactgaagtgcaacggaaacataaagagaatattagtgaaattattttttaaagtggggaagaatcaaacatttaagactcccctatcctttttaaatgttgtttttaaatttcttattttttttggccggtcgtctcaaattcatctgatctcttattacctcaattttggaaactgcccgccaccgaccctccgggaccacacagacaggctgaggacgactttatgaccaagagctgaacaagatgcattgtgagaggtttctatgtatcctgagaataattggaaccacactctttggagtctctctcctccttggaatcacagctgcttatattgttggctaccagtttatccaaacggataattactatttctcttttggactgtatggtgcctttttggcatcacacctcatcatccaaagcctgtttgcctttttggagcaccgaaaaatgaaaaaatccctagaaacccccataaagttgaacaaaacagttgccctttgcatcgctgcctatcaagaagatccagactacttaaggaaatgtttgcaatctgtgaaaaggctaacctaccctgggattaaagttgtcatggtcatagatgggaactcagaagatgacctttacatgatggacatcttcagtgaagtcatgggcagagacaaatcagccacttatatctggaagaacaacttccacgaaaagggtcccggtgagacagatgagtcacataaagaaagctcgcaacacgtaacgcaattggtcttgtccaacaaaagtatctgcatcatgcaaaaatggggtggaaaaagagaagtcatgtacacagccttcagagcactgggacgaagtgtggattatgtacaggtttgtgattcagacactatgcttgacccagcctcatctgtggagatggtaaaagttttagaagaagatcccatggttggaggtgttgggggagatgtccagattttaaacaagtacgattcctggatctcattcctcagcagtgtaagatattggatggcttttaatatagaaagggcctgtcagtcttattttgggtgtgttcagtgcattagtggacctctgggaatgtacagaaactccttgttgcatgagtttgtggaagattggtacaatcaagaatttatgggcaaccaatgtagctttggtgatgacaggcatctcacgaaccgggtgctgagcctgggctatgcaacaaaatacacagctcgatctaagtgccttactgaaacacctatagaatatctcagatggctaaaccagcagacccgttggagcaagtcctacttccgagaatggctgtacaatgcaatgtggtttcacaaacatcacttgtggatgacctacgaagcgattatcactggattctttcctttctttctcattgccacagtaatccagctcttctaccggggtaaaatttggaacattctcctcttcttgttaactgtccagctagtaggtctcataaaatcatcttttgccagctgccttagaggaaatatcgtcatggtcttcatgtctctctactcagtgttatacatgtcgagtttacttcccgccaagatgtttgcaattgcaacaataaacaaagctgggtggggcacatcaggaaggaaaaccattgttgttaatttcataggactcattccagtatcagtttggtttacaatcctcctgggtggtgtgattttcaccatttataaggagtctaaaaggccattttcagaatccaaacagacagttctaattgttggaacgttgctctatgcatgctattgggtcatgcttttgacgctgtatgtagttctcatcaataagtgtggcaggcggaagaagggacaacaatatgacatggtgcttgatgtatgatcttccatgttttgacgtttgcagtcacacacaacaccttagttcctctaggggctgtacagtattgtggcatcagataatgccaccaaaggagacatatcactgctgctgggacttgaacaaagacatttatatgggtttattttcattctgccaaagtaaaacaatacatcaacaagaagaaactcagatttaacctgttatttctatgaaaatgggatgaattctttgtttatgcactttttccttactgtgcatccgcctgaaagtgttttgccctatatacctcactagccatgctttatgtgggttatcatggaagaaaaggattttggaaactcaaggaaaagttctttcaacctatacaacctaacttatggactgttttgatagatgataattttttttttttaggaaggattttctttttaactttaccaaatgaaatgccaaaggaagttttaaaggccgttggctgtgctgtattttgatataattgtactgtgtttttaaattttgtatgccaatcttaaagacaaattttgcatattctctattttacttttctgccaaaataaacctgttcttccttttttaaaataaaataagttcttaaaaaatttatacttaaaaaatcctgcccaaaatgtgaagcttggttgactgatgttcatgatagaaagaataaaatgtttctctctctctaccttttaaaattgaatagtttatttctgtgaaagaagtatttaaactttcaatattttaactttttgtttttatttcttttagaaaaggccaatatacctatcac

SEQ ID NO: 279 - DNA, 3601 bp, Homo sapiens
gccgcgagcgccgcgccacggcgccgccgccgccgtcgccgccgccggagtcctcgccccgccgcgctgcgcccggctcgcgctgcgctagtcgctccgcttcccacaccccgccggggactggcagccgccgccgcacatctgccgccacagcctccgccggctacccgaacgttctcggggccagcgccgagtggatcaccggggaccgcgaggcacccgcgcgccgcagaccccgcgcgggctggagcacccggcagagcgcgccacagcgccgtggcctctgctgcccgggctgcgccagagccgcggacgggcgcgcagagcgccggggactccggagccgatccctagcgccgcgatgcggagcacctactgcaggagatcgggggcctgggacgcgctggccgaggtgtgatcggaccccaggctagccacaaagggcacttggccccagggctaggagagcgaggggagagcacagccacccgcctcggcggcccgggactcggctcgactcgccggagaatgcgcccgaggacgacggggcgccagagccgcggtgctttcaactggcgagcgcgaatgggggtgcactggagtaaggcagagtgatgcgggggggcaactcgcctggcaccgagatcgccgccgtgcccttccctggacccggcgtcgcccaggatggctgccccgagccatgggccgcggcggagctagcgcggagcgcccgaccctcgacccccgagtcccggagccggccccgcgcggggccacgcgtccctcgggcgctggttcctaaggaggacgacagcaccagcttctcctttctcccttcccttccctgccccgcactcctccccctgctcgctgttgttgtgtgtcagcacttggctggggacttcttgaacttgcagggagaataacttgcgcaccccactttgcgccggtgcctttgccccagcggagcctgcttcgccatctccgagccccaccgcccctccactcctcggccttgcccgacactgagacgctgttcccagcgtgaaaagagagactgcgcggccggcacccgggagaaggaggaggcaaagaaaaggaacggacattcggtccttgcgccaggtcctttgaccagagtttttccatgtggacgctctttcaatggacgtgtccccgcgtgcttcttagacggactgcggtctcctaaaggtcgaccatggtggccgggacccgctgtcttctagcgttgctgcttccccaggtcctcctgggcggcgcggctggcctcgttccggagctgggccgcaggaagttcgcggcggcgtcgtcgggccgcccctcatcccagccctctgacgaggtcctgagcgagttcgagttgcggctgctcagcatgttcggcctgaaacagagacccacccccagcagggacgccgtggtgcccccctacatgctagacctgtatcgcaggcactcaggtcagccgggctcacccgccccagaccaccggttggagagggcagccagccgagccaacactgtgcgcagcttccaccatgaagaatctttggaagaactaccagaaacgagtgggaaaacaacccggagattcttctttaatttaagttctatccccacggaggagtttatcacctcagcagagcttcaggttttccgagaacagatgcaagatgctttaggaaacaatagcagtttccatcaccgaattaatatttatgaaatcataaaacctgcaacagccaactcgaaattccccgtgaccagacttttggacaccaggttggtgaatcagaatgcaagcaggtgggaaagttttgatgtcacccccgctgtgatgcggtggactgcacagggacacgccaaccatggattcgtggtggaagtggcccacttggaggagaaacaaggtgtctccaagagacatgttaggataagcaggtctttgcaccaagatgaacacagctggtcacagataaggccattgctagtaacttttggccatgatggaaaagggcatcctctccacaaaagagaaaaacgtcaagccaaacacaaacagcggaaacgccttaagtccagctgtaagagacaccctttgtacgtggacttcagtgacgtggggtggaatgactggattgtggctcccccggggtatcacgccttttactgccacggagaatgcccttttcctctggctgatcatctgaactccactaatcatgccattgttcagacgttggtcaactctgttaactctaagattcctaaggcatgctgtgtcccgacagaactcagtgctatctcgatgctgtaccttgacgagaatgaaaaggttgtattaaagaactatcaggacatggttgtggagggttgtgggtgtcgctagtacagcaaaattaaatacataaatatatatatatatatatattttagaaaaaagaaaaaaacaaacaaacaaaaaaaccccaccccagttgacactttaatatttcccaatgaagactttatttatggaatggaatggaaaaaaaaacagctattttgaaaatatatttatatctacgaaaagaagttgggaaaacaaatattttaatcagagaattattccttaaagatttaaaatgtatttagttgtacattttatatgggttcaaccccagcacatgaagtataatggtcagatttattttgtatttatttactattataaccactttttaggaaaaaaatagctaatttgtatttatatgtaatcaaaagaagtatcgggtttgtacataattttccaaaaattgtagttgttttcagttgtgtgtatttaagatgaaaagtctacatggaaggttactctggcaaagtgcttagcacgtttgcttttttgcagtgctactgttgagttcacaagttcaagtccagaaaaaaaaagtggataatccactctgctgactttcaagattattatattattcaattctcaggaatgttgcagagtgattgtccaatccatgagaatttacatccttattaggtggaatatttggataagaaccagacattgctgatctattatagaaactctcctcctgccccttaatttacagaaagaataaagcaggatccatagaaataattaggaaaacgatgaacctgcaggaaagtgaatgatggtttgttgttcttctttcctaaattagtgatcccttcaaaggggctgatctggccaaagtattcaataaaacgtaagatttcttcattattgatattgtggtcatatatatttaaaattgatatctcgtggccctcatcaagggttggaaatttatttgtgttttacctttacctcatctgagagctctttattctccaaagaacccagttttctaactttttgcccaacacgcagcaaaattatgcacatcgtgttttctgcccaccctctgttctctgacctatcagcttgcttttctttccaaggttgtgtgtttgaacacatttctccaaatgttaaacctatttcagataataaatatcaaatctctggcatttcattctataaagtccaacctgtaagagaaaa

SEQ ID NO: 280 - DNA, 1710 bp, Homo sapiens
tttaacaagggcccaaccccagggccaagtcaagaaggagctcagccactatctccccaccgagccagctcagcgggcagggctgggagggagtgggacagattctgggagtgcagcggggaggagtcccggctgggctgagcgcagggagctgcttggcagtgccagagcccaggccccagagccctgctggagaggaggcagactgaggcagcagagccggcatgggagtaggaatggccacaagtggccaacggaaagcaggtggcaggacaggaggctgtggtggggcctgaccgagcagcctttccttccaaatctgactgtggcttgctcaggcccctatggtggctgtgaccctgttttgtccatctcctttcaccaggacccgccgggtgagggtgactggagcacattcctgggcttgggggtgggaagggagtctgatttgcctggggttgatgtgggggggttttgggcatgggccgtgactcacagagtagatccagatccgcctgctcccctcatatcctgttattcagaaggctgtatccgcttagaaagtgtcttttgtcctggggtgagagggtgacgcatgtgccctctggcagtctgctgctgtgtccagagtccgactccagctgggctgtaactgggcttggcccccgccttagctctgttccccttttcctgccaccttcttctccagggaccagaaacaagggccccgccagcaggcgaagcagggagatgtcagactgctacacggagctggagaaggcagtcattgtcctggtggaaaacttctacaaatatgtgtctaagtacagcctggtcaagaacaagatcagcaagagcagcttccgcgagatgctccagaaagagctgaaccacatgctgtcggacacagggaaccggaaggctgcggataagctcatccagaacctggatgccaatcatgatgggcgcatcagcttcgatgagtactggaccttgataggcggcatcaccggccccatcgccaaactcatccatgagcaggagcagcagagcagcagctagagacccctttggccacaccttccaggcactggcctgatgccccgccctggtgctctccccaggctccctcctcagcctcctgcccacccagggccctttactctcttctccctccagaccttcctctgacccttgctgaactggggtccctttgtgagtgtctcagtctagaggtacctccctccctggggggtctcagctcctggagtcgcaggcccttggggcccctctgtgagatctcaatgctgtctggggaccctaagagttttctcacctgttcagtctcatctaaccttccaatgtctgatgttcctgccaaattcctgcctgattctgggtccgtcctgacctccaaaggtcagcttggtgcttgaggtctccctgctcttggtggcagtggtagcagcaacagcagcagcagcagcagcagcagcagcagagacctctccactttcccttagcccctctgctgggtagagaggcactttcagggacttccctccagctgcctcttcatctgggaatgagctaagcaaggctgagcctcctcctgttgcttgaaataatgatgatataaaggctggatttggagtttgtatcccctggtccctctgggatgctcattaaaaccttcccactccttggaaa

SEQ ID NO: 281 - DNA, 2599 bp, Homo sapiens
ctgatcttgatggaaacctacacctttgtcatgtttttcctgtttgaaaataagtcctatctataggctcatatctcatgcctatttttggatgtatttttcagggtggtttataaaatcctccaatgaagctactaacattactccaaagcataatatgaaagcatttttggatgaattgaaagctgagaacatcaagaagttcttatataattttacacagataccacatttagcaggaacagaacaaaactttcagcttgcaaagcaaattcaatcccagtggaaagaatttggcctggattctgctgagctagctcattatgatgtcctgttgtcctacccaaataagacacatcccaactacatctcaataattaatgaagatggaaatgagattttcaacacatcattatttgaaccacctcctccaggatatgaaaatgtttcggatattgtaccatctttcagtgctttctctcctcaaggaatgccagagggtgatctagtgcatgttaactatgcacgaactgaagacttctttaaattggaacgggacatgaaaatcaattgctctgggaaaattgtaattgccagatataggaaagttttcagaggaaataagagcaaatactcactaccacaaataagaacatttccaaatctgatgttctgaggatttttagagcttatagtagcaaaaagaaaagggaaattctctctgagatgtccttttttgtaggcctaatgacaaaaggttgaagataaagttctagtactcatttaagtgtaatattgaaaattgatattaccaaatctggaacaaccaatttaaaataaggaaagaaagacactgtgttttctaggttaaaaatgcccagctggcaggggccaaaggagtcattctctactcagaccctgctgactactttgctcctggggtgaagtcctatccagacggttggaatcttcctggaggtggtgtccagcgtggaaatatcctaaatctgaatggtgcaggagaccctctcacaccaggttacccagcaaatgaatacgcttataggcatggaattgcagaggctgttggtcttccaagtattcctgttcatccagttggatactatgatgcacagaagctcctagaaaaaatgggtggctcagcaccaccagatagcagctggagaggaagtctcaaagtgtcctacaatgttggacctggctttactggaaacttttctacacaaaaagtcaagatgcacatccactctaccaatgaagtgacgagaatttacaatgtgataggtactctcagaggagcagtggaaccagacagatatgtcattctgggaggtcaccgggactcatgggtgtttggtggtattgaccctcagagtggagcagctgttgttcatgaaactgtgaggagctttggaacactgaaaaaggaagggtggagacctagaagaacaattttgtttgcaagctgggatgcagaagaatttggtcttcttggttctactgagtgggcagaggataattcaagactccttcaagagcgtggcgtggcttatattaatgctgactcatctatagaaggaaactacactctgagagttgattgtacaccactgatgtacagcttggtatacaacctaacaaaagagctgaaaagccctgatgaaggctttgaaggcaaatctctttatgaaagttggactaaaaaaagtccttccccagagttcagtggcatgcccaggataagcaaattgggatctggaaatgattttgaggtgttcttccaacgacttggaattgcttcaggcagagcacggtatactaaaaattgggaaacaaacaaattcagcggctatccactgtatcacagtgtctatgaaacatatgagttggtggaaaagttttatgatccaatgtttaaatatcacctcactgtggcccaggttcgaggagggatggtgtttgagctagccaattccatagtgctcccttttgattgtcgagattatgctgtagttttaagaaagtatgctgacaaaatctacaatatttctatgaaacatccacaggaaatgaagacatacagtttatcatttgattcacttttttctgcagtaaaaaattttacagaaattgcttccaagttcagcgagagactccaggactttgacaaaagcaacccaatattgttaagaatgatgaatgatcaactcatgtttctggaaagagcatttattgatccattagggttaccagacagacctttttataggcatgtcatctatgctccaagcagccacaacaagtatgcaggggagtcattcccaggaatttatgatgctctgtttgatattgaaagcaaagtggacccttccaaggcctggggagatgtgaagagacagatttctgttgcagccttcacagtgcaggcagctgcagagactttgagtgaagtagcctaagaggattctttagagactctgtattgaatttgtgtggtatgtcactcaaagaataataatgggtatattgataaattttaaaattggtatatttgaaataaagttgaatattatatata

SEQ ID NO: 282 - DNA, 1957 bp, Homo sapiens
gaggggcgggacccaactgattgtcaaaggcggcagattgtagtttttgttttggccggaaaggcttaccatgagttgccagggctgagagagatggagaaggattcgcggcggtgacagattaaattccccagttacattatagacttggaggtgggggatcttctcatcgttagaggccccgatcatgggagataggcggttcggagccagttctgcctaactttgtgttcactgatgttagggctgctagggctgcaaaggtgggcacccctactcgcctaagagctttctcctctcttctctttttcccctttgcctctctccttacatcacctgcccactaagtagacttgtccttgtgtggacgggagccggaaagccttgagaacttattcctcgacccggacatggcacaggagaaaatgaaactaggtttcaagtcgctgccgagttccactaccgcagacggcaacattctgagaagagtcaacagtgcccctttgatcaatggacttggttttaattcacaggtgttgcaagctgacatgttaagaattaggacaaacagaacaacatttaggaatcgacgctctctggaattctggcacttctgctcaagccggatgtcactgcgtcacttctccatccccaccccctcctcttccaaaggaagcaggggaaatgtctcatcttcctaagagaaaaggttgtgcttttcttgagcaattcatctgttctaattttaggcctactgacatctgtctcattaggttttgcttttcctattggcaaccacaaaccccaaatctagtgtatggcccacaaagttgcaagcatgtaatacattcctgatcctgctttatgccctgcacatctagcccatgttcagttcatgttaagtagcattataaaccatcttaaatcatttctgaaactaggcagagacatttataaacacagtgtacaaccctttgtttaggattttctgagcattttatctctagttactatagtaggaaatggcttaaaaacagcaaacctaggaaaatgaaaaataatttttaaaaatcttaatgtctttacaatattgttgccacctcctccctttcatggttccatcagccgccttcatcaaatcaaacaggaagaagccatggatttaataaatagagaaacaatgtctgaatggaagctacaaagtgagatacagataagtcactcttgggaagaaggcttgaaactgaatgacaatggcttacagaaatcatcctctctaaagtgcattgatttaactccagtatcctcaatggcttcttccatcaagaagactgggaaggtgaaatggcatttcaatatcaaccaaaaaagattttccaaggcacaaccaacatgctttcttctgatacttcccaactgtcagaaaataatgtgtatctacttccagctacttttgatggaaacgacagcaatgctggatcttctggtaattcgtcagctgaaatcggcactgtcacaaactctcctgtgtcaccttctgatactggttctcatttgttctagtagacaaactttcaactaaatgattcacccatcccaagactttctcaccagtggagaaacacacacatcaagcaaaccaagtcagagcaatgagaattgtactgtataatttaaactatctcctatttatcttttttcctcaatttcctaaaattctatttatctacagaacttgcgtgtataattcttgtgtacatccttaaatttaatgtaataacatgttaaagatgttttccaaatcagaaccatgttgaagatacaagcgtaaattgttaggctgctattttctagaaaatgctgtaccttgactttttaaaataatcttatgaaacataattctgataaaatataattgttcaattaacaaagtaaaatgatgtttgacaattatgta

SEQ ID NO: 283 - DNA, 9713 bp, Homo sapiens
gctgcgcagcgctggctgctggctggcctcgcggagacgccgaacggacgcggccggcgccggcttgtgggctcgccgcctgcagccatgaccctcgcagcctgtccctcggcctcggcccgggacgtctaaaatcccacacagtcgcgcgcagctgctggagagccggccgctgccccctcgtcgccgcatcacactcccgtcccgggagctgggagcagcgcgggcagccggcgcccccgtgcaaactgggggtgtctgccagagcagccccagccgctgccgctgctacccccgatgctggccatggcctggcggggcgcagggccgagcgtcccgggggcgcccgggggcgtcggtctcagtctggggttgctcctgcagttgctgctgctcctggggccggcgcggggcttcggggacgaggaagagcggcgctgcgaccccatccgcatctccatgtgccagaacctcggctacaacgtgaccaagatgcccaacctggttgggcacgagctgcagacggacgccgagctgcagctgacaactttcacaccgctcatccagtacggctgctccagccagctgcaggtgggcgcccccacccccacccctggcgggaccccttggggagggacgctccaaactaactttgcagagcccatgccaagttgatcatcctagcccgaaggagacagctctcctggaaaagtgatttccatccccacccccactttctcagggactggaagccaaaacgttgtgtaagtcatctggcctgggaaagaacccactcttacaccccgcccttccgtttttctctcttgcccacccatgtctggcccagacccctaaccccagtggagctgagggttatctctgccaaggattctggccgccactgctcggtgggcgagtgggagggagccagctgcagctaagacttggagggagtgataaggagaccatccttcaccgaacttccttctccccactatttttggggtgttattaaatgaaacactactgcacctttttctgctgaatagccccttctcacgacgtcccgcagcgttttagaggtcatgcatgaaggagtggttgggttggcttgagttctttcttatcctcacagttgaaggcacgtttaatgcttggagggtgagaagaagctgcaggaaggtggttggtatattggaagaaatttttttgcagtcattaaaaaatgtaaagcatatctaatgatagagaaaatgtttattccacagtaataagaatttgcatatacagggtgattataatcctgcaaaataaaaaatttattgggataataaaagactgacaggaaaatttttaaagtgttaacattggttatgtttgggttggtgaggctgggtgatttttagaaatttagaaaagagagaagttgtgggaaaaagtagacgttagttgtccaggcttcagaaatctggtttctggccgggcgcagtggctcacgcctgtaatcccagcactttgggaggccgaggcaggtggctcacgaggttaggagttcgagaccagcctgaccaacatggcgaaatcctgtctctactaaaagtacaaaaattagccgggcgtggtggcgtgcgcctgtaatcccagctactcaggaggctgaggcaggagaatcgcttgaacccaggaggcagaggttgcagtgagcggggattgcaccattgcactctagcctgggccacaggagcgaaactccgtatcaaaaaaaaaaagaaaagaaaagaaatctgtggttctggctgtaacttctgagagataataaacagacatacagcttacttactaggtgcatgtttttacataggtcattttaaaacttggtttgtggttttggaaagatggtggggattagacctgttgctgctaaaatatccctttggaagtttcagaactttagaactaggttataaaagcttaagaaatgatcctccagctctcagtttggaaacagcacatatcctgacatcagtggcaatttgttggagaaacagcttttgcagggatatatatttttaattacatgtatcctggggaaagcggccaagctgttttgaaggacaagactggatccctttacatgctggaaaatagttacttgtaactctagacttcatagacaacatctgtaaggagccaagcagactgtttatcaatgctggaggaattgaggacagcaactggactctcccctgctggtactgcagtttcagcgacttaacatttacattttcctattgtgcttcattattattcattgaggaaacctggccaaacaaatccctagtgaccagagacctcaatctgcatcccatccttgagtctaacagtgtctcatttgggccattttttgtttcagtatgggactagtttaaacaaatttttaagggataaattagggagaagagaatactaacaggatctacatttttttttaacttttatttttaaaatgataaagaaacggggataaaaataaaccacctaaatgagtcatattagtttctttagctttttcaaatagtttctaaaatggaaggagattgaaagccagttttttaagatttatttcaagtgttgtgcaaagagggcttatgcaattcttcagaccctatttattttatttatttatttatgtacattcttctggaaaggattactaaagccaaactaagaaaagtatgtaagtgatggattatcaggcgcccttgtttgaggtcagagtaaacagacagactcccgataggttggtttaaaagtagatacctagattgcctggaagcattcaactcagctttgtgggagcatttggtcaaacttccaagtcattgttttttttgtgtgtgttcattttgttacttttccagttcttcctttgttctgtttatgtgccaatgtgcacagagaagatcaacatccccattggcccatgcggcggcatgtgtctttcagtcaagagacgctgtgaacccgtcctgaaggaatttggatttgcctggccagagagtctgaactgcagcaaattcccaccacagaacgaccacaaccacatgtgcatggaagggccaggtgatgaagaggtgcccttacctcacaaaacccccatccagcctggggaagagtgtcactctgtgggaaccaattctgatcagtacatctgggtgaaaaggagcctgaactgtgtgctcaagtgtggctatgatgctggcttatacagccgctcagccaaggagttcactgatatctggatggctgtgtgggccagcctgtgtttcatctccactgccttcacagtactgaccttcctgatcgattcttctaggttttcctaccctgagcgccccatcatatttctcagtatgtgctataatatttatagcattgcttatattgtcaggctgactgtaggccgggaaaggatatcctgtgattttgaagaggcagcagaacctgttctcatccaagaaggacttaagaacacaggatgtgcaataattttcttgctgatgtacttttttggaatggccagctccatttggtgggttattctgacactcacttggtttttggcagcaggactcaaatggggtcatgaagccattgaaatgcacagctcttatttccacattgcagcctgggccatccccgcagtgaaaaccattgtcatcttgattatgagactggtggatgcagatgaactgactggcttgtgctatgttggaaaccaaaatctcgatgccctcaccgggttcgtggtggctcccctctttacttatttggtcattggaactttgttcattgctgcaggtttggtggccttgttcaaaattcggtcaaatcttcaaaaggatgggacaaagacagacaagttagaaagactgatggtcaagattggggtgttctcagtactgtacacagttcctgcaacgtgtgtgattgcctgttatttttatgaaatctccaactgggcactttttcggtattctgcagatgattccaacatggctgttgaaatgttgaaaatttttatgtctttgttggtgggcatcacttcaggcatgtggatttggtctgccaaaactcttcacacgtggcagaagtgttccaacagattggtgaattctggaaaggtaaagagagagaagagaggaaatggttgggtgaagcctggaaaaggcagtgagactgtggtataaggctagtcagcctccatgctttcttcattttgaaggggggaatgccagcattttggaggaaattctactaaaagttttatgcagtgaatctcagtttgaacaaactagcaacaattaagtgacccccgtcaacccactgcctcccaccccgaccccagcatcaaaaaaccaatgattttgctgcagactttggaatgatccaaaatggaaaagccagttagaggctttcaaagctgtgaaaaatcaaaacgttgatcactttagcaggttgcagcttggagcgtggaggtcctgcctagattccaggaagtccagggcgatactgttttcccctgcagggtgggatttgagctgtgagttggtaactagcagggagaaatattaacttttttaaccctttaccattttaaatactaactgggtctttcagatagcaaagcaatctataaacactggaaacgctgggttcagaaaagtgttacaagagttttatagtttggctgatgtaacataaacatcttctgtggtgcgctgtctgctgtttagaactttgtggactgcactcccaagaagtggtgttagaatctttcagtgcctttgtcataaaacagttatttgaacaaacaaaagtactgtactcacacacataaggtatccagtggatttttcttctctgtcttcctctcttaaatttcaacatctctcttcttggctgctgctgttttcttcattttatgttaatgactcaaaaaaggtatttttatagaatttttgtactgcagcatgcttaaagaggggaaaaggaagggtgattcactttctgacaatcacttaattcagaggaaaatgagatttactaagttgacttacctgacggaccccagagacctattgcattgagcagtggggacttaatatattttacttgtgtgattgcatctatgcagacgccagtctggaagagctgaaatgttaagtttcttggcaactttgcattcacacagattagctgtgtaatttttgtgtgtcaattacaattaaaagcacattgttggaccatgacatagtatactcaactgactttaaaactatggtcaacttcaacttgcattctcagaatgatagtgcctttaaaaatttttttattttttaaagcataagaatgttatcagaatctggtctacttaggacaatggagactttttcagttttataaagggaactgaggacagctaatccaactacttggtgcgtaattgtttcctagtaattggcaaaggctccttgtaagatttcactggaggcagtgtggcctggagtatttatatggtgcttaatgaatctccagaatgccagccagaagcctgattggttagtagggaataaagtgtagaccatatgaaatgaactgcaaactctaatagcccaggtcttaattgcctttagcagaggtatccaaagcttttaaaatttatgcatacgttcttcacaagggggtacccccagcagcctctcgaaaattgcacttctcttaaaactgtaactggcctttctcttaccttgccttaggcgttctaatcatgagatcttggggacaaattgactatgtcacaggttgctctccttgtaactcatacctgtctgcttcagcaactgctttgcaatgacatttatttattaattcatgccttaaaaaaataggaagggaagcttttttttttctttttttttttttcaatcacactttgtggaaaaacatttccagggactcaaaattccaaaaaggtggtcaaattctggaagtaagcatttcctcttttttaaaaatttggtttgagccttatgcccatagtttgacatttccctttcttctttcctttttgtttttgtgtggttcttgagctctctgacatcaagatgcatgtaaagtcgattgtatgttttggaaggcaaagtcttggcttttgagactgaagttaagtgggcacaggtggcccctgctgctgtgcccagtctgagtaccttggctagactctaggtcaggctccaggagcatgagaattgatccccagaagaaccattttaactccatctgatactccattgcctatgaaatgtaaaatgtgaactccctgtgctgcttgtagacagttcccataactgtccacggccctggagcacgcacccaggggcagagcctgcccttactcacgctctgctctggtgtcttgggagttgtgcagggactctggcccaggcaggggaaggaagaccaggcggtaggggactggtcttgctgttagagtatagaggtttgtaatgcagttttcttcataatgtgtcagtgattgtgtgaccaaggcagcatctagcagaaagccaggcatggagtaggtgatcgatacttgtcaatgactaaataataacaataaaagagcacttgggtgaatctgggcacctgatttctgagttttgagttctggagctagtgttttgacaatgctttgggttttgacatgccttttccacaaatctcttgccttttcagggcaaagtgtatttgatcagaagtggccatttggattagtagccttagcaatgctacagggttataggcctctcctttcacattccagacaatggagagtgtttatggtttcaggaaaagaactttgtggctgaggggtcagttaccagtgaccttcaatcaactccatcacttcttaaatcggtatttgttaaaaaaatcagttattttatttattgagtgccgactgtagtaaagccctgaaatagataatctctgttcttctaactgatctaggatggggacgcacccaggtctgctgaactttactgttcctctgggaaaggagcagggacctctggaattcccatctgtttcactgtctccattccataaatctcttcctgtgtgagccaccacacccagcctgggtctctctacttttaacacatctctcatccctttcccaggattccttccaagtcagttacaggtggttttaacagaaagcatcagctctgcttcgtgacagtctctggagaaatcccttaggaagactatgagagtaggccacaaggacatgggcccacacatctgctttggctttgccggcaattcagggcttggggtattccatgtgacttgtataggtatatttgaggacagcatcttgctagagaaaaggtgagggttgtttttctttctctgaaacctacagtaaatgggtatgattgtagcttcctcagaaatcccttggcctccagagattaaacatggtgcaatggcacctctgtccaacctcctttctggtagattcctttctcctgcttcatataggccaaacctcagggcaagggaacatgggggtagagtggtgctggccagaaccatctgcttgagctacttggttgattcatatcctctttcctttatggagacccatttcctgatctctgagactgttgctgaactggcaacttacttgggcctgaaactggagaaggggtgacatttttttaatttcagagatgctttctgattttcctctcccaggtcactgtctcacctgcactctccaaactcaggttccgggaagcttgtgtgtctagatactgaattgagattctgttcagcaccttttagctctatactctctggctcccctcatcctcatggtcactgaattaaatgcttattgtattgagaaccaagatgggacctgaggacacaaagatgagctcaacagtctcagccctagaggaatagactcagggatttcaccaggtcggtgcagtatttgatttctggtgaggtgaccacagctgcagttagggaagggagccattgagcacagactttggaaggaaccttttttttgttgtttgtttgtttgtttgtttgtttgtttgtttgagacagggtcttgctctgtcacccaggctggggcgcaatggcacgatcttggctcactgcaacctctgcctcctgggttcaagtgattctcctgccacagcctcctgaggagctgggactacaggtgcgtgctaccacgcccagctacttctgtatttttagtagagacggggtttcactgtgttggccaggctggtctcgaactcctgacctcatgatctgcccgcctcagcctcccaaagtgctgggattacaagtgtgagccaccacacctggcctggaaggaacctcttaaaatcagtttacgtcttgtattttgttctgtgatggaggacactggagagagttgctattccagtcaatcatgtcgagtcactggactctgaaaatcctattggttcctttattttatttgagtttagagttcccttctgggtttgtattatgtctggcaaatgacctgggttatcacttttcctccagggttagatcatagatcttggaaactccttagagagcattttgctcctaccaaggatcagatactggagccccacataatagatttcatttcactctagcctacatagagctttctgttgctgtctcttgccatgcacttgtgcggtgattacacacttgacagtaccaggagacaaatgacttacagatcccccgacatgcctcttccccttggcaagctcagttgccctgatagtagcatgtttctgtttctgatgtaccttttttctcttcttctttgcatcagccaattcccagaatttccccaggcaatttgtagaggacctttttggggtcctatatgagccatgtcctcaaagcttttaaacctccttgctctcctacaatattcagtacatgaccactgtcatcctagaaggcttctgaaaagaggggcaagagccactctgcgccacaaaggttgggtccatcttctctccgaggttgtgaaagttttcaaattgtactaataggctggggccctgacttggctgtgggctttgggaggggtaagctgctttctagatctctcccagtgaggcatggaggtgtttctgaattttgtctacctcacagggatgttgtgaggcttgaaaaggtcaaaaaatgatggccccttgagctctttgtaagaaaggtagatgaaatatcggatgtaatctgaaaaaaagataaaatgtgacttcccctgctctgtgcagcagtcgggctggatgctctgtggcctttcttgggtcctcatgccaccccacagctccaggaaccttgaagccaatctgggggactttcagatgtttgacaaagaggtaccaggcaaacttcctgctacacatgccctgaatgaattgctaaatttcaaaggaaatggaccctgcttttaaggatgtacaaaagtatgtctgcatcgatgtctgtactgtaaatttctaatttatcactgtacaaagaaaaccccttgctatttaattttgtattaaaggaaaataaagttttgtttgtta

SEQ ID NO: 284 - DNA, 5465 bp, Homo sapiens
tatatccgtggtttcctgctacctccaaccatgggccttttgggaatactttgttttttaatcttcctggggaaaacctggggacaggagcaaacatatgtcatttcagcaccaaaaatattccgtgttggagcatctgaaaatattgtgattcaagtttatggatacactgaagcatttgatgcaacaatctctattaaaagttatcctgataaaaaatttagttactcctcaggccatgttcatttatcctcagagaataaattccaaaactctgcaatcttaacaatacaaccaaaacaattgcctggaggacaaaacccagtttcttatgtgtatttggaagttgtatcaaagcatttttcaaaatcaaaaagaatgccaataacctatgacaatggatttctcttcattcatacagacaaacctgtttatactccagaccagtcagtaaaagttagagtttattcgttgaatgacgacttgaagccagccaaaagagaaactgtcttaactttcatagatcctgaaggatcagaagttgacatggtagaagaaattgatcatattggaattatctcttttcctgacttcaagattccgtctaatcctagatatggtatgtggacgatcaaggctaaatataaagaggacttttcaacaactggaaccgcatattttgaagttaaagaatatgtcttgccacatttttctgtctcaatcgagccagaatataatttcattggttacaagaactttaagaattttgaaattactataaaagcaagatatttttataataaagtagtcactgaggctgacgtttatatcacatttggaataagagaagacttaaaagatgatcaaaaagaaatgatgcaaacagcaatgcaaaacacaatgttgataaatggaattgctcaagtcacatttgattctgaaacagcagtcaaagaactgtcatactacagtttagaagatttaaacaacaagtacctttatattgctgtaacagtcatagagtctacaggtggattttctgaagaggcagaaatacctggcatcaaatatgtcctctctccctacaaactgaatttggttgctactcctcttttcctgaagcctgggattccatatcccatcaaggtgcaggttaaagattcgcttgaccagttggtaggaggagtcccagtaacactgaatgcacaaacaattgatgtaaaccaagagacatctgacttggatccaagcaaaagtgtaacacgtgttgatgatggagtagcttcctttgtgcttaatctcccatctggagtgacggtgctggagtttaatgtcaaaactgatgctccagatcttccagaagaaaatcaggccagggaaggttaccgagcaatagcatactcatctctcagccaaagttacctttatattgattggactgataaccataaggctttgctagtgggagaacatctgaatattattgttacccccaaaagcccatatattgacaaaataactcactataattacttgattttatccaagggcaaaattatccactttggcacgagggagaaattttcagatgcatcttatcaaagtataaacattccagtaacacagaacatggttccttcatcccgacttctggtctattacatcgtcacaggagaacagacagcagaattagtgtctgattcagtctggttaaatattgaagaaaaatgtggcaaccagctccaggttcatctgtctcctgatgcagatgcatattctccaggccaaactgtgtctcttaatatggcaactggaatggattcctgggtggcattagcagcagtggacagtgctgtgtatggagtccaaagaggagccaaaaagcccttggaaagagtatttcaattcttagagaagagtgatctgggctgtggggcaggtggtggcctcaacaatgccaatgtgttccacctagctggacttaccttcctcactaatgcaaatgcagatgactcccaagaaaatgatgaaccttgtaaagaaattctcaggccaagaagaacgctgcaaaagaagatagaagaaatagctgctaaatataaacattcagtagtgaagaaatgttgttacgatggagcctgcgttaataatgatgaaacctgtgagcagcgagctgcacggattagtttagggccaagatgcatcaaagctttcactgaatgttgtgtcgtcgcaagccagctccgtgctaatatctctcataaagacatgcaattgggaaggctacacatgaagaccctgttaccagtaagcaagccagaaattcggagttattttccagaaagctggttgtgggaagttcatcttgttcccagaagaaaacagttgcagtttgccctacctgattctctaaccacctgggaaattcaaggcgttggcatttcaaacactggtatatgtgttgctgatactgtcaaggcaaaggtgttcaaagatgtcttcctggaaatgaatataccatattctgttgtacgaggagaacagatccaattgaaaggaactgtttacaactataggacttctgggatgcagttctgtgttaaaatgtctgctgtggagggaatctgcacttcggaaagcccagtcattgatcatcagggcacaaagtcctccaaatgtgtgcgccagaaagtagagggctcctccagtcacttggtgacattcactgtgcttcctctggaaattggccttcacaacatcaatttttcactggagacttggtttggaaaagaaatcttagtaaaaacattacgagtggtgccagaaggtgtcaaaagggaaagctattctggtgttactttggatcctaggggtatttatggtaccattagcagacgaaaggagttcccatacaggatacccttagatttggtccccaaaacagaaatcaaaaggattttgagtgtaaaaggactgcttgtaggtgagatcttgtctgcagttctaagtcaggaaggcatcaatatcctaacccacctccccaaagggagtgcagaggcggagctgatgagcgttgtcccagtattctatgtttttcactacctggaaacaggaaatcattggaacatttttcattctgacccattaattgaaaagcagaaactgaagaaaaaattaaaagaagggatgttgagcattatgtcctacagaaatgctgactactcttacagtgtgtggaagggtggaagtgctagcacttggttaacagcttttgctttaagagtacttggacaagtaaataaatacgtagagcagaaccaaaattcaatttgtaattctttattgtggctagttgagaattatcaattagataatggatctttcaaggaaaattcacagtatcaaccaataaaattacagggtaccttgcctgttgaagcccgagagaacagcttatatcttacagcctttactgtgattggaattagaaaggctttcgatatatgccccctggtgaaaatcgacacagctctaattaaagctgacaactttctgcttgaaaatacactgccagcccagagcacctttacattggccatttctgcgtatgctctttccctgggagataaaactcacccacagtttcgttcaattgtttcagctttgaagagagaagctttggttaaaggtaatccacccatttatcgtttttggaaagacaatcttcagcataaagacagctctgtacctaacactggtacggcacgtatggtagaaacaactgcctatgctttactcaccagtctgaacttgaaagatataaattatgttaacccagtcatcaaatggctatcagaagagcagaggtatggaggtggcttttattcaacccaggacacaatcaatgccattgagggcctgacggaatattcactcctggttaaacaactccgcttgagtatggacatcgatgtttcttacaagcataaaggtgccttacataattataaaatgacagacaagaatttccttgggaggccagtagaggtgcttctcaatgatgacctcattgtcagtacaggatttggcagtggcttggctacagtacatgtaacaactgtagttcacaaaaccagtacctctgaggaagtttgcagcttttatttgaaaatcgatactcaggatattgaagcatcccactacagaggctacggaaactctgattacaaacgcatagtagcatgtgccagctacaagcccagcagggaagaatcatcatctggatcctctcatgcggtgatggacatctccttgcctactggaatcagtgcaaatgaagaagacttaaaagcccttgtggaaggggtggatcaactattcactgattaccaaatcaaagatggacatgttattctgcaactgaattcgattccctccagtgatttcctttgtgtacgattccggatatttgaactctttgaagttgggtttctcagtcctgccactttcacagtgtacgaataccacagaccagataaacagtgtaccatgttttatagcacttccaatatcaaaattcagaaagtctgtgaaggagccgcgtgcaagtgtgtagaagctgattgtgggcaaatgcaggaagaattggatctgacaatctctgcagagacaagaaaacaaacagcatgtaaaccagagattgcatatgcttataaagttagcatcacatccatcactgtagaaaatgtttttgtcaagtacaaggcaacccttctggatatctacaaaactggggaagctgttgctgagaaagactctgagattaccttcattaaaaaggtaacctgtactaacgctgagctggtaaaaggaagacagtacttaattatgggtaaagaagccctccagataaaatacaatttcagtttcaggtacatctaccctttagattccttgacctggattgaatactggcctagagacacaacatgttcatcgtgtcaagcatttttagctaatttagatgaatttgccgaagatatctttttaaatggatgctaaaattcctgaagttcagctgcatacagtttgcacttatggactcctgttgttgaagttcgtttttttgttttcttctttttttaaacattcatagctggtcttatttgtaaagctcactttacttagaattagtggcacttgcttttattagagaatgatttcaaatgctgtaactttctgaaataacatggccttggagggcatgaagacagatactcctccaaggttattggacaccggaaacaataaattggaacacctcctcaaacctaccactcaggaatgtttgctggggccgaaagaacagtccattgaaagggagtattacaaaaacatggcctttgcttgaaagaaaataccaaggaacaggaaactgatcattaaagcctgagtttgctttcaaa

SEQ ID NO: 285 - DNA, 1277 bp, Homo sapiens
ctctgggccgctgaggggagctgaagggaggtcaggcaaacactcactcaatctgcctccctccatcaggctgcccttctctggcttcctcctgatccaagttctctacattcatctctctgcctccaggactggtataagagctgagctcaggtgagctggctcctcctgtcttgtctcagcggctgccaacaggaaacccaaggcttttcacccaaatatactgcctgctgtccagagggcacacttaggagatcatgagccatcagctcctctggggccagctataggacaacagaactctcaccaaaggaccagacacagtgggcaccatgggacagtgtcggtcagccaacgcagaggatgctcaggaattcagtgatgtggagagggccattgagaccctcatcaagaactttcaccagtactccgtggagggtgggaaggagacgctgaccccttctgagctacgggacctggtcacccagcagctgccccatctcatgccgagcaactgtggcctggaagagaaaattgccaacctgggcagctgcaatgactctaaactggagttcaggagtttctgggagctgattggagaagcggccaagagtgtgaagctggagaggcctgtccgggggcactgagaactccctctggaattcttggggggtgttggggagagactgtgggcctggagataaaacttgtctcctctaccaccaccctgtaccctagcctgcacctgtcctcatctctgcaaagttcagcttccttccccaggtctctgtgcactctgtcttggatgctctggggagctcatgggtggaggagtctccaccagagggaggctcaggggactggttgggccagggatgaatatttgagggataaaaattgtgtaagagccaaagaattggtagtagggggagaacagagaggagctgggctatgggaaatgatttgaataatggagctgggaatatggctggatatctggtactaaaaaagggtctttaagaacctacttcctaatctcttccccaatccaaaccatagctgtctgtccagtgctctcttcctgcctccagctctgccccaggctcctcctagactctgtccctgggctagggcaggggaggagggagagcagggttgggggagaggctgaggagagtgtgacatgtggggagaggaccagctgggtgcttgggcattgacagaatgatggttgttttgtatcatttgattaataaaaaaaaatgaaaaaagtgaaa

SEQ ID NO: 286 - DNA, 4123 bp, Homo sapiens
tcgcggaggcttggggcagccgggtagctcggaggtcgtggcgctgggggctagcaccagcgctctgtcgggaggcgcagcggttaggtggaccggtcagcggactcaccggccagggcgctcggtgctggaatttgatattcattgatccgggttttatccctcttcttttttcttaaacatttttttttaaaactgtattgtttctcgttttaatttatttttgcttgccattccccacttgaatcgggccgacggcttggggagattgctctacttccccaaatcactgtggattttggaaaccagcagaaagaggaaagaggtagcaagagctccagagagaagtcgaggaagagagagacggggtcagagagagcgcgcgggcgtgcgagcagcgaaagcgacaggggcaaagtgagtgacctgcttttgggggtgaccgccggagcgcggcgtgagccctcccccttgggatcccgcagctgaccagtcgcgctgacggacagacagacagacaccgcccccagccccagctaccacctcctccccggccggcggcggacagtggacgcggcggcgagccgcgggcaggggccggagcccgcgcccggaggcggggtggagggggtcggggctcgcggcgtcgcactgaaacttttcgtccaacttctgggctgttctcgcttcggaggagccgtggtccgcgcgggggaagccgagccgagcggagccgcgagaagtgctagctcgggccgggaggagccgcagccggaggagggggaggaggaagaagagaaggaagaggagagggggccgcagtggcgactcggcgctcggaagccgggctcatggacgggtgaggcggcggtgtgcgcagacagtgctccagccgcgcgcgctccccaggccctggcccgggcctcgggccggggaggaagagtagctcgccgaggcgccgaggagagcgggccgccccacagcccgagccggagagggagcgcgagccgcgccggccccggtcgggcctccgaaaccatgaactttctgctgtcttgggtgcattggagccttgccttgctgctctacctccaccatgccaagtggtcccaggctgcacccatggcagaaggaggagggcagaatcatcacgaagtggtgaagttcatggatgtctatcagcgcagctactgccatccaatcgagaccctggtggacatcttccaggagtaccctgatgagatcgagtacatcttcaagccatcctgtgtgcccctgatgcgatgcgggggctgctgcaatgacgagggcctggagtgtgtgcccactgaggagtccaacatcaccatgcaggtgggcatctttgggaagtggggcaagggggggatagggaggggggtaacactttgggaacaggtggtcccaggtcgtttcctggctagatttgccttgtctggctcctgcccctgagttgcacaggggaggtatggtggggtcttgccttctgtggagaaaagaaggggaggggatggggagtggtaagaacctaggatttgaattcccagcctggccaacccttgcagccatgtcttggcctcaagtggaacaagggctccttgaggccagcagggttgggggagttggggtgggcctgagcctctttcctgctagagctcttggtcctccctgcctccaccacccatccctgctctgcagaacccctgggtgctgagtggcaggagccccagggttgtcccatctgggtatggctggctgggtcactaacctctgtgatctgcttccttcctttccagattatgcggatcaaacctcaccaaggccagcacataggagagatgagcttcctacagcacaacaaatgtgaatgcagaccaaagaaagatagagcaagacaagaaaaaaaatcagttcgaggaaagggaaaggggcaaaaacgaaagcgcaagaaatcccggtataagtcctggagcgtgtacgttggtgcccgctgctgtctaatgccctggagcctccctggcccccatccctgtgggccttgctcagagcggagaaagcatttgtttgtacaagatccgcagacgtgtaaatgttcctgcaaaaacacagactcgcgttgcaaggcgaggcagcttgagttaaacgaacgtacttgcagatgtgacaagccgaggcggtgagccgggcaggaggaaggagcctccctcagggtttcgggaaccagatctctcaccaggaaagactgatacagaacgatcgatacagaaaccacgctgccgccaccacaccatcaccatcgacagaacagtccttaatccagaaacctgaaatgaaggaagaggagactctgcgcagagcactttgggtccggagggcgagactccggcggaagcattcccgggcgggtgacccagcacggtccctcttggaattggattcgccattttatttttcttgctgctaaatcaccgagcccggaagattagagagttttatttctgggattcctgtagacacacccacccacatacatacatttatatatatatatattatatatatataaaaataaatatctctattttatatatataaaatatatatattctttttttaaattaacagtgctaatgttattggtgtcttcactggatgtatttgactgctgtggacttgagttgggaggggaatgttcccactcagatcctgacagggaagaggaggagatgagagactctggcatgatcttttttttgtcccacttggtggggccagggtcctctcccctgcccaggaatgtgcaaggccagggcatgggggcaaatatgacccagttttgggaacaccgacaaacccagccctggcgctgagcctctctaccccaggtcagacggacagaaagacagatcacaggtacagggatgaggacaccggctctgaccaggagtttggggagcttcaggacattgctgtgctttggggattccctccacatgctgcacgcgcatctcgcccccaggggcactgcctggaagattcaggagcctgggcggccttcgcttactctcacctgcttctgagttgcccaggagaccactggcagatgtcccggcgaagagaagagacacattgttggaagaagcagcccatgacagctccccttcctgggactcgccctcatcctcttcctgctccccttcctggggtgcagcctaaaaggacctatgtcctcacaccattgaaaccactagttctgtccccccaggagacctggttgtgtgtgtgtgagtggttgaccttcctccatcccctggtccttcccttcccttcccgaggcacagagagacagggcaggatccacgtgcccattgtggaggcagagaaaagagaaagtgttttatatacggtacttatttaatatccctttttaattagaaattaaaacagttaatttaattaaagagtagggttttttttcagtattcttggttaatatttaatttcaactatttatgagatgtatcttttgctctctcttgctctcttatttgtaccggtttttgtatataaaattcatgtttccaatctctctctccctgatcggtgacagtcactagcttatcttgaacagatatttaattttgctaacactcagctctgccctccccgatcccctggctccccagcacacattcctttgaaataaggtttcaatatacatctacatactatatatatatttggcaacttgtatttgtgtgtatatatatatatatatgtttatgtatatatgtgattctgataaaatagacattgctattctgttttttatatgtaaaaacaaaacaagaaaaaatagagaattctacatactaaatctctctccttttttaattttaatatttgttatcatttatttattggtgctactgtttatccgtaataattgtggggaaaagatattaacatcacgtctttgtctctagtgcagtttttcgagatattccgtagtacatatttatttttaaacaacgacaaagaaatacagatatatcttaaaaaaaaaaaagcattttgtattaaagaatttaattctgatctcaaa

SEQ ID NO: 287 - DNA, 4296 bp, Homo sapiens
gtccccagcgcgtgcgcggggccgtggccgaggcctgcgcgccgcccggccgcctgcactgcgcgcgcgcccaccccgcgtgggaggcagcgggaggggcccggagaggtgtggagcggcgcggcgggaggctccgtgggcggccacgggagacagcgccggcgggagcgcgcctctcggcctttcctccgcgcccccgcgtccccagccggccgctccgagaggacccggaggaggcagaggtggctttctagaagatgaccatagaggaccttccagattttccattagaaggaaatcctttgtttggaagatacccatttatattttctgcttctgataccccagttatcttttccatttctgcagcaccaatgccttcagactgtgaattttctttctttgatcctaatgatgcatcatgccaggaaattctttttgatcccaaaacttcagtttcagaattatttgccattttgagacagtgggttcctcaggtccaacaaaacattgacattattggaaatgagattcttaagagaggttgcaatgtgaatgatagagatggattgacagatatgactcttttacattatacctgcaaatctggagctcatggtattggtgatgtggaaacagctgtaaaatttgcaactcagcttattgacctgggagcagacattagtttgcggagtcgctggacaaacatgaatgctttgcattatgctgcttattttgatgtccctgaacttataagagtgattttgaaaacatcgaaaccaaaaggcaatgatgtggatgccacttgcagtgattttaattttggaacagctttgcatattgcagcatacaacttgtgtgcaggtgctgtgaagtgcctcttggagcagggagcaaatcctgcatttaggaatgacaaaggacagatccctgctgatgttgttccagacccagtagatatgccgttagagatggctgacgccgcagccactgctaaggaaatcaagcagatgcttctagatgcggtgcctctgtcatgtaacatctcaaaggccatgctcccaaattatgatcatgtcactggcaaggcaatgcttacgtcacttggcctgaagttgggggatcgtgttgttattgcaggacagaaggttggtacattaagattttgtggaacaactgaatttgcaagtgggcagtgggctggcattgaactggatgaaccagaaggaaaaaataatggaagtgttggaaaagtccagtactttaaatgtgcccccaagtatggtatttttgcacctctttcaaagataagtaaagcaaaaggtcgaaggaagaatataacacacactccttctacaaaagctgctgtacctctcatcaggtcccagaaaattgacgtagctcatgtgacgtcaaaagtaaatactggattaatgacatcaaaaaaagatagtgcttctgagtcaacactttcattgcctcctggtgaagaacttaaaactgtgacagagaaagatgttgccctgcttggatctgtcagcagctgctcctctacatcttctttggaacacagacagagctaccccaagaaacagaatgcaatcagcagtaacaagaagacaatgagcaaaagcccttccctttcatccagagccagtgctggtttgaattcctcagcaacatctacagcaaataatagccgttgcgagggggaactccgcctcggagagagagtgttagtggtaggacagagactgggcaccattaggttctttgggacaacaaacttcgctccaggatattggtatggtatagagcttgaaaaaccccatggcaagaatgatggttcagttggaggtgtgcagtattttagctgttctccaagatatggaatatttgctcccccatccagggtgcaaagagtaacagattccctggataccctttcagaaatttcttcaaataaacagaaccattcttatcctggttttaggagaagttttagcacaacttctgcttcttcccaaaaggagattaacagaagaaatgctttttccaaatcgaaagctgctttgcgtcgcagttggagcagcacccccaccgcaggtggcattgaagggagcgtgaagctgcacgaggggtctcaggtcctgctcacgagctccaatgagatgggtactgttaggtatgtgggccccactgactttgcttcaggtatctggcttggacttgagctccgaagcgccaagggaaaaaatgatgggtcagtgggtgacaagcgctatttcacctgtaagccgaaccatggagtcttagttcgaccgagcagagtgacctatcggggaattaatgggtcaaaacttgtggatgagaattgttaagcttctaaaatattaaataagctcaaatatatatatttggtgtaaataaagagtccatggtaaatggtttactttatttagccatattaaaattttgaaaatatagttatcttcttaaaaaccattataacaattcagagagagttctttacaaagccatgaatatgaactatggggaatcatggttcttttaaagcaattttcaaaataagtaccaattaaagctttaggttccaagaagattctgggactcaggaagaaaaagtgccatcaggtgaccagctgttgcatttcttgcttattctgttttgtttttgcacatcataatggatttttcttagtgccctaattgtgaagggtttctctagctttggttatgtgtaatgttcacgtgacctttttttgtcaatcatttttggaatttttctttctttctgtgctttattactaataagtccaatgagtgagtagtagctagatgactagtatgtagttttatattttggtaaaattatttgccctttcagaaatgcctcatctaaagatacatgataattttggagttggaaggggccttagaggctctccagctctgcttcttgcccattgccaaatactgaaatggaagcccgtcttacctggggtcactaactggttggttaactgagctaagaatagactgtgggtctcctcacttgtggcccagtgctctttctgctatacaaaatgtctaatctcagatttttcttctgctgcttgactgcttcatctggatgaactacaaaaaacccatgattaaggtttatgaattcaagtaataattagattttttttgcacagacttacttaacttccttattggatatgtttgtaacacataaacacaaagcacttttcaaacatgatgcacttttatctttgtgaataatttactgtcctttcctcctgggatatgagaaacattttaaaaaacgtatttaacagaagagagcaaataaagatatatcaggaaggatgtattagttatttacttaaatgtttataatatctggattttttttgttttgttactcatagaactggtgttgtttgctgtttttatttctctaattgttgcagagttctgcctgttacaaagctacagaactgtattgtttttattttccttcttgagcacatgttaacaaactaagcttcacattagagtgatgtcataatgtaaaatgtttgcattgtggttaggtattgaagtttatgtcctgtctgtgtaaagattcatcttttattgtaaatatttagactttaccacagaaatattggaacagtttgctttataagattaaaaagcatccttcagaatggagcttgccttgtgcttagaaataatatgttgaactattttgcaatatactattttaaatctaaattctgtcacttcgctgcctttttaaaatagtgtggtatttcaaatattgctagagctattttcctgaaatacatttgcaaaataaggctgctttgtaatcaaggaatatttttattgattgaaggaaatgactgtactgcgattcaaaagtaaacttattttattatacagattatttcttaaaaactctatttataccttaacatgaaatccatgaccacaccaaacttggttattcataatttttcctgttaaatataaaacactgtaagttaaaaacagtaatgccaacattgaatttatttttgaggtcaaagaaccagttgttctctttatatttagatgaggatgattgagtccatatactatgtatgtttacatatactatacatgcacattaggtgttttcatttgtgttttgcttatgaaatgtcatttaaagttcacttcttgagcatcaataaaaagggaagctgtgtggttttggaa

SEQ ID NO: 288 - DNA, 68 bp, Homo sapiens
aaggtattagaaaaaccatttcataactttgtcaaagttaaattataggctaaatcctatatatctta

SEQ ID NO: 289 - DNA, 5793 bp, Homo sapiens
gtggcgatcatggcaagttagaagttttctgactcctttcggaggagcctccgggaccccggggagtaacaggtgtctggaggctgaagggtggaggggttcctggatttggggtttgcttgtgaaactcccctccaccctcctctctcgcacccacccaccccctcacccccttctttttccgtccttggaaaatggtgtccaagctcacgtcgctccagcaagaactcctgagcgccctgctgagctccggggtcaccaaggaggtgctggttcaggccttggaggagttgctgccatccccgaacttcggggtgaagctggagacgctgcccctgtcccctggcagcggggccgagcccgacaccaagccggtcttccatactctcaccaacggccacgccaagggccgcttgtccggcgacgagggctccgaggacggcgacgactatgacacacctcccatcctcaaggagctgcaggcgctcaacaccgaggaggcggcggagcagcgggcggaggtggaccggatgctcagtgaggacccttggagggctgctaaaatgatcaagggttacatgcagcaacacaacatcccccagagggaggtggtcgatgtcaccggcctgaaccagtcgcacctctcccagcatctcaacaagggcacccctatgaagacccagaagcgtgccgctctgtacacctggtacgtcagaaagcaacgagagatcctccgacaattcaaccagacagtccagagttctggaaatatgacagacaaaagcagtcaggatcagctgctgtttctctttccagagttcagtcaacagagccatgggcctgggcagtccgatgatgcctgctctgagcccaccaacaagaagatgcgccgcaaccggttcaaatgggggcccgcgtcccagcaaatcttgtaccaggcctacgatcggcaaaagaaccccagcaaggaagagagagaggccttagtggaggaatgcaacagggcagaatgtttgcagcgaggggtgtccccctccaaagcccacggcctgggctccaacttggtcactgaggtccgtgtctacaactggtttgcaaaccgcaggaaggaggaggcattccggcaaaagctggccatggacgcctatagctccaaccagactcacagcctgaaccctctgctctcccacggctccccccaccaccagcccagctcctctcctccaaacaagctgtcaggtaagcaaaggttgggcctcactgcctcggcaacccaaccatcctggttcttgccacggatcttatctggtttaagggttttcagaggagcaaacgcttttgagatgatcctagggccgctctctcattgccagaatatactcccctggaaataatgtgtggctctgatcagtttcctccaactcctggttcagccattgccctgtgagggctcactcggcttccagggagccctttaccctatttgtctccttccctcttcttctccctgtgtggctgctgactcagcggtcattctacactgaggaggctgccttatgggtgggccagatccaaaccgcaggcaaacgggtcgtgatggcgtggcaaccctcactgtgttggaggatggcactccggccacctcctccatctctggccatatcctgcccctcgctcggtccggctgcctcaggagaagctcagtagcctttggggacggccactctgttggtggcctctgcttgttggcttccgtgtgtcatcagggttggtgggggtcagtcacttgaaatctttgcagcaatgagttgggaaaaactgaccgagtacctgctccatcatgcttgattgagtgctcctgtgtgctgggccctggcctggattagaatgcctctgctgtgggctttgggtttgtcaggatggaatcctacagcctcctcgggggaaagcacacctcatgctgagcgctgtgttaggcacaggctgggatggagcacttcttctggtccttcattcttctggcaaagctggcttcctagaatggatgtgctcactggggtctgtgtggtgcccatgaggacaaagtgtagcagcctcctgcctgctccaagaaaagggcttgcgaaaggaaagccaaacactgtttctaactcaggggtgattctgaaacctgttggctcccctcacctgtcggttgcccttctgatgagaaaggcctgagggctgggggctgacccaagtgttgaggggaccaaagccaccaagacaggctcggagccatcagctgggtggtgtacaagcatttgttccatgcctgctgtgccctcccatagcactgcctcttccagggcctctgggagcctgacagtgcccagcatgaaggtggggccagtgctgggggtttctgtaggtcccactcccacagaggagagaggctcagccacacaggaagaaagtcttggttacttaagaggcagagaagcccctaggcaaagactggcctgattgcagagtaacttcgcccctttagggaaattcaaagcagggttctgagggttgtggcaaatggcacatggctggcactgagcagtaccagtgtgcttgcccaccacagcgatccacggagctgaagctgggagctacagggggcgtggttggggcaaggggcattactgggaagacaatggccattgtgttgggacctgtgatctccacaccaaagtcagggagcctggaagccaaacaaaggcccagcagccttctgacaagcaagggctgtgctgaggtcaccacggggtcgttggtttaggcatcctgtgtgctgacaggagacccagagagctagggctggagggacagggagcagggcagaaaacacagcctgtgtactcctctgactggagtctaggaagggcgtgtcccatgggaagtggatactctggggtgcccctgaagtctggatctttctaaaaatcttgtaatgttagaatttggagggaatttgaagaaaggaactgaggcccagaaagaggcagtgatttgccaaagtgacacagagcaatggtagcaaaacaaggactagagctcaggcctgctggttcccactccatactttcccacagcactacgatgtgttgaatgcttaccaagtcctgggaatatgctagtgatgtacgagctgcgcgtcctgccctctgggaggttactgtctggtaggaaggatatcgggtcactgtcgagtccccagaaccagctgcagatggaggttttgtttgggggctttgtggatctttctgcggtgtaatagatcctattactgtttctggagcaacagttatgggacactgaatattatcagtggctgcctttcttctgtcttttttttttttttttttttttgagagacagggtctacctctgtcacccgagctagagtgcagtggtgcagtcttggctcactacagcctcgaactcctggtctcaagcagtcctcctgtcttagcctcccaaagtgctgggattacagttgtgagattgtgcccagcccttctgctttaattttcactctgggctcctcaacatggtccttgtcccaagcccagggactggcttctctttctctgagtgtagttatgtatctgggttctaaccagtaaggttataactgtggctaattcacataacttctctgagtctgaatttcctgcctacaaaatggagaaataggaccttccacacagggtgcatgtgaggatgaaaggagtgaatgtataaagacacctttcccgataacccatactaccctcattatgactcttaacattagagagggctaaacaagggcagtgagaagactggcaggcagcagaaatcattttctttttgatctcacacaccagggcattccccctaagaggcagtgagatgtagcctggccctggaactagaaacagaggtggctgctgtgctagtgcctgagatgcacgatgctggggtcaaagacttgtgtccccacctcaggctgccaggatggcgtgtgtgccgtgacagggctcccgagtcatgcactcaggcagacagcaggctggagcccagcattcaggggtggcttctgtctgtagagccgcatggcactcttcccacctcagtgcccacagccaaggtagggtcactaaccaagccagaaacgtaactgtgtgcagaataccgaaaaaaaaaaaaaagagtgcgctacagccagcagggaaacaatgagatcacttcctcctcaacaatcagtcaccatggcaacagcgccatggtgaccagccagtcggttttacagcaagtctccccagccagcctggacccaggccacaatctcctctcacctgatggtaaaatgatctcagtctcaggaggaggtttgcccccagtcagcaccttgacgaatatccacagcctctcccaccataatccccagcaatctcaaaacctcatcatgacacccctctctggagtcatggcaattgcacaaagcctcaacacctcccaagcacagagtgtccctgtcatcaacagtgtggccggcagcctggcagccctgcagcccgtccagttctcccagcagctgcacagccctcaccagcagcccctcatgcagcagagcccaggcagccacatggcccagcagcccttcatggcagctgtgactcagctgcagaactcacacatgtacgcacacaagcaggaacccccccagtattcccacacctcccggtttccatctgcaatggtggtcacagataccagcagcatcagtacactcaccaacatgtcttcaagtaaacagtgtcctctacaagcctggtgatgcccacacaccacttacttcgtgcgcaacaacaaggaccctgttttccacaccatcaccctctgggcagctgtcatggaaaagcccagtgacctgaccggcacctgcgagaggtccctgcttacctgacggacgtcctgctggcacctcagacaatccactctcaggaggcgcagcccgaagcccagtttcccttctatgcagtattgccacaatgcctctcccacgatgtcaaggactcctgtctgtcctggaggtgggagacaaggaaccaccgaagaggaagcaagaaagccgtactgtctatgttgtgatccttcatcgaacaaactgatgcgaaaacttgaatctgttactgaaatgaggagagaaggacatgtgctattgaactgagccaaacacactgtaaatatccacagactccctcccctgcccccatcccacatgatcttgagatttcttttaaagaagtaaatttgtccaatggctgtaaactataaactactgtaattaagtgcaatttcccctctgtgtcctctcccctctgccctgtatataatactaaagtgtctattagttttctttgtaaaggtcagagtcaaaatttcaaaagtgatctgtcccctctcccctcatggagaaacatcctaagtgggaagtgaagccccttgtcctctcccgcgggcctggacacttatggggacagcataccttggactgactaccagctaactccagtctcctgacattaagacacacctctggatccctggaggggctgaatgtagtgtgtcagagtaacatgccagcttcctgtgggccaggagctcagccgtgcactccctaagaaaccccagggcagggaaactggctgtttgatagcagaagaaaaagttgcagtctcagaaagccttccattaaaacaatttattttatcacta

SEQ ID NO: 290 - DNA, 1424 bp, Homo sapiens
cacaatggacaatggcaactgcccacacactcccatggaggggaaggggatgagtgcagggaaccccgaccccacccgggagacctgcaagcctgcagacactcccctcccgcccccactgaacccttgacccctgccctgcagcccccgcagcttgctgtttgcccactctatttgcccagccccagggacagagctgatccttgaactcttaagttccacattgccaggaccagtgagcagcaacagggccggggctgggcttatcagcctcccagcccagaccctggctgcagacataaataggccctgcaagagctggctgcttagagactgcgagaaggaggtgcgtcctgctgcctgccccggtcactctggctccccagctcaaggttcaggccttgccccaggccgggcctctgggtacctgaggtcttctcccgctctgtgcccttctcctcacctggctgcaatgagtgggggagcacggggcttctgcatgctgaaggcaccccactcagccaggcccttcttctcctccaggtcccccacggcccttcaggatgaaagctgcggtgctgaccttggccgtgctcttcctgacggggagccaggctcggcatttctggcagcaagatgaacccccccagagcccctgggatcgagtgaaggacctggccactgtgtacgtggatgtgctcaaagacagcggcagagactatgtgtcccagtttgaaggctccgccttgggaaaacagctaaacctaaagctccttgacaactgggacagcgtgacctccaccttcagcaagctgcgcgaacagctcggccctgtgacccaggagttctgggataacctggaaaaggagacagagggcctgaggcaggagatgagcaaggatctggaggaggtgaaggccaaggtgcagccctacctggacgacttccagaagaagtggcaggaggagatggagctctaccgccagaaggtggagccgctgcgcgcagagctccaagagggcgcgcgccagaagctgcacgagctgcaagagaagctgagcccactgggcgaggagatgcgcgaccgcgcgcgcgcccatgtggacgcgctgcgcacgcatctggccccctacagcgacgagctgcgccagcgcttggccgcgcgccttgaggctctcaaggagaacggcggcgccagactggccgagtaccacgccaaggccaccgagcatctgagcacgctcagcgagaaggccaagcccgcgctcgaggacctccgccaaggcctgctgcccgtgctggagagcttcaaggtcagcttcctgagcgctctcgaggagtacactaagaagctcaacacccagtgaggcgcccgccgccgccccccttcccggtgctcagaataaacgtttccaaagtgggaa

SEQ ID NO: 291 - DNA, 6876 bp, Homo sapiens
caagccatagcaggaaacagcgagcttgcagcctcaccgacgagtctcaactaaaagggactcccggagctaggggtggggactcggcctcacacagtgagtgccggctattggacttttgtccagtgacagctgagacaacaaggaccacgggaggaggtgtaggagagaagcgccgcgaacagcgatcgcccagcaccaagtccgcttccaggctttcggtttctttgcctccatcttgggtgcgccttcccggcgtctaggggagcgaaggctgaggtggcagcggcaggagagtccggccgcgacaggacggaccacgcatggagaattttaccacccagagacacgcgagtggccctgtgcaagtttcaactgcgcggggggcggggaattccgcagacaggattctagaatttatgtcttgtgtggtaacatttcagccggtgggtggcggggattaggcgtgaagcggttcagcaggcagaggttctcggacgccctccggcgaagccacctgttgatgcttttgactttctgtccttgttcctcgtcccatctggagcatttccaattctggttttgcggagcagcaggtctgagcttgtccggcgagggtgggagttggtcccggcggagatccagtgggaagagccggcggctgcccgggctagacttctatagatccctttctatagaacttaatctacttaagtcagggagaccacccagaaggaaagagcccatactttcaatcttaggcataagttagcttgataagattttcagaaaaattcccttttaaccacagaactcccccactggaaaggattctgaaagaaatgaagtcagccctcagaaatgaagttgactgcctgctggctttctgttgactggcccggagctgtactgcaagacccttgtgagcttccctagtctaagagtaggatgtctgctgaagtcatccatcaggttgaagaagcacttgatacagatgagaaggagatgctgctctttttgtgccgggatgttgctatagatgtggttccacctaatgtcagggaccttctggatattttacgggaaagaggtaagctgtctgtcggggacttggctgaactgctctacagagtgaggcgatttgacctgctcaaacgtatcttgaagatggacagaaaagctgtggagacccacctgctcaggaaccctcaccttgtttcggactatagagtgctgatggcagagattggtgaggatttggataaatctgatgtgtcctcattaattttcctcatgaaggattacatgggccgaggcaagataagcaaggagaagagtttcttggaccttgtggttgagttggagaaactaaatctggttgccccagatcaactggatttattagaaaaatgcctaaagaacatccacagaatagacctgaagacaaaaatccagaagtacaagcagtctggtggatggaatggaacctggatgaccaaagcctcctttagcttgtggctagaaatcgcgtccctttatattcttcatatcccagatctgccaactccattgccctgtatattcatgatctctgcaaaatgctgccaagcagttcttaacatttcagtcttcaagaaagaatctgggatctgcacaggctggcagagctatggacattcaggggttttgcatgtatgctgaaccctactgccttgctctggtatttggcctcacaaccactgtccaacttcgggtgatgtcacttgggtctcataccttccttgcatgtgtcccaagtttcacaaaacctccttatggaaaagagcacattcgatttcttccttgataaaagggaccagattcacattggccttctgctttacttgcattcctcattgtcttttagactcagcctcagcttgggctttgttagcaagttcactgccaccatagcatcacagcctaaagggcatggctgagactcattgatctatagagcactcttttaccccaacatactctaaatgactgatcaaagatcaaaaacagaagagcatttatactccattcttgttttttgagacctgcttgatttattccgattatttaacacacagggacgcaacagtgatcccaaagtgtgtaaagttaaagccttcaactgcagctgaggagagggcaggaatggggacggtggtgagtcaggaatgacaggcaggcagccatgaccagggcagcctcctccccagggccagggactggggagtggcctaaggagcaggacctaagggtagcccagagctggggaagggggcagagacctccccttggcctaggtctggagctcagaagtgccacatgcctgagggggcagcggcctgggaagggccagaggcagggtcaggagagcaccatttcctggggggctggggacagggaggtgccctataggagaagccaggaggggccgtctgcccctgaggtgggggctgggctggagcaggctgcagcaagaaagacctgaggcaggcacagggcctgagagcccagctgcctgggttcaggggggctcccagggcagcctggcccagggagcagtcctgactctgcaggggatgcccagcaaggggggctgcagacccctcagagcctcccctcctctctccctggaaaggagctggggaacccatagtgcaaatctgtggaccactcagttatggagggaggctgtgcctgaaggtggacactggggtgcactccctccaccatctcgccctgcaccgctgtcctcagtacagccacttctcgtaagagtgcaggccatggatgccaccgtcgatctgggctgacatggtctgcttctcaaacttgagctcccctgagtacatcatggaccgaaggacagacaggctgtgggccccgatatcctggcagccatgctggatgcccactatgaggtagggcacgaacttctgaatggaccctttgtcctggatggagcccaagacatcctgcgtgatcttcgccttatccccgtcgttgaagtattgtttctggctgctgctgctcttctccatggcatccagtgagcccatgccctggtacttcttgagctgcattccgtctgagaagaagcactcgccgggggcctccatggtggcggccagcagggagcccatcatcactgtggaggctcctagggccagggccttgaccacatgccccatggtctggatgccaccatcggctatgatgggcacaccaaagttctgggtatgcttggccaccttgtacacagcagtgccctggggctgactgcaggctatcacttcctggttgatgtagatggagccgcgcagtccatgcccctgcccagcccatccacaccagcgtcaatcaggttgttggcctgggctgctgtcaccacgttccccccaatcacctggaggtggggttacttttgtttgatgtaatgcaccatggcgatctgatacaccgagttcccttgggacgagtccaagcctatgacattgacgcctacctgggtgagcaggtccaggtggtatttgtcatcctcatgggtacccacagctgccccgcccagcagctgctcatgggaatccttggaggccacagggtagtctcggttcttcagcgcggtgcaggtgataatggccaccagctcatcgcgatcattgacgataggcagcttcctttcttactaagctgcaggatctcatttgcctctttcaacctcacactgctggagccaccactagcttgatccttggcatcatcacctcactgaggagggtggtgtggtccttctcagcaagaaagtcgatgtctcgggaggtgacgatgcccaccagcttgctgcccatggtacccgtctcagtgatggggatgccagagaagccatgacgcatcttggcctccaacacatcacccacagtgtgcaaggggctcagcaccacggggtgtgtgataaagcccggttcaaacttcttgaccttctgcacctcactggcctggaactctggggtgcagttgtggtgaatgaaaccagtacctcccatcagagccatcacgatggccaggtcggcctctgtcacagtgtccatgggggaggagatcagcggcgtcttcagagtgaccattgggtcagggctgaggtcaggtccacctcatcagctatgaagtctatgaatcctgggagaatcaagaagtcgttgtaggtgagtccctggtcactggcgaagagctgctgcacggtgtggggaaaagaaagagagatcagattgttactgtgtctgtgtagaaagaagtagacataggagactccattttgttctgtactaagaaaaattcttctgcctcgagatgctgttaatctgtaaccttacccccaaccctgtgctccctgaaacatgtgctatgtcaactcagggttaagtggattaagggctgtgcaagatgtgctttgttaaacagatgcttgaaggcagcgtgctcgttaagagtcatcaccactccctaatctcaagtacccagggacacaaacactgcggaaggccgcagggacctctgcctaggaaagccaggtattgtccaaggtttctccccatgtgatagtctgaaatatggcctcatgggaagggaaagacctgaccgtcccccagcccgacacccataaagggtctgtgctgaggaggattagtaaaagaggaaggaacgcctgtttgcagttgagagaagaggaaggcatctgtctcctgccagtccctgggcaatggaatgtctcggtgtaaaacctgattgtatgttccatctgctgagataggggaaaaccgccttagggctggaggtgggacatgcgggcagcactactgctctttaagtcattgagatgtttatgtgtatgcatatctgaagcacagcacttaattctttaccttgttcttgatgcagagacctttgttcacgtgtttatctgctgaccttctctccactattattctatgaccctgccacacccccctctccgagaaacacctaaaaatgatcaataaatactaagggaactaagaggccggcgggatcctccgtatgctgaacgccggtcccctgggcccccttttttctttctctaccttggactgaaccactattgaagatttatttgataataatttgtaagttttaactcagtacctcccttctgcttttatagttcaaggagcagggacaagttacaggaatgttctccaagcagcaatccaaaagagtctcaaggatccttcaaataacttcagggtgaatgataacaccctatgcccattgtcctgatctgaaaattcttggaaattgttccatgtgattaacatggaactgcctctacttaatcattctgaatgattaaatcgtttcattttctaaatgtgttataatgtgtttagccctttcttgttgctgtatgtttagatgctttccaatcttttgttactactaataatgctataaaataaatatccttgtacttctttgctccataatgggagaagtaaagaacaaagacttaaggaacagcttggcgctcaacgaagaaccagtgaagaaatccattcaggaatcagaagcttttttgcctcagagcatacctgaagagagatacaagatgaagagcaagcccctaggaatctgcctgataatcgattgcattggcaatgagacaggttggagtgcaatggcgcaatctcagctcaccgcaatctccacctcccaggttcaagcgattctcctgcctcagcctcctgagtaaagcttcttcgagacaccttcacttccctgggctatgaagtccagaaattcttgcatctcagtatgcatggtatatcccagattcttggccaatttgcctgtatgcccgagcaccgagactacgacagctttgtgtgtgtcctggtgagccgaggaggctcccagagtgtgtatggtgtggatcagactcactcagggctccccctgcatcacatcaggaggatgttcatgggagattcatgcccttatctagcagggaagccaaagatgttttttattcagaactatgtggtgtcagagggccagctggaggacagcagcctcttggaggtggatgggccagcgatgaagaatgtggaattcaaggctcagaagcgagggctgtgcacagttcaccgagaagctgacttcttctggagcctgtgtactgcggacatgtccctgctggagcagtctcacagctcaccatccctgtacctgcagtgcctctcccagaaactgagacaagaaagggggacaattcccggaagtggaattacagagtcaaaggacatgcatttttcaagcctcggatgcatcttactagatgtcctatagaaaacgcccactcctggatcttcacattgaactcaatggctacatgtatgattggaacagcagagtttctgccaaggagaaatattatgtctggctgcagcacactctgagaaagaaacttatcctctcctacacataagaaaccaaaaggctgggcgtagtggctcacacctgtaatcccagcactttgggaggccaaggagggcagatcacttcaggtcaggagttcgagaccagcctggccaacatggtaaacgctgtccctagtaaaaatacaaaaattagctgggtgtgggtgtgggtacctgtattcccagttacttgggaggctgaggtgggaggatcttttgaacccaggagttcagggtcatagcatgctgtgattgtgcctacgaatagccactgcataccaacctgggcaatatagcaagatcccatctctttaaaaaaaaaaaaaaa

SEQ ID NO: 292 - DNA, 2610 bp, Homo sapiens
agccgcagccggagcccgagccgcggggcgggtgcgaagatgcacacgacccagaaggacacgacgtacaccaagatcttcgtcggggggctgccctaccacaccaccgacgccagcctgcgcaagtacttcgaggtcttcggcgagatcgaggaggcggtggtcatcaccgaccggcagacgggcaagtcccggggctatggatttgatctcagttttatcatgaatgacttctccattgtgattcttgatttccttcatgggttaatttagaggttatgtatgtatgtctgtgtgtgtctgttgctaaggtcaccatggctgaccgggctgctgccgaaagggcctgcaaggatcccaatcccatcattgatggcagaaaggccaacgtgaacctggcatacttaggagcaaaaccaaggatcatgcaaccaggttttgcctttggtgttcaacaacttcatccagcccttatacaaagacctttcgggatacctgcccactatgtctatccgcaggcttttgtgcagccgggagtggtcattccacacgtccagccgacagcagctgccgcctccaccaccccttacattgattacactggagctgcatacgcacaatactcagcagctgctgctgctgccgccgccgctgctgcctatgaccagtacccctatgcagcctctccagctgctgcaggatatgttactgctgggggctatggctacgcagtccagcagccaatcaccgcagcggcacctgggacagctgccgccgccgctgcagcagctgctgccgctgcagcatttggccagtaccagcctcagcagctgcagacagaccgaatgcaatagaccagccatctgatcaaagttgaattgttttctctttccctcccaattttccaatttttagtagctaataagagagttaacattgacttaacagctttaaaaaaaaaaacagccatgctattgtgaagcagagttattattttttttatactccaggtagtgttctagatgagaaagaggtaagaatgaggggaatgggcacaattttggaaatcaatcccaaagagcctgagtaaatgaaaggccactacgaaatgacgccaggagtaacaacggaacttcacttttgtaacgggatttttatttttgctctttttatagtatcagggaagcaaactgccttttacaagttagaaaatgctgtttgaatctagttgaaccagggaatacagagcgagcaatatgtagcttgaattacatttaaaagcagattttttacaaacaaaatggcgaaagcactgattgtcatttttagcagtcacttaaggcctatagaacttttttcaagtcggaaggtcctgttcttactatctcaaaaatgggcatcgaacaatcaatctaggagcgtggcagtgggtaaaatggtggacaggcaccaaagctattttctcatctgtcctgtggatgagtggaactgtggaacaagtgatgtggaattaatgggtgcaacagctgtacagacaatcaataacacacacagttctggaaagaacacatcacttgtgcttgtttgatgagcttgtcacattctaatccctctccccatcctgtttcaattttgggaaacttgtatctgctggtgtcagcaattctgattctgaaataggatcaggcttttactacaacagccttctctttctatttattgtgtcgactcgtggcttatgaataaaggcaggcaaagtttgcagaactgtcttaaggacatttattttttttccctttttaagtaattttacactttagtatctatttcagagtcatatttaaaactatttattagtgactacagtacatgagacaacaaggttactgagattacaattcttcaaaggttaatgataatgtggtttatactgtgccttaatagtaatgctatttaagatatttatttttaagttttactatgctgcactctaaagaaaggaactttagatgtgacactgtaaaattatgtattcatctcatggcataaattatttagtaagtctagatgtagcgtattaaatattaacctattcaactaaagatgttgacttggatttatttaaattcatatgtgcactgtataagagagtactcttacattaacacattttagtttagtttttagatttttttttaaacgatatattgctagtttcatgcttcctcctctgattttgcctgtgtagatttcatttattggtaattcattagtttaacactattatgtagtttttaaatgctgctttacatttttcttctgaaactgcaatacttgcaatttttattcttaaactaaattgaatactattttacactgtattggatttttatacttgaacaatttcatacaagggaagacaggttagcatttttatggactttctccattatcactggatttactttaagtattcccatactagacagtgttatgtaatgtagacatgactctcctgtgcaaattatttattcgttgtgtatattgctttataacatttcagatcttctaatctattcacttgtattaaatataatttttaaaaacttc

SEQ ID NO: 293 - DNA, 3363 bp, Homo sapiens
tgacgcccccttctcggccgccagccctccacacctcatctgccttgctccacctccctagtgcacccgctccagccccgtctgcccaggagggcgcttggatttccttctccgcggcgcgtatctaacccttcctgcatgtatttcactgcaggctgaagaaagctcagtctcaattgtgtttcctgcctgtcagcctcttgcctcctaaacgtgtaccatttccacttgatgtcatcacgcagaaggggtgaaagagactcggtgacagatacagaaatgaacacacctgtgagtactggatgcctgtgagcttgccattacctgcactgcaaagacacagggcggtggcctctgagaagcagctccttccccttcaccttggccttgcccttcctgctcacggtccaccatggagacgctgtcccaggactctctgctggaatgtcagatctgtttcaattactacagcccccggcgcaggcccaagttgctggactgcaagcacacctgctgttcagtgtgcctgcagcagatgaggaccagccagaaggatgtgcggtgcccctggtgccgcggtgtcaccaagctgcctcccggcttctccgtgtcgcagctcccggacgacccggaggtcctggctgtcatcgccattccacacacttccgaacacaccccggtcttcatcaaacttcccagcaatgggtgctacatgctgcccctgcccatctccaaggagcgtgcgctgctgcccggagacatgggctgccgcctgctgcccgggagccagcagaagtccgtcaccgtggtgaccatccctgctgaacagcagcctctgcaaggtggggctccccaggaggcggtggaggaggagcaggacaggcggggcgtggtgaaaagctccacctggtcgggggtgtgcactgtcatcttggtggcttgcgtcttggtcttcctcctcggcatcgtgcttcacaacatgtcttgcatttctaagcgcttcactgtgatatcctgtggctgaagagggctgcagggaagtctcttgtgggtgccaacttaggggttgagcaggttgatgatgagatcccagtgagaagatggggggcaacactgaccatttggtgctgagcgctggcctctgggttgcctcttgattaccccaagacagacacaaagggcagaaggtgcggtctcaacaagataccaggtgaattgttctgagtgttgatggcaacagcttggaagatgattgcatgcatcctcataatcatgtattcaatggactgtaatttatgatttttcaaaatcatgttacaagatagacatattctacttagacgttaaactgtacaagtgcgtacaatgtgaccttctctaaatgcggtagattcaaacaaagatgctctgtagacaagtagaattaaacctgcgaatccgtgtaaaaattcagtgaagacatgcactgctggcttctttattttttttttctttttattgaaacccagtcttcatttagttgctaaggcttttaatacattttgaatggcaccaaaacaaaataagtcaaaatggacagtcattttatttggaggaaatatttgaacaagtgtctccaatgtgttgtgttttgtcatgaaccttcattttcttcacttgtaattagagcttgctacgtgtttatggaactgaaagctcaacaggggagcaataaaccgagaaatcatgagaaatgtctaatcccatgggaaaacctgtatgccgattttcctcaagccatctcacaaaataagaatttcaaatgtaaatattgtgtatttgtgtgtgtatgtgtgtgtgtctaatttgatttacctcaggtgtttgagtctttgctgaagaatcctgggatgaagacttcattgggcatgaatgagtcaagtctctgaagcggtggccacttcttggacatcttgacccagcgagtggtctcctacacgtcacctgcaacactcgctcctcttctgtgtatttaagtcctgcattttgtaagaggcaaatggagagtaacagaagagtgtcttttctcctggttttggagtcttgcactggccatgagtgttgtgactgatggtcaacccaggcgggcattttaataaatggcctgtgattcttttttgaaagatgctcttccacaagagttaagccagttagaattcctgtttcctcttgttgatatgagagaagatctcctgtattttaacacgtttttaccaagaaaggtggcaaggtaaactaacagctcaaattcccaatataagtggaccagttcctcataaactgtcaaatgttcttaaatgtgtaatgatctatagatgctcatgaagaaagatctgctacaagtacgtgataaattcctatccctgggtgcatgtgcattcagaaatagctgtgagctttacagctctcatctaacttcttttatggaattcatgaagcaagtggtatgtgacaaggactccacttataaatataactgtttttatgttccactgaatccctgaaaatggtgaggagggtggggggaagtgaaggaaagacaagcagggctaattccaaaaagcaaggctagaaaatagccctgtgaggtcaagacaatttaatttatttacatgctgtctgttatcttcaagcagcacaaaatatgcatataaaagtgatggaattaatgtgaaataaaacaaaaatataatggctagaatacaaagctaatactgctaattggcatgagaattcaacataaaattgtgagctctgatttttcaaattgatcataaaacctttaggaaatgtatttgaaagctcaaaatagaaattaggttaaaatgccattttattgtgtaagctcttgggcattatacaacaaataatctaggatttatttggtattaataatttaggtgtcatattagctgaatactatcctctattacatttcgaatagactttgcccttgcaattttaagctatgccatattcagattaattttgtgagtgatatctgcatatgtttctgtacagtgtgaaatgactgaccctgtagtatagtacgtgatagagttctacttgttaaagtaggttagatatagacactaatgtgtgtgatgatagtgtcctgtgtttcttagtgcaaatctgtagagtaaaaatgtccatagaacttttacttaaaaacaatcccatgctagagttgccattaagcagtgcaaaattaatcggctgtatggtagattcttgaccttaaatttaacaacaacaaccaaaatcagattttttttgtgagtcttactgacctaagaaacattgtttaaattgtttaaatgg

SEQ ID NO: 294 - DNA, 628 bp, Homo sapiens
acagaagtccactcattcttggcaggatggcttctcatcgtctgctcctcctctgccttgctggactggtatttgtgtctgaggctggccctacgggcaccggtgaatccaagtgtcctctgatggtcaaagttctagatgctgtccgaggcagtcctgccatcaatgtggccgtgcatgtgttcagaaaggctgctgatgacacctgggagccatttgcctctgggaaaaccagtgagtctggagagctgcatgggctcacaactgaggaggaatttgtagaagggatatacaaagtggaaatagacaccaaatcttactggaaggcacttggcatctccccattccatgagcatgcagaggtggtattcacagccaacgactccggcccccgccgctacaccattgccgccctgctgagcccctactcctattccaccacggctgtcgtcaccaatcccaaggaatgagggacttctcctccagtggacctgaaggacgagggatgggatttcatgtaaccaagagtattccatttttactaaagcagtgttttcacctcatatgctatgttagaagtccaggcagagacaataaaacattcctgtgaaaggcacttttcattcca

SEQ ID NO: 295 - DNA, 113231 bp, Homo sapiens
gagcagtcgtgcattcccagcctcgcctcgggtgtagggattgcatagaaaagcaaaactacacagtcttgactgtgtagttttgtttttaggattagaggctcaccgattcatgtcggagatggtcagaaaaaccaactctccataggacgtcgtttcagaagcaaccttgggcttagtcccaccctttttaggcactcttgagaaatcagagtgcctagaaagatgacaactcaagcaccgacgtttacgcagccgttacaaagcgttgtggtactggagggtagtaccgcaacctttgaggctcacattagtggttttccagttcctgaggtgagctggtttagggatggccaggtgatttccacttccactctgcccggcgtgcagatctcctttagcgatggccgcgctaaactgacgatccccgccgtgactaaagccaacagtggacgatattccctgaaagccaccaatggatctggacaagcgactagtactgctgagcttctcgtgaaagctgagacagcaccacccaacttcgttcaacgactgcagagcatgaccgtgagacaaggaagccaagtgagactccaagtgagagtgactggaatccctacacctgtggtgaagttctaccgggatggagccgaaatccagagctcccttgatttccaaatttcacaagaaggcgacctctacagcttactgattgcagaagcataccctgaggactcagggacctattcagtaaatgccaccaatagcgttggaagagctacttcgactgctgaattactggttcaaggtgaagaagaagtacctgctaaaaagacaaagacaattgtttcgactgctcagatctcagaatcaagacaaacccgaattgaaaagaagattgaagcccactttgatgccagatcaattgcaacagttgagatggtcatagatggtgccgctgggcaacagctgccacataaaacacctcccaggattcctccgaagccaaagtcaagatccccaacaccaccgtctattgctgccaaagcacagctggctcggcagcagtccccatcgcccataagacactccccttccccggtcagacacgtgcgggcaccgaccccatctccggtcaggtaaagctgccatagagagagcagattattgcacattttggaactaggttttgaaacgagaaagattcccttgtccccctcgcagggcatgcgacgcggagagtggttcgcttcttcagtgtcccgctgctcaaacctctaggggagcatacaaacgggcaggttgtggggctccgtgttcctctggacatccagccgcttgtgtgtctgcctactagggtctcaggggtttttataggcatagggtgtgggcgtggcaggtcagggtgatcttgggaaatgcaacatttgggcgggaaggcaggagtgtttgtcctcacctaggtccatgggcacaggcctcgctagggaccacgcacttctcttcccagcacttccctgccctcctcccgtgtaagtttcatgcactcaaaaatgtagcaggtgacaaaggaggtaaaccaagaagttactgaatatgattttcacaaatcctcactgtccacaggtaaattgaagacccttataaacttctgaattcttatttatatttcatgtaataaatatctactttaggggccaaaatatggcacagtgaaaggagaagagcacagaagttagagttcaaagccctaaggacaaatcagcctgatcacttaacagtttgatttagggcaataagtataaataataaaataattgttattatatatggatcacttcctctatcagattggaactatacatacattatctcattaaatgttcacaacctgtaagaattattatcctcaatgttattgataggtaactggaattaaagaagttaagcagtttatttaaggtttcagttgtgtcatctgtaaattaaagagagtcacaataagaatgatctcaagctgcattttggggcttcaatgagataattagttgaaagtgccttgtaaatagaaaataattatgccaatattcttatattcagatggtaagtaaaaccttttaaatattttgcagtccgtgtctccagcagcaagaatctccacatcccccatcaggtctgttaggtctccattgctcatgcgtaagactcaggcatccaccgtggccacaggtcctgaagtgcctcccccttggaagcaagagggctacgtggcctcctcatctgaggctgagatgagagagacaacgctgacaacctctactcagatcaggacagaagagagatgggaagggagatacggtgtccaggagcaagtgaccatcagtggtgctgcgggtgctgccgccagtgtgtcggccagtgctagctacgcagcagaggctgttgccactggtgctaaagaggtgaaacaagatgctgacaaaagtgcagctgttgcgactgttgttgctgccgttgatatggccagagtgagagaaccagtgatcagcgctgtagagcagactgctcagaggacaaccacgactgctgtgcacatccaacctgctcaagaacaggtaagaaaggaagcggagaagactgctgtaactaaggtagtagtggccgccgataaagccaaggaacaagaattaaaatcaagaaccaaagaagtaattaccacaaagcaagagcagatgcacgtaactcatgagcagataagaaaagaaactgaaaaaacatttgtaccaaaggtagtaatttccgcagctaaagccaaagaacaagaaactagaatttctgaagaaattactaagaaacagaaacaagtaactcaagaagcaataagacaggaaactgagataactgctgcatccatggtggtagttgccactgcaaagtccacaaaactagaaacagtcccgggagctcaagaagaaactaccacacaacaagatcaaatgcacctaagttatgaaaagataatgaaggaaactaggaaaacagttgtacctaaagtcatagttgccacacccaaagtcaaagaacaagatttagtatcaagaggtagagaaggcattactaccaaaagagaacaagtgcaaataactcaggagaagatgagaaaggaagccgagaaaactgccttgtctacaatagcagttgctactgctaaagccaaagaacaagaaacaatactgagaactagagaaactatggctactagacaagaacaaatccaagttacccatggaaaggtggacgttggaaaaaaggctgaagctgtagcaacagttgttgctgcagtagaccaggcccgagtcagagagcccagagagcctgggcatcttgaagaatcctatgctcagcagaccactttggagtacggatataaggaacgcatttccgccgcaaaggtagctgagcctccccaacgtccagcctcagaaccccacgttgtccctaaagcagtcaagcctagagtaatccaggctccttctgagactcatatcaaaactactgatcaaaagggaatgcacatatcatcacagatcaagaaaactacagatctaacaacggaaagattagtccatgtggataaacgcccccgcacagctagccctcactttactgtttcaaaaatttctgttcctaagacagaacatggatatgaggcatcaatagccggtagtgctattgccacattacaaaaagagttgtcagccacatcttctgctcagaagatcaccaaatcggtgaaggctcctactgtgaagcccagtgagactagagtaagggcagagcccacacccttgccacagttccccttcgctgacacaccagatacttacaagagtgaagctggcgttgaggtgaaaaaggaagtaggggtgagcatcactggcaccaccgtccgtgaagagcgctttgaagtactgcacggacgcgaagccaaggtaacagaaacagcaagagtaccagcacctgttgaaattcctgttactccaccaactttggtctcgggcttaaaaaatgtgactgtcatagaaggtgaatctgtcaccttggagtgccacatctctggatacccatccccgacagtgacatggtacagggaagactaccaaatcgaaagttccattgacttccagataaccttccagagtggaattgctcgtcttatgattcgcgaagcatttgcggaagacagcgggcgatttacttgcagtgctgtaaatgaggctggaaccgtcagcacatcctgctatctggctgtgcaggtgtcagaagaatttgaaaaggaaaccacagccgtgactgagaaatttactacagaagagaaacgctttgttgagtcaagagatgtggttatgactgatactagcctcacagaggaacaagcagggcctggagaacctgccgcgccttactttattacaaaaccagtggtccagaaactggtggaaggtgggagcgtggtgtttggatgccaagttggcggcaacccaaagccccatgtatactggaaaaaatctggtgttcctctaaccactggatacagatacaaagtgagttacaacaaacaaaccggtgaatgcaagctggtgatttctatgacttttgctgatgatgctggagaatacactattgttgttcgcaataagcatggagaaacttctgcatctgcttccttgcttgaagaagctgattatgagttactgatgaagtcccagcaagaaatgctttatcagacacaagtgactgcatttgttcaagaacctaaagttggagaaacagcacctggatttgtatactctgagtatgaaaaagagtatgaaaaagaacaagccttaattaggaagaaaatggccaaagatactgtagtggtcagaacttatgtagaagatcaggaattccatatttcttcctttgaagagagacttattaaagaaattgaatatagaataataaagactacattagaagaacttcttgaagaagatggagaagaaaagatggcagttgacatttctgaatctgaagctgttgaatcaggatttgattcaagaatcaagaattatagaattcttgaggggatgggtgtcacttttcattgcaagatgtctggatatccattaccaaagattgcttggtacaaagatggcaagcgcatcaaacatggagaaagataccaaatggactttctacaagatggcagagctagtctgcgtatacctgttgttcttccagaagatgaaggaatctacactgcatttgccagcaatattaaaggaaatgcaatttgctcagggaaattgtatgtggagcctgctgcaccacttggagctccgacttacattcccacactagagccagtgagcagaatcagatctctctctccacgttcagtgagcaggtctcctatacgcatgtctcctgcacggatgtcacctgcaaggatgtctcctgcacggatgtcccctgcaagaatgtcccctggacgtaggctggaggagacagatgagtcacaacttgagagactatataaaccagtctttgtgttaaaacctgtttctttcaaatgtttagaagggcaaactgccagatttgacttaaaggttgttggtagacctatgccagagacgttctggtttcatgatggccagcaaattgtcaatgactatacccataaagtagtcattaaagaagatggtactcaatcactaattattgtccctgccacacccagtgattctggggaatggactgtggttgcccaaaacagggcaggcagatcttcaatttcagtgattttaactgtggaagctgtggaacatcaggtaaaaccgatgtttgtagaaaaactgaaaaatgtcaatataaaggaaggttcccgacttgaaatgaaagtcagagctacgggtaaccccaaccctgacattgtatggttgaaaaacagtgacatcattgtgcctcataaatatcccaaaatcagaattgaaggaaccaagggagaagctgcccttaaaatcgattccactgtcagccaagattctgcctggtatactgcgactgctattaataaagctggcagagacactacaagatgcaaagtaaatgttgaagttgagtttgcagagcctgagccagagagaaagttaatcatcccacgggggacatatagagcaaaggagattgcagccccagaactggagcccctccatttgcgatatggccaagagcaatgggaagaaggtgatctctatgacaaagagaaacaacagaaaccatttttcaagaaaaaactcacttccttaagacttaagcgctttgggcctgcccactttgaatgcaggctaacacccattggtgacccaacgatggtggtggagtggctccatgatggaaagccacttgaagcagccaacaggctccgtatgatcaatgaatttgggtactgcagccttgattatggcgttgcatattctagagacagtggtatcattacttgcagagccactaacaaatatggaacagatcacacatctgctacccttattgttaaagatgagaaaagtcttgtggaagaatcccaattgcctgaggggaggaaaggcttacagagaattgaagaattagagagaatggctcatgaaggtgcacttacaggtgtaacaacagatcagaaagaaaagcaaaagccagacattgtcttgtacccagagccagttagagtacttgaaggggagactgcaaggttccgctgcagggtaacaggctaccctcagcccaaagtcaactggtacctcaatggacagctcatccgcaaaagcaaaaggttcagagttcgctatgatggtatccattacctggacatcgtggactgcaaatcatatgacacaggtgaagtgaaggtcaccgcggaaaatcctgaaggtgtgatagagcataaagtgaagcttgagattcaacagagggaagattttaggtctgtccttaggagagctcctgaaccaaggcctgagtttcacgtacatgaaccaggaaagcttcagtttgaagtacaaaaagtggatagacctgttgacaccactgaaaccaaagaagttgtgaagttgaaaagggctgaaagaattacccatgaaaaagtgcctgaagagtcggaagagctgcgcagtaaattcaagcgcagaacagaagagggctattatgaagccattaccgctgtggagctcaagtctcgaaagaaggatgaatcctatgaggaactcctcaggaagacaaaagatgaacttctccactggaccaaagagttaactgaagaggaaaagaaagctcttgccgaagaaggcaaaatcacgattccaacttttaaacctgacaagattgaactaagtcctagtatggaggctccaaaaatcttcgaaagaatccagagccaaacagtgggccaaggatctgatgcacacttccgggtcagagtcgtggggaaaccagaccccgaatgtgaatggtacaaaaatggtgtcaaaattgaacggtctgaccggatctactggtactggcccgaagacaatgtttgtgaattggtcataagagatgtgactgctgaggactctgccagcatcatggtaaaagccatcaacatagctggagaaacctccagtcacgcattcttacttgtccaagccaagcaattgatcactttcacacaggaattacaagatgttgttgctaaggaaaaagacactatggcaacctttgaatgtgaaacttcagaaccatttgtcaaagtgaaatggtataaagatggtatggaggttcatgagggagataaatacaggatgcactctgacagaaaggttcacttcctctccatactgaccattgatacgtctgatgctgaagattacagctgtgtacttgtggaagatgaaaatgtcaaaacgactgctaaacttattgttgaaggtgcagttgttgagtttgtgaaagaacttcaggacatagaagttccagaatcatattcaggagaattagagtgcattgtatccccagaaaatatagaaggaaaatggtatcataatgatgtggagcttaaatccaatggcaaatatacaattacatctcgtcgtggacgtcagaacctcacggtcaaggatgtaaccaaggaggaccagggagaatacagctttgtcatcgacgggaaaaagacaacctgtaaattaaagatgaaaccccgccccattgctatcctacaaggacttagtgaccaaaaagtctgtgagggtgacattgttcagcttgaagttaaagtctccttggaaagtgtggaaggcgtctggatgaaagacggccaagaagtgcagcccagtgacagggttcacattgtgatagacaaacaatctcatatgctgctcattgaagacatgactaaggaagatgctggaaattactctttcaccattccagcccttggcctctccaccagtgggcgtgtctctgtctatagtgtggacgtgataacacctctaaaagatgttaatgtgattgaaggcaccaaggctgtgcttgaatgtaaggtgtcagtccctgatgtgacttctgttaagtggtacttaaatgatgaacaaatcaagcctgatgaccgtgtacaggccattgtgaaaggtactaaacagcgactagtcattaaccgaactcatgcttcagacgaaggaccttacaagctgatagttggcagagttgaaaccaactgtaatctctctgtagaaaaaattaaaattatcagaggtcttcgtgaccttacctgtacagaaactcaaaatgtggtgtttgaggttgagctgtcccactctggaattgatgtcctgtggaattttaaggacaaggaaatcaagcccagttctaaatataaaattgaagcacatggaaaaatatataaattgacagttctaaatatgatgaaagatgatgaaggaaaatacacattttacgcgggagaaaatatgacatctggaaaacttactgtggcaggtggggccatctccaagccactcacagatcagaccgtagctgaatcccaggaagctgtgtttgaatgtgaagttgccaacccagattccaaaggcgaatggttgagggatggcaaacacctaccactgactaacaacatcagaagtgagtctgatggccacaaaaggagacttatcattgctgccaccaaattagatgacattggagaatatacctacaaggtggccacctccaaaacatctgccaaactcaaagttgaaggcaagtagctgtcaaaattaagaagactctgaagaacctcacagtgacagaaacacaggatgctgttttcactgtcgagcttacacaccctaatgtcaaaggtgtccagtggatcaaaaatggagttgtgctggaatccaatgaaaagtatgctatctctgtcaaaggaacaatttactctctgaggattaaaaactgtgccatcgtggatgagtctgtttatggcttcaggcttggaaggcttggagccagtgccagactgcacgtggagactgtcaagatcattaaaaagccaaaggatgtgacagccttggaaaatgccactgttgcctttgaagttagtgtttcccatgacactgttccagtaaaatggttccataagagtgtggaaattaagccaagtgacaaacacagactggtctcagaaaggaaagtccacaagctgatgctgcagaacatctccccctcagatgctggggaatacacagctgtggtcgggcaattggaatgcaaagcaaaactgtttgtggagacattacatattacaaaaaccatgaaaaatatcgaggtgcctgagaccaaaactgcctcttttgagtgtgaggtgtcccacttcaatgtcccttccatgtggctgaagaatggtgtggaaattgagatgagtgaaaagttcaagatagttgtgcagggaaaactccatcagctgatcatcatgaacaccagcacagaggactcggcagaatacacatttgtctgtggcaatgaccaagtcagtgccaccctgacagtcaccccaatcatgattacttccatgctgaaagacatcaacgctgaagaaaaagacactattacttttgaggtgacagtgaactatgaaggcatctcttacaaatggttaaagaatggtgtggaaatcaaatcaactgacaagtgccagatgagaaccaaaaagctcacacactcactgaacatcaggaatgttcactttggggatgctgctgactacacctttgtggctggaaaagcaacatcaacagccacactttatgtggaagctcgtcatatagaatttaggaaacacattaaggacattaaggtactggagaagaagcgagccatgtttgaatgtgaagtttctgaacctgacatcactgtacagtggatgaaagatgaccaggaactgcagatcacagacagaataaagattcagaaggagaaatatgtccaccgccttctgatcccatccacccggatgtctgatgctgggaagtacacagtggtggcaggaggcaacgtgtcaactgcaaaactctttgtagaaggcagagatgttcgcatccgaagtattaaaaaggaggttcaggtcattgagaaacagcgtgctgttgttgaatttgaggtcaatgaagacgatgttgatgcccactggtataaagatggcattgaaatcaatttccaagttcaagaacgacacaaatatgtagtggaaagaagaatccaccgaatgtttatctctgagaccagacagagcgatgcaggagaatacacctttgtggcaggaaggaacaggagttctgtcactctctatgtcaatgctcctgaaccgccccaagttctgcaggagctccagcctgtcactgtgcagtctggcaagcctgcccgcttctgtgccgtgatatccggaagaccacagcccaaaatttcctggtacaaggaagagcagctgctttccactggcttcaagtgcaaatttcttcatgatgggcaagaatacacgcttttgctaattgaagccttcccagaggatgcggcagtctatacctgtgaagccaagaatgactatggtgttgccacaacatcagcttcactctcagtggaagttccagaagttgtgtctcctgatcaggaaatgcctgtttatccacctgccatcatcaccccgcttcaggacactgtcacttctgaagggcagccagcccgttttcaatgccgggtttctggaacagatctaaaagtgtcgtggtacagcaaagacaagaaaatcaagccatctcggttctttagaatgactcaatttgaagacacttatcaactggaaattgccgaagcttatccagaagatgaaggaacttacacgtttgttgctagtaatgctgtaggccaagtatcaagcacagccaacctgagtctggaaggatttagcaaatttgaagaaaatacatcaaactcccaatggcatgtctctttatcagtttcatttaagaaggagccccttggccaaaagcccagcttcatccagcctctgtcaagcctcagggtgcacaacggggagacagtcagatttcatgcgagggtttctggcattcccaagccagaaatccaatggtttcataaccagcagctaattctaccaacaaaagatgtagttttccattttgaggagtccacaggcatggctttaatgcttatagttgatgcttactcagagcatgctgggcagtactcttgcaaagcagccaatagtgctggggaagccacttgtgcagctacactcacagtgactccaaaagtgcaagccctagataggcaaagttctgggaaagatgtaagagagtccgccaagtcccaggcagtggcagattcctctttcacaaaggaggagagcaaaatatctcaaaaggaaattaagtcatttcaaggatcatcatatgaatatgaagtgcaggtttttgaaagtgtatctcaaagttccatccacacagctgcatctgttcaagatacacagttgtgccatactgcatccctttcacaaattgcagaaagcactgagctatctaaggaatgtgctaaagagtccacgggtgaggcgcccaagattttcctgcatcttcaggacgtcactgtaaagtgcggtgacacggctcaattcctctgtgttttaaaagatgattctttcattgatgtaacctggactcacgaaggtgcaaagatagaggaatccgagagactgaaacaatcacaaaatggaaatattcagtttcttaccatatgtaatgttcagctggtagaccaaggactatacagctgcattgtacacaatgactgtggagagaggacaacgtcagcagtactaagtgtagaaggtgctcctgaatcaattttgcatgagaggattgaacaagagattgagatggaaatgaaagaattattctctgagggggaatctgaacattcagaaagggatacacgtgacgccttttcagattctgaagacatagaccacaaatccatggctgctaaaagatatgcaagtagaatatcatctacaagctcctggcctgaatattttaagccttcttttacccagaaacttacatttaaatatgttttagagggtgaaccggttgtttttacatgtagattaattgcctgtccaactccagaaatgacttggtttcataacaatcggcccatcccaacaggtcttcgtcggattataaaagctgagagtgatttacaccatcactcttccagcttagagattaaaagggtccaagacagagattctggaagttataggttactagcaattaatagtgaagggtctgcagaatcaactgcatcattgcttgttatccaaaaagggcaagatgagaaatatttagaatttctgaaaagagcagaacggacacatgaaaatgtggaggctttagttgaaaggggagaagataggataaaggttgacctgaggtttactggctctccctttaacaaaaaacaagatgtggaacaaaagggaatgatgagaactatacattttaagacaatgagttctgccaagaaaacagattacatgtatgatgaagaatatttagaaagtaaatctgacataagaggttggcttaatgtaggtgaaagtttcctggacaaggagaccaaagtgaagttgcaacgtttaagggaggctagaaaaacattaatggagaaaaagaaattatctcttttagatacgtcttctgaaataagctcaagaactttgagaagtgaagctagtgataaagatattctgttctctagagaggacatgaaaatcagatctatgtctgatctagctgaaagttataaggtagatcattcagctgagagtattgtgcaaaatccacatgccctttctaatcaaatggatcaaaatatagaatctgaggaacttcccacaagctttcaaactattgttgatgaagaaattttccagactgaaataagaatgagccaagaagcactggtaaaggaaagtctaccaaaagaccatttatatggtgaaattctagtaaatgaaaatacccaagcaagaggacagctggaagaaattatggccaatactacaattggagagtcatccacatatatcactaatgtatgtgagaaggaggaagtatatgagactcctgaaaatgtgtctcaagctattacaccacatgccagcgaatcttttggtacacttgtaaatgttgaagaaagtgaagaaatagctagtgaaagaataaaaaaggatgatttgagagaattacaactctctgcttctacacgaattgatgaattcaaaaccgaacagaaggaagaaaacatgagattttttgaaaattcttttcgaaaacgcccacaacgttgcccaccttcatttcttcaagaaattgaatctcaagaagtttatgaaggtgacagttgtaattttgtgtgtcattttcaaggatatcctcaacctatagtgacgtggtataacaatgacatgccaatcccacgtaatcaaaactttatcattcattcgttggaaaactattcaatattaactctttcatctgttcatcatcagaatgaaggttctattacttgtgtgctatttaaccaatatggaacagtaaaaacaaccagtatgcttaaagtgaaagcaaaacaaaaacatgatgtcaaagcacataaagtcccagtgttccatgactacttggatgaggaagaagagttagcattggtgtttgaccaagcaaaaggcgcccatccatctatgagtcaagagggccaaacaaatcttcatttgttaaaaactaacccaccagttcctccctctggagacacagaattgctttcctttcctgtagaaattcaggtaacagcagctactcctatcccagaacaggataaagagtctaaagaagtgtttcaaactgaggagctggaacctaaagcaatgcctcaagatcaagttactcaatcaccaaaacacagatttgtatttttgtctgatattactaatgaaccaccaaaaatgttacaagaaatgccaaagcatgccaggtgtagagaaggggattccatcattcttgaatgtttaatatctggtgagccccagccagttgtaacatggtttcaaaatggagtccttttaaagcagaaccagaagtttcagtttgaagaagttaattgtagccaccaattatatattaaggatgttaattctcaagattctggaaaatataaatgtgttgctgaaaacaattcaggggcagttgaaagtgtttcagatctaacagtggagcctgtcacttatagagaaaatagtcaattcgaaaatattggtgaaatttatggaaaatattccagagatcagcaactgcaagaccagggagaatctgtaagggcacatttttatgattatccagctggtccctttactccctggacaaatgtaaaagaatattcagtaagggactattttcaaagccttgagactattgagcaaatagaccagaaagagcaggtgcgttgcataccttctagagaaaaaattcccagatttgtgcatggtgcttcaagaaccataaaaatcagcaagcccatcagggctgaattcatacaatgtcaggctgaagggaaagagagacatgtaagtgaaaaatcaaagctgcaccaagcagagggtactgtttatccatttgttgatgatttcagtgatgtcactattaagaaagaaataagaaataattttggaaaacttggtagatcagaaaaggaaaatgtacaagaatgtgcccaaagtgactatttaccaaatattcactctgagagaatttctgacagttacaatacaaaagattcatctgccattgtatatgaagaatcccttggtgaagagatacactacccggggaaaaaggtgaagcatagaattatcgaatttgaaaaattacatgtagaaaaaggagttctagaaaaaagacctaccagaacatcaattgttaatcctcctcaaaagaagattgatgacaaagccttttcattaaagcaaagagaatcaagatcaagcaatctaaatgcaaatatgtatcaggcagagaaaatgtctccaaatactgaatcagattcatctaacattgcaataaatttaaagctgctttcctctcaaactcataaagaatttgacgcacaagaaagggaacaacaggaaaaaataagtcttatagataaacctgcaatttctaaaagagctgaacatgaatcacctattacatttgacttaaagcagtttcacactcaaataaaacacacagatgtgaaattccaagaattagatagtggtcaaccagaagaagcttattttaaaatccaacatcctgctgacactgagaacattgtatttgatctaaaacaaatgtattctcatataggagatccagctctggagttccaagggcaagaaactagggaacagcaggaaatacattataaagaaaaaattcctagccctgaaacgttacaacctgacacacacaatatctctaaaagtgtgcaaaataatgtatttgccagtcaagaaatttcttccagtcaagagctttcaaatagaactatggtggagaaaagtagtattgatgaaaattccatttctttagaaaaagaagtccgacatgtacaggaacaaaacttagacattttaaaaactgatctttctcttaaatccttttctgaagaaatctatagtgaatcatgtgccctacttccaacctcatctgcagatatagaagaaactgatctttctgagaaaagttgtcctctagaaaatggaggcagaagttccatctcacatttgaaaaaagcagcaagtgaggaaaagcctttaggggttggtgaaatggaagaagaatgcactctagaaccagagttggcagcatttccaaagcaggatggtgggacacaggaatatacagatgccactttggaagaccacagaggtgatgttcaggaagctgacacactccatagacagctctccctgagtcagtgcttcccactcttgatgactgaagaacaacagaatccaggtgaacaaataagtacaaacattcatgcctctggagaagaaaaatgttatgaagaagttcaagttcagaatgaagcttctttctccactttagaaggagaaatgatagaaactagtttttctcaaaatattcctaaattagatgaggcacataccactgaggcagcagaatctgagacctccctaacacaatatttacttgctgctggaaagcgtgaggttcctgaaactaaagacaccagagaccaggcaaagcttgtccagagtgaatcaatcacttcaatggaggtggaagaagtaactttcaacactgtgtatgaatactacaaccagaaacaggaatcactaggtcgtccactttctcctgagtctgacatttccattggtgtgggaagtacaaccagtgaagaaatatctgagttagatcagttttataccccaccatcatctgttgaatattttgaatctccaaagtcccctgacttatattttaatccttcagatataactaaacaatcctcaatacattcaggaggtgagacagttgaaagatattccacacctttaggggaagttgctgaaagatattcaacaccttccgaaggtgaggtaggagaaagatactccacacccccaggggagacactagagagatactccacacctccaggagagactctagagagatactccacacccccaggagagactctagagagatattccacacccccaggagagactctggagagatactccacacccccaggagagactctagagcgatattccacacccccaggggaggcactagagagatattctattcctactggaggaccaaaccccactggtacttttaaaacatatccatcaaaaatagaaagggaagacggtacaccaaatgagcatttctacacacctacagaagagaggggttcagcttatgaaatatggcgttccgattcatttggtacacccaatgaagccattgagccaaaagacaatgaaatgcctccatcttttattgaacctctgaccaaaaggaaggtatatgaaaacacaacactaggcttcattgttgaagttgaaggtcttccagttcctggtgtgaaatggtatcgaaataaatctttactagagccagatgaaagaatcaaaatggaaagagtgggtaatgtgtgttcactggaaatttctaacattcaaaaaggagaagggggagagtacatgtgtcatgctgtaaacatcataggggaagcaaagagctttgcaaatgtagacataatgccccaggaagaaagagtggtggcactaccacctccagtaacacatcagcatgtcatggagtttgatttggaacacaccacatcatcaagaacaccttctcctcaagaaattgtcctggaagttgaattaagtgaaaaagacgttaaagaatttgagaagcaggtgaaaatagtgacagttcccgaatttactcctgaccataaaagtatgattgtgagtctagatgttcttccatttaattttgtagatccaaatatggattcaagggagggagaagacaaagaactaaaaattgatttagaagtatttgaaatgcctcctcgctttataatgcctatttgtgattttaaaattccagaaaattcagatgctgtattcaaatgttcagtcatagggatcccgactcccgaagttaagtggtataaagaatatatgtgtattgagccagataatattaaatacgtgattagcgaggagaagggaagtcacactcttaaaattcgaaatgtctgtctttctgatagtgcaacatacaggtgcagagctgtgaattgtgtaggagaggctatctgtcggggattcctcaccatgggagattctgaaatatttgctgtgatagcaaagaaaagcaaagtgactttaagcagtttaatggaagaattggtcttaaagagcaactacacagacagtttttttgaatttcaggtggtggaagggcctcccaggtttatcaaaggtatttctgactgttatgcaccaataggtacagcagcatattttcagtgcttagttcgtggctctccaagacccacggtttactggtacaaagatggaaaattagtccaaggaagaaggttcactgttgaggaaagtggcacagggttccataacctgtttataacaagcttagtaaagagtgatgaaggagagtataggtgtgtagctacaaacaaatcaggaatggctgagagctttgcagcactcaccttaacttaaaatgtaatgttttagtgcctcagtaattattagcattgatctgagtgctttcatattttccaaattatgtggatctaataaacttccaaacaggtccaccatatttgaattcattaccttggagacccctaaagaaataatctctatgtagaaatctcatctttgtaatacatgtaaatattttgttatctgaactgtggaatcatcacttgtgtcaatcatgctgtgtaatatcaaacacaattaaatctctccttggctacctaaagttttctagttcttttctgtctgccgaggaagaaggacttcatagcgccgaacttcaattatctaaaataaatgaaacacttgaacttttgtctgaatctccagtttacccaactaaatttgattccgaaaaggaaggcactggcccaattttcatcaaagaagtgtcaaatgctgatataagcatgggggatgtggctacactgtctgtaactgtcattggcatccccaaacctaaaattcagtggttctttaatggagtgctattaaccccttctgctgactacaaatttgtttttgacggtgatgatcatagcctgatcattctgttcaccaaattggaggatgagggagagtatacatgtatggccagtaatgactatggaaagacaatatgtagtgcctatctaaaaattaattccaaaggagagggtcacaaagacactgaaacagaatcagcagtggcaaaatctctggaaaagctgggaggtccttgtcctcctcacttccttaaggagttaaaaccaattcgctgtgctcaagggcttcctgccatctttgagtacacagtggttggagagcctgcccctactgttacatggttcaaagaaaacaagcagctttgcaccagtgtttattacactatcattcataaccctaatggctctggaactttcattgtcaatgaccctcagagggaagacagtggcctctatatctgtaaagcagagaatatgttgggtgagtccacctgtgcagcagagctgcttgtgcttctggaagacacagacatgactgataccccctgcaaagcaaagtccacaccagaggctcctgaggattttccacagacacccttaaagggtcccgcagttgaagcacttgactcagagcaggaaattgcaacgtttgtaaaagacaccattttgaaagctgctttaattacagaagaaaaccagcaactatcttatgagcatattgctaaagccaatgaattgagcagtcagcttcctttgggagctcaggaattgcaatccattttggagcaagacaagctcactcctgaaagcaccagggaatttctttgcatcaatggcagtattcactttcagcctctcaaggaaccatctcccaacctacagctgcagattgtacagtcccagaaaaccttctccaaagaaggtattctaatgcctgaagagcctgagacacaggcagttctatcagataccgagaaaatcttcccaagtgccatgtccatagaacaaattaattcattaacagttgagcctctgaaaactttattagctgaacctgaagggaattatccacagtcttcaatagaacctccaatgcattcttatctaacctctgtggctgaggaagtactttcaccaaaagaaaagacagtatctgacaccaacagagagcaaagagtgactcttcaaaagcaagaggcacaaagtgcgctcatcttgagtcagagcttagctgagggacacgtggagagtctccagagtcctgatgtcatgatctctcaggtaaactatgagcccctagtcccttcagaacactcatgcacagaaggaggtaaaattttgatagaaagtgcaaatccactggaaaatgcagggcaagattctgcggtcagaattgaggaaggcaagtccttaagatttccactagcacttgaagaaaagcaggtactgctcaaagaagagcattctgacaacgtggtgatgcccccagaccaaatcattgagtctaaaagagagcccgtggcaataaagaaagtgcaggaggtacagggaagggaccttctttctaaggaaagcttgctttctggtattccagaagagcagagattaaacctgaaaattcaaatctgccgggctttgcaagcagccgtggccagcgagcagccaggtcttttctctgagtggctaagaaatattgaaaaggtggaggtcgaggctgtaaacatcacccaagagcccagacacatcatgtgcatgtaccttgttacttcggcaaagtctgtaacagaagaagtaaccatcattattgaagatgttgatcctcaaatggctaacctgaaaatggaacttagggatgctttgtgtgctattatatatgaggaaatagacatcctaacagctgagggtcctagaattcagcaaggagccaaaacaagtttgcaagaagaaatggattctttttcaggttcacagaaggttgaacccattactgaaccagaagttgaatctaaatatctgatctcaactgaagaggtcagttattttaacgtgcaaagtagggttaaatatttggatgccacacctgtcactaaaggggttgcttcagctgttgtctctgacgaaaaacaagatgagagtctgaaaccatcagaggaaaaagaggagtcttcctctgaaagtggtactgaggaggttgctacagtaaagatacaggaagctgagggtggcttaatcaaagaggatggccccatgatacatacacctttagtggacactgtttctgaggaaggtgatattgtacacctcacaacatccataacaaatgctaaagaggtgaattggtattttgagaataaactggtgccttcagatgaaaagttcaagtgtttacaagatcaaaatacatatacgctagtcatcgacaaagtaaataccgaagaccatcaaggagagtatgtctgtgaggccttgaatgacagcggaaaaacagcaacttcagccaaactcactgtagtaaaaagagctgccccagtgatcaagaggaaaatcgaacccctggaagtagcactgggccacctagccaaattcacctgtgagatccaaagtgctcccaatgtccggttccagtggtttaaagctggccgagaaatttatgagagtgacaagtgttctattcgatcttcaaagtatatctccagccttgaaatcctgagaacccaggtggttgactgcggcgagtatacatgcaaagcttccaatgagtatggcagtgtcagctgtacagccacactaactgtgacagaggcatatccaccaacctttctctccagacctaagtcccttacaacttttgtgggtaaggcagccaagttcatctgcacagtgacagggactcctgtgatagaaaccatttggcagaaagatggtgctgcactctcaccttcacctaactggaggatttccgacgcagaaaacaaacacattttagaactctcaaaccttaccattcaagatagaggagtttattcttgtaaggcttccaacaagtttggagcagacatctgccaagcagagttgatcatcattgataagccacatttcattaaagaattagagcctgtgcagtccgctatcaataagaaggtccaccttgagtgccaagtagatgaagacagaaaagtcacagttacgtggagcaaagatgggcaaaaactccccccagggaaagattataagatctgttttgaagataaaatagcaacacttgagattcctttggccaaactgaaagattcaggaacctatgtctgtacagcttcaaatgaggctggaagcagctcctgctcagccacagtcactgtcagagagccaccatccttcgtgaagaaggtggatccctcttatttaatgctcccaggtgaatcagcacgcctccattgcaagctgaaaggctcacctgtgatccaggttacttggtttaaaaataacaaagaactcagtgaaagtaacacagtccgaatgtattttgtcaattctgaggctatacttgatattacggatgtaaaagttgaagacagtgggagttactcatgtgaagcagtgaatgacgtcggcagtgatagctgcagtactgaaatagttatcaaagaacctccttctttcatcaaaactcttgagcctgcagacatagtgagaggaacaaatgctctacttcagtgtgaagtctcaggcactggaccatttgaaattagctggttcaaagacaagaaacaaattcgaagtagtaaaaaatacagattgttttctcagaagtctcttgtgtgtctggagatcttttcgtttaatagtgcagatgttggtgaatatgaatgtgttgttgctaatgaagtcggcaagtgtggctgcatggcaacccacttactcaaagaacctccaacctttgtaaagaaagtagatgatttgattgcactaggaggacaaaccgttaccctgcaagctgctgtgagagggtcagagcccatttctgtcacatggatgaaaggtcaagaggtcatcagagaagacggaaaaatcaaaatgagcttttccaatggtgttgcagtcttgataatccctgatgttcagattagttttggaggcaaatacacgtgcctggctgaaaatgaagctggaagccaaacatctgttggggaattaatagttaaagaacctgccaaaatcattgagcgagcagaactgatccaggtgacagcaggagatcccgccacactggagtacacagtggcaggcacgccagaactgaagcccaaatggtacaaagatgggagacccttggtcgccagtaaaaaataccgaataagttttaaaaacaatgttgcccagctcaaattttattcagctgagctgcacgacagtggccaatacacatttgagatttccaatgaagtgggcagcagctcctgtgagactacattcactgtattagatcgagacattgctccattttttaccaaacccttgcgcaacgtggatagtgttgttaatggtacctgcagactggactgcaaaattgcaggctccctccccatgagggtgtcctggtttaaggatggcaaagaaatagctgcttctgacagatacaggatagcatttgtggaaggcacagcctctttggagatcatcagagtagacatgaatgatgcagggaatttcacttgtcgagccacaaattccgtgggaagcaaagacagcagtggagccctgattgtgcaagaaccacccagttttgtaactaaacccggctcaaaggatgttctgcctggctcagcagtctgcctgaagagcactttccaaggatctactcctctcacaatcagatggtttaagggcaacaaagagctggtttctggtggaagctgctatattaccaaagaagctttagagagttccctggaactctatttagtaaaaacctctgattcgggcacgtacacatgtaaagtcagcaatgtcgctggaggggtggaatgcagtgcaaacttgtttgtaaaagaacctgccacatttgttgaaaagttagagccatcacagctgttaaagaagggagatgccacccagctagcctgcaaagtaactggtacccctccaattaaaataacatggtttgcaaatgatagagaaattaaggagagcagcaaacacagaatgtcttttgtggagtctactgcagttctaagactgacagatgttggcatcgaagacagtggtgaatatatgtgtgaggcccaaaatgaggctggcagtgaccactgcagtagcattgtaatagtcaaagagtcaccttattttaccaaggaatttaagccaattgaagtcttaaaggagtacgatgtcatgttgctggctgaggtggcaggcactcctccctttgagatcacttggttcaaagataacacaatcctgcgaagtggtagaaagtataagactttcattcaggatcatctggttagcctgcagatcctcaagtttgtagctgcagatgctggcgaataccagtgtcgggtgaccaatgaggtgggcagcagcatctgcagtgccagggtgactttaagagaacccccatccttcataaagaagatcgagagtaccagctccctccggggaggcacagctgccttccaggccactctgaagggctccttgccaattacggtgacttggctaaaagacagcgatgaaatcactgaagacgataatataagaatgacctttgagaacaatgtggccagtttgtacctcagtggcattgaagtcaagcatgatgggaaatatgtctgtcaggccaaaaatgatgcaggaatacaaagatgttctgcattactctcagtaaaagaacctgcaacaatcaccgaggaagctgtgtctatagatgtcacccaaggagacccagccactttgcaggttaaattttcagggactaaggagattacagccaaatggtttaaagatggccaagaactgaccctgggctcaaaatataaaatcagtgtcactgatacagtctcaatactgaagattatttctacagaaaagaaagatagtggagaatatactttcgaggtccaaaatgatgttgggaggagcagctgcaaggctagaattaatgtattagatcttatcatacctccttcattcaccaaaaagctgaagaaaatggacagcattaaaggttctttcattgatttagaatgtatagtggctgggtcacatcccataagcatccagtggttcaaagatgaccaagaaatatcagctagtgaaaagtacaaattctcttttcatgacaatactgccttcttggaaatcagccagctggaaggtacagacagtgggacatacacttgttctgccacaaataaggcagggcacaaccaatgcagtgggcatctgacagtcaaagaacccccttactttgtggaaaagccacagtcacaagatgtcaatcccaacacaagggtacagttaaaggctcttgtgggtggcactgcacccatgacaataaagtggtttaaagataacaaagagttacactcaggagcagcccgctcagtttggaaggatgacacctctaccagtctagagctctttgcagccaaagctaccgattctggaacctacatttgccaactaagcaatgatgttggcacagcaaccagcaaagccactctctttgtaaaagaacctcctcaattcattaagaagcccagtccagtcttagtgctgaggaatggacagtcaacaacatttgaatgccaaataacaggcactcctaaaatccgagtgtcttggtatctagacgggaatgaaataacagccattcagaaacatggcatttccttcattgatggtttagccactttccagatttctggtgccagggtagaaaatagtgggacttatgtgtgtgaagctcgaaatgacgcaggcacggcgagctgcagcattgaactcaaagtgaaagaaccccccacctttatcagagagctgaagcctgtggaggtagtaaaatatagtgacgtggagctggagtgtgaagttacgggaacacctccgtttgaagtcacttggctgaagaataacagggaaattcgaagcagcaaaaaatacacattgaccgacagagtgtctgtgtttaacctccatataaccaagtgtgacccttcagacactggggaataccagtgcattgtatccaatgaaggcggcagctgctcatgcagtactagagttgccctgaaagaaccaccatcattcattaagaagatagaaaataccactactgttttgaaaagttctgccacctttcagagtaccgtggcaggttctcctcctatttctataacctggctaaaggatgatcagattcttgatgaagatgataatgtctatatttcatttgtggacagtgtggccacacttcaaatcagaagtgtggataatggacacagtgggagatatacctgtcaagccaagaatgagtcaggagttgagaggtgttatgctttccttttagtacaagaaccagctcaaatcgtagagaaagctaaatcagttgatgttacggagaaagatcccatgaccttggaatgtgttgtggctggaacaccagaactcaaagtgaaatggcttaaagacgggaaacaaatagttcccagtagatacttttcaatgagttttgaaaataacgtggccagttttagaattcagtcagtaatgaagcaggacagcggtcagtacactttcaaggtggaaaatgacttcggaagcagtagctgtgatgcctacttaagagtgctagatcaaaatattcctccatcattcaccaaaaaattaaccaaaatggataaagttctgggctcttctattcatatggagtgcaaggtgtctggttcacttcccattagtgctcagtggtttaaggatggaaaagaaatatctacaagtgcaaaatacagacttgtgtgccatgagagatctgtgtctctggaagttaataatctggaattagaagatactgcaaattacacatgcaaagtgtcaaatgtagcaggagatgatgcatgcagtggcatcttaactgtgaaagaaccaccaagcttcctagtgaaacctgggcgacagcaagccatacctgattctacagtggaatttaaggcaatactaaaaggaacaccaccatttaaaataaaatggtttaaggatgatgtggaacttgtctcaggtcctaaatgtttcattggcttggaagggtcgactagcttcttaaatctctactcagtggatgcttctaagactggacagtatacttgccatgttaccaatgatgttggtagcgactcttgtactacgatgttgcttgtgacagaaccaccaaagtttgtaaagaaattagaagcctccaaaattgtgaaagcaggtgactcttcacgacttgaatgcaagatagctggatccccagaaatcagagttgtgtggttccgaaatgaacatgaacttccagccagtgataagtacagaatgactttcattgactcagtggccgtcatacagatgaacaatctcagtactgaggacagtggagatttcatttgtgaggctcagaatcccgctggcagcacaagctgcagtaccaaggttatagtaaaagagccacctgtttttagcagcttccctcctatagtagaaacccttaaaaatgctgaagtcagtcttgaatgtgaactttcgggaacaccaccgtttgaggtggtatggtacaaagacaagcggcaactcagaagcagcaagaaatacaagattgcatccaaaaacttccacacaagtattcacattctcaatgtggacacttcagacatcggtgaataccactgcaaagcacagaatgaagtgggaagtgatacttgtgtttgtactgtaaaattgaaagaaccaccaagatttgtctccaaactgaacagcctcactgttgtagccggagagcctgctgaattacaagcatccatagaaggcgcccagcctatttttgtccagtggcttaaagagaaggaagaagtgattagagaaagtgaaaacatcaggattacatttgtggaaaatgttgcaactctacagtttgcaaaagcagagccagctaatgctggaaagtatatctgccaaatcaagaatgatggtggaatgagggagaacatggccacactgatggtcttagagcccgcagtcattgttgagaaggcaggaccgatgacggtgactgtaggagaaacgtgcactctggagtgtaaggtggctggcactccggaactctctgttgaatggtacaaggatggaaagctgttgaccagcagccaaaaacacaaatttagcttctacaacaaaatctcttccttaaggattctctcagttgaaaggcaagatgcaggcacatacactttccaggttcaaaataatgttgggaaaagcagctgcacagctgtggttgatgtttcagaccgagcagttcctccctctttcacacgaagactgaaaaatactggtggggtgttaggtgcttcttgcatcttggaatgcaaagtagctggatcatcacctatttcagttgcctggtttcatgagaaaaccaagattgtcagtggagcaaagtaccaaaccacattttcagataatgtctgcacattgcagttgaattctctggattcctcagatatgggcaattacacatgcgtggctgctaatgtcgctgggtctgatgaatgtcgtgcagtgctaactgtacaagaaccaccctcttttgtgaaagaacctgaacctttggaagtactaccaggcaaaaatgtaaccttcacaagcgttattagaggaacccctccattcaaagtcaactggttcagaggtgccagagaactagtgaaaggagaccggtgcaacatctattttgaagacactgtggcagaactggaattatttaatattgacatatctcagagtggggaatacacctgtgtggtttctaacaacgctggccaagcatcttgcactacccgtctctttgtgaaagaaccagctgcatttttgaagagattaagtgatcattctgtagaaccagggaagtccataattctggagagcacctacactggaacacttccaatttctgtcacttggaaaaaggatggttttaacataactacctctgaaaaatgtaacatagtcacaacagagaaaacttgtatcctggaaattctgaatagcacaaaaagagatgcagggcagtattcctgcgagattgaaaatgaggcaggaagggatgtttgtggagctctggtatctacattagaaccgccttattttgttacggaactggaacctctggaggcagcagttggagattcggtttctttacaatgccaagttgctgggacaccagaaattacagtgtcttggtacaaaggagataccaaattacggccaactcctgaatacaggacctactttacaaacaatgtggccacacttgtttttaataaagtgaacatcaatgacagtggagagtacacatgcaaagcagaaaatagtataggaactgcttcttctaagactgtgttcagaattcaagagcgccaactcccaccttcttttgcaagacaattaaaggacattgaacaaactgtggggttacctgttacactcacttgtcgattaaatggctctgcacccatccaagtgtgctggtatagagatggagtacttttaagagacgatgaaaatctacagacttcatttgtagataatgtggcaactttaaaaattttgcaaactgacttgagtcactctggccagtactcttgctcagcttccaacccacttggaacagcatcttctagtgctagactcacagcaagagaacccaagaaatctcccttctttgacatcaagcctgtatctatagatgttattgctggagaaagtgctgattttgagtgtcatgttactggtgctcaaccgatgcgaatcacttggtcaaaagataacaaggagatccgtcctggaggaaactatacaatcacatgtgtgggaaacactcctcatttgagaattcttaaagtaggcaaaggagactctggtcaatatacttgccaagcaaccaatgatgttggcaaagacatgtgctcagctcagctcagtgtaaaagaacctccaaagtttgttaagaaattagaagcttcaaaagttgcaaagcagggagaatccattcaactggaatgtaaaataagtggctccccagaaatcaaagtttcatggttccgaaatgacagcgaacttcatgaaagttggaaatacaacatgtcattcattaattctgtggcattgcttacgatcaatgaagctagtgctgaagacagcggggactacatttgtgaggctcataatggtgttggtgacgccagctgcagcacagcgttgacagtgaaagcacctcctgttttcacccagaagccttctccagtaggagctcttaaaggttctgatgtgattctccaatgtgaaatttcgggaactcccccatttgaagtagtatgggttaaagatcgaaagcaggttagaaacagcaagaaatttaaaatcacttcaaaacattttgatacaagtcttcatatccttaatcttgaagcctccgatgtcggggaatatcactgcaaagctactaatgaggtgggaagtgacacgtgttcttgctctgtcaagttcaaagaacctccacgattcgtgaaaaagctaagtgacacctcaacccttattggggatgctgttgagttacgggccatagtggagggcttccagccaatttctgttgtctggctgaaagatagaggtgaagtcatcagagagagtgaaaataccaggatttcattcattgataacattgcaaccctccagctggggagtccagaagcatctaattctggaaaatatatatgccaaatcaaaaacgatgctggaatgagagaatgctctgcagtcttgactgtactagaaccagcaagaatcatagagaagcccgaacccatgactgtcactactggaaatccttttgcattagagtgtgtagtgactggaacaccagaactctcagccaagtggttcaaagatggaagagaattgtctgcagacagcaaacatcacattacattcatcaataaagtggcttcccttaaaatcccctgtgccgaaatgagtgacaaaggattatatagctttgaagtgaaaaacagtgttggcaaaagtaactgcactgtatccgtccatgtttctgatcggattgtgcctccttccttcatccgcaagctgaaagacgtgaatgccatcctgggggcctcagttgttttggagtgccgagtctctggctcagccccgatttcagttggctggtttcaggatggaaatgagattgttagtgggcccaaatgtcagtccagcttttcggaaaacgtctgtactttgaatctgagcttgttggagccctccgacacaggcatatacacgtgtgtggctgccaatgtagctggttccgatgagtgctcagcagtcctgactgtgcaagaaccaccatcttttgaacaaacccctgattctgtggaagttttgcctggaatgagcctcacattcaccagtgtcatcagaggcacccctcctttcaaggtcaagtggtttaaaggcagcagggaactggtgcctggggagtcatgcaacatctctctggaagattttgtcacagaactggagttgtttgaggtgcagccattagaaagtggagactattcttgcctcgttacaaatgatgctggcagtgcttcctgtaccacacatctttttgtgaaagaaccagccacctttgtgaaaagattggctgatttcagtgttgagacaggaagccccatagttctcgaggccacatacactggcacacctccaatctcagtgagctggataaaggacgagtatcttatttcacaatctgagagatgcagtattactatgacagaaaaatctaccatactggaaattcttgagagcacaatagaggattatgcacagtacagctgcctgatagaaaatgaggctggtcaagatatctgtgaagctctggtgtctgtcttagaaccaccgtactttattgaacctctggacatgtggaagcagtcattggagaacctgcaactttacagtgtaaagtggatggaactccagaaattagaatttcttggtataaagaacacacaaagctacgatcagctcctgcatataaaatgcaattcaaaaataacgttgcttccttagtaatcaacaaagtggatcacagtgatgtgggagagtattcatgcaaggcagacaacagtgtgggggcagtcgcttcttcagctgtgcttgttatcaaagcgcgcaaacttccacctttctttgcaagaaaactgaaagacgttcatgagactctaggcttcccagttgcatttgaatgccgcatcaatggctcagaacctcttcaagtgtcttggtacaaggatggggttcttttgaaagatgatgctaatttgcagacatcttttgttcataatgtagcaactcttcagattttacaaactgaccagagccacatagggcagtataattgctctgcttctaatcctcttgggactgcttcatccagtgccaagctcattctctcagagcatgaagtgcctcctttctttgatctaaagcctgtatcagtagatcttgctcttggagaaagtggtacttttaaatgtcatgtaactgggactgcaccaatcaaaatcacttgggccaaagataaccgagagattcgccctggaggcaactacaagatgactttggtagaaaatactgccactctgacagttctcaaagtaggcaaaggcgatgccgggcagtacacctgctatgcaagcaacatcgctggaaaagactcttgttctgctcagctgggtgtacaagaaccacccaggttcattaagaagctagaaccttcaagaattgtgaaacaggatgaattcacaaggtatgaatgcaaaatcggtgggtctccagaaatcaaagttttatggtataaggacgagactgaaattcaagagagcagtaaattcagaatgtcattcgttgactcggtggctgtgctggaaatgcacaatctcagtgttgaagacagtggagactacacctgtgaggcccacaatgcagcaggcagtgccagcagcagcacatccttaaaagttaaagaaccacccattttccgcaaaaagcctcatcctatagagacactgaaaggagctgatgttcaccttgaatgtgagcttcagggcactcccccatttcacgtttcttggtataaagacaagagagaacttaggagcggcaagaagtacaagataatgtctgagaacttcctaaccagtatccacatcctgaatgtcgatgctgcagacattggggaatatcagtgtaaagccacaaatgatgtgggaagcgacacttgcgttggttccatcgctctcaaagcaccaccaagatttgtgaagaagctcagtgacatatctactgtcgttggtaaagaagttcagctgcagactaccattgaaggcgctgaacccatttcagtggtgtggttcaaagataagggagaaatcgttagagaaagtgacaacatatggatttcttattcagaaaacattgcaaccttacagttttcaagagtggaaccagccaatgctggaaaatacacttgtcagatcaaaaacgatgctgggatgcaagagtgcttcgccacgctatccgttctcgagcctgcaacaattgtagaaaagccagaatccataaaagttaccacgggagacacctgtaccttggagtgtacagtagctggcacccctgaactcagtactaagtggtttaaggatggaaaagagctaacaagtgacaacaaatacaaaataagcttcttcaacaaagtatccggccttaagatcatcaatgtagcaccgagtgacagtggggtatacagttttgaggtgcagaaccctgttggcaaagacagctgcacagcttcattgcaggtttcagaccgaaccgttcctccttcattcacaagaaaattgaaagagacaaatggtctatccggctcctcagttgtaatggagtgtaaagtctatgggtcacctccaatctctgtctcctggttccatgaaggaaatgagatcagtagtggaaggaaataccagaccaccctgacagataatacttgtgctttaactgtgaacatgctggaagaatcagacagtggtgactacacatgtatagctactaatatggctggttctgatgaatgtagtgctcctttgactgtgagagaaccaccatcttttgttcagaaacctgatcccatggatgttttaactgggaccaatgtaactttcacaagtatcgtaaaaggaacacctcctttcagtgttagctggttcaaaggtagcagtgaactagtaccaggtgacagatgcaacgtgtctttggaggattcagttgctgaactggagttgttcgatgtagatacatcacaaagtggagaatatacttgcatagttagcaatgaagctggcaaggcttcttgtacaacacatctctacataaaagccccagccaaatttgtgaagaggctgaatgattacagcatagagaaaggaaaacccctgatcctagagggtacattcactggaactcctcccatttcggttacctggaagaaaaatggcataaatgtaactccttctcagaggtgtaatataactacgactgaaaaatcggcaatcctggaaattccaagtagcacagtagaggatgcaggacaatacaactgctacattgaaaatgcctctggaaaagattcctgttcagcacaaatactcatactagaaccaccgtattttgtcaagcagttggagccggttaaggtgtctgttggagattctgcctctctacaatgccagcttgctggaacccctgaaattggggtatcctggtataaaggagatacaaaattgagacccactacgacttacaaaatgcattttaggaataatgttgctacactggttttcaaccaggttgatattaatgatagtggagaatatatctgcaaagctgaaaacagcgtgggagaagtttctgcatcaactttccttaccgttcaagagcaaaaacttccaccatcattttctcgacaattgagagatgttcaagaaacagttggactgccagttgtttttgattgtgccataagtggatcagaacctatctccgtgtcttggtataaagacggcaagccattgaaagacagcccaaatgtacaaacatcatttttagacaatacagccacactcaatatttttaaaactgaccggagccttgcaggccagtattcctgcacagctacaaaccctataggctctgcttcttccagtgccaggctcattctcacagaggggaagaacccacccttctttgacatccgtcttgcccctgtggatgctgtggtgggagaaagtgctgactttgagtgccacgtcacgggcacacaaccgataaaggtcagctgggccaaagacagcagagaaatacgaagtggcggaaagtaccagattagttatctggaaaacagcgcccacctgacagtcctcaaagtagacaaaggagattctggacaatatacctgctatgctgtgaatgaagtgggaaaagactcttgcacagctcagctgaatataaaagagcggctcatcccaccaagtttcactaaaagactctcagagacagtagaagaaacagaagggaattctttcaaacttgagggacgtgtggctggttcccaacctataactgttgcctggtacaaaaataatatagagatacaaccaacttctaactgtgaaataacattcaagaacaacacgttagtgctgcaagtcaggaaagcaggcatgaacgacgctggtttgtacacatgcaaagtgtccaatgatgcaggctctgctctgtgcacgtcttcaatcgtcatcaaagaacctaagaagccacctgtatttgatcagcaccttactccagtaacagtgagtgaaggagaatacgtgcagctcagctgccatgtccagggatctgagccaattaggatccagtggttgaaggctggcagggaaataaagccttcagacagatgcagcttcagctttgctagtgggacagctgtactggaactcagagatgtggctaaagcagattcgggagattatgtgtgtaaagcttcaaatgtggctggaagtgacactaccaaatcaaaagtgaccattaaagacaaaccagctgtggccccagcaaccaagaaagctgcggtagatggaagactcttttttgtgtcagaacctcagagtatcagagtcgtagaaaaaaccactgcgaccttcattgcaaaagttggaggtgacccaatcccaaatgttaaatggacaaaagggaagtggagacagctgaaccaaggaggtcgtgttttcatccaccaaaaaggcgatgaagcaaaactggagattagggacaccacaaaaactgattctgggttataccgatgcgtggcatttaacgaacatggtgaaattgaaagtaatgttaacttacaggtggatgaaaggaagaaacaagagaaaattgaaggcgatcttagagcaatgctgaaaaagactccaatcttaaagaaaggagctggagaagaagaggaaattgatatcatggaacttctcaaaaatgttgatcctaaagaatatgaaaaatatgcccgcatgtatggaatcactgacttccgaggtcttcttcaagcatttgaactgctcaagcaaagccaagaagaagagacacatagactggaaattgaggaaatagagaggtcagagagggacgaaaaggaatttgaggaacttgtatcatttattcagcaaagactgtcacagacagagcctgtcactctgatcaaggacattgaaaatcagacagttttgaaagataatgatgctgtctttgaaattgacattaaaattaattatccagaaatcaagctttcgtggtacaaaggaactgaaaaactggaacccagtgataaatttgaaataagcattgatggtgaccgacatacactcagagtcaaaaactgtcaacttaaagaccagggcaattatcgattggtttgtggtccacacatcgctagcgctaaactaactgtaattgagcctgcatgggaacggcatcttcaggatgtgactctgaaagaaggccagacttgcaccatgacatgccaattttctgtaccaaatgtaaaatctgaatggttcagaaatggcagaatccttaaaccccaaggtagacataaaacagaagtggaacacaaagtccataaattgaccattgcagatgttcgagcagaagaccagggtcagtacacctgcaaatatgaagaccttgaaacttcagcagaactcagaatcgaagctgaaccaattcagtttacaaagcgcatacagaacatcgtggtgagtgagcatcagtctgccacctttgagtgtgaagtgtcctttgatgatgccattgtaacatggtacaaaggaccaacagaactgacagagagccagaaatacaacttcaggaatgatggccgctgccattatatgaccatccacaatgtgaccccagacgatgaaggtgtctactcggtcatcgctcggctggagccaagaggtgaagcaagaagcacggcagagctgtacctaacgacgaaagaaatcaaacttgagctgaagcctcctgatattcctgactccagagttccaatcccaaccatgcctatcagagcagtgccaccagaagaaatccctcctgtggttgctcctcctatcccccttttgctaccaacacccgaagaaaagaaaccaccaccaaaacgtattgaagttaccaaaaaggctgtgaagaaagatgccaaaaaagttgttgcaaagcccaaagagatgacaccacgtgaagagattgtcaagaagcctccacctcctactaccttaattccagcaaaagctcctgaaatcattgatgtatcctctaaagctgaagaagtaaaaataatgactataaccagaaagaaagaggttcagaaagaaaaagaagctgtgtatgagaaaaagcaagcagtccacaaggagaagagagtcttcattgaatctttcgaagaaccttatgacgaactggaggtagaaccatacacagagccatttgaacaaccttattatgaagaaccagatgaagactatgaagagattaaggtagaagctaaaaaagaagttcacgaggaatgggaagaagattttgaagaagggcaagaatactatgaaagggaagaaggctatgacgaaggggaggaagagtgggaagaggcttaccaagaaagggaagtaattcaagttcaaaaggaggtctatgaagaatcacatgagagaaaagttccagccaaagtacctgaaaagaaagcaccaccacctcctaaagttataaagaagccagtaattgaaaaaattgaaaagacttctcgaagaatggaggaagaaaaagttcaagtcaccaaagtacctgaagtttcaaagaagattgttccacaaaaaccttcccggactccagtacaggaagaagttattgaagtgaaagtaccagctgtgcatacaaagaagatggttatttcagaagaaaagatgttctttgcttctcacacagaggaggaggtgtcagtcacagtccccgaggtacaaaaggaaattgttactgaagagaaaattcacgttgccatttccaaaagggttgaaccaccacctaaagtccctgagctacctgagaaaccagctccagaagaagtggcccctgttcctatccctaaaaaagtggagcccccagcaccaaaagttcctgaggttcccaagaaacccgtgccagaggagaaaaagccagttcctgtgcctaagaaggaacctgctgctcccccaaaagtcccagaggtgccaaagaaacctgtccctgaagaaaagattcccgttcctgttgcaaagaaaaaggaagctcccccagctaaagttcctgaagtacagaagggagttgtgacagaagaaaaaataaccattgtaactcaaagagaggaatctccaccaccagcagtgccagaaataccaaagaagaaagttcctgaagaaaggaaacctgttcctcggaaggaggaagaagttccaccaccaccaaaagtgccagctctgcctaagaaacccgtcccagaggagaaagttgcagtgccagttcctgtcgctaagaaagctcctcctccccgagctgaagtctctaagaaaactgttgtagaagaaaagagatttgttgctgaagaaaaactatccttcgcagttcctcaaagagtggaagtcacgcggcacgaagtatctgcagaggaggaatggagttactcagaagaggaggaaggtgtgtccatttcagtttatagagaagaagaaagagaggaggaggaagaagcagaggttacagaatatgaagtgatggaagagcctgaggaatatgttgtggaagaaaagctgcacattatttctaagagagtggaagctgagccagctgaagtgacagagaggcaggagaagaaaattgtactgaaaccaaaaattcctgctaaaatagaggagcctccaccggctaaagttcctgaagcacctaagaaaattgtgccagaaaagaaagttcctgctccagttcctaaaaaggaaaaggtgcccccacctaaagtgccagaagagccaaagaaaccagttccagaaaaaaaggttcctccaaaagtcattaagatggaagaacctctcccagccaaagtgactgagaggcacatgcaaattacccaggaagaaaaagttcttgttgctgtaactaaaaaagaggcgcctccaaaagcaagagtgccagaggaaccgaagagagctgtcccagaagaaaaagttctgaaactcaaacctaaaagagaggaggaaccaccagctaaagtgactgaattcagaaaaagagtggttaaagaagaaaaagtatcaattgaagctccaaaaagagaacctcaacccatcaaagaagtaactataatggaagagaaagaaagggcttataccctagaagaagaagctgtttcagtacaacgggaagaagaatatgaggaatatgaagaatatgattataaagaatttgaggagtatgaaccaacagaagaatatgaccaatatgaagaatacgaggagcgggagtatgaacgatatgaagagcatgaagaatacatcacagaaccagagaagcctatccctgtaaagcctgtcccagaagaaccagttcccacaaaaccaaaggccccaccggctaaagtgctgaagaaagctgtccctgaagaaaaagtaccagtgcccattcctaagaaactcaaacctccaccacccaaagtgcctgaagaaccaaagaaagtttttgaggaaaaaatacgtatttcaattaccaaacgtgaaaaagagcaggtgactgaacccgctgctaaagtgcccatgaagcccaagagggttgtcgcagaagaaaaagtacctgtccctagaaaagaagtagcaccacctgttagagtgccagaagtgcctaaagaacttgaaccagaagaggttgcctttgaagaggaagttgtaacccatgtagaagaatatcttgtagaagaagaagaagagtacattcatgaagaagaggagttcataactgaggaagaagtggtgccagtgataccagtcaaagtgcctgaggtacccaggaaacctgttccagaagagaagaaacctgttcctgttcccaagaagaaggaagctccaccggcaaaagtgcctgaggttcctaagaagccagaggagaaagttcctgtgcttattcctaaaaaggagaagcctccgccagcaaaagttcctgaagtgcccaagaaacctgtgccagaggagaaagtaccagtaccagttcctaaaaaggtggaagctccacctgccaaagtgccagaggtacccaagaagcctgtgcctgagaagaaggtgccagttcctgctcctaagaaagtggaggctccacctgcaaaagtgccagaggtgcccaagaagctcatcccagaagaaaagaaaccaacacctgttccgaaaaaagtggaagcaccaccacccaaagtgccaaagaaacgtgaaccagttccagttcctgtagctctacctcaggaagaggaagttctatttgaagaagaaattgttcctgaagaggaagttctacctgaggaagaggaagttctacctgaggaagaggaagttctacctgaagaagaggaagttctacctgaagaagaggaaattccacctgaggaagaggaagttcctcccgaagaagaatatgtacctgaggaagaagaatttgtacctgaagaagaagtccttccagaagttaaacctaaggtgccagtacctgcaccagtgcctgaaattaagaagaaagtgacagagaagaaagtggtcattcccaagaaagaggaggctccccctgccaaagttcctgaggtgcctaagaaggtggaagaaaaacgaatcattctccctaaagaagaggaagttctaccagttgaagtgactgaggagcctgaagaagagcctatttcagaagaagaaatcccagaagaaccacctagcatagaggaagttgaagaggtggcaccacctagagtgcctgaagtgattaagaaagcagtacctgaagcacctactcctgttcctaaaaaagtggaggcaccaccagctaaagtgtcaaagaaaattcctgaggaaaaagtacctgttcctgttcagaaaaaagaggcacccccagccaaagtgcctgaagtaccaaagaaagtcccagaaaagaaagtccttgtgcctaaaaaggaagctgttcccccagctaaagggagaactgtccttgaagaaaaagtatcagttgccttccgccaagaagtagtagtaaaagaaagactagaattagaagtagtagaagcagaagtggaagaaattccggaagaagaagagttccatgaagttgaagaatattttgaagaaggcgagtttcatgaagtagaagaattcatcaaattagaacaacatagagttgaagaagaacacagagttgaaaaagttcatagggtaatagaagtttttgaggctgaagaagtggaagtatttgaaaaaccaaaagctccacctaaagggcctgagatatctgagaaaatcatccctccaaaaaaaccgcccactaaagttgttcctcgaaaagagccaccagctaaagtaccggaggtgcctaagaaaattgtggtagaagaaaaagtacgtgttcctgaagagcccagagttccaccaactaaagtgcctgaagtgctgccaccgaaggaagtggtcccagaaaagaaagtaccggtgcctcctgccaaaaagccagaagctccacctcctaaagtgcctgaggctcccaaagaagttgttcctgaaaagaaagtgccagtgcctcctcctaaaaagcctgaagtgccacccacaaaagtcccagaggtgccaaaggcagctgtcccagaaaagaaggtgcctgaagctattcctcccaaaccggaaagtcctccccctgaagtgcctgaagtgctgccaccgaaggaagtggtcccagaaaagaaagtaccggtgcctcctgccaaaaagccagaagctccacctcctaaagtgcctgaggctcccaaagaagttgttcctgaaaagaaagtgccagtgcctcctcctaaaaagcctgaagtgccacccacaaaagtcccagaggtgccaaaggcagctgtcccagaaaagaaggtgcctgaagctattcctcccaaaccggaaagtcctccccctgaagtgccagaggctccgaaagaagttgttcctgaaaagaaagtgccagcggctcctcctaaaaagcctgaagtcacacctgttaaagtgcctgaggctcccaaagaagttgttcctgaaaagaaagtgccagtgcctcctcctaaaaagcctgaagtgccacccacaaaagtcccagaggtgccaaaggtagctgtcccagaaaagaaggtgcctgaagctattcctcccaaaccggaaagtcctccccctgaagtgttcgaggagcctgaggaagttgccctagaagagcctcctgctgaagttgtggaagagccagagccagcggcgcctccacaagtgaccgtaccacctaagaaacctgtcccagaaaagaaagcacctgctgtcgttgccaaaaaacctgaactaccaccagtgaaagtgcccgaggtgcccaaggaggttgttcctgaaaagaaggtgcctctggtggttcccaaaaagccagaagccccacctgctaaagtgcctgaagttccaaaagaagttgttccagaaaagaaagtagctgttcccaaaaagccagaagtcccaccagcaaaagtgccagaagtgccaaagaaacctgtcttggaagagaaaccagctgttcctgttccagaaagagcggagtctcctcccccagaagtatatgaagaacctgaggaaattgctcctgaagaggaaattgctcctgaagaggaaaagccagttcctgttgcagaagaggaggaaccagaggttccacctccagcagtgcctgaagagcccaagaagatcatcccagagaagaaagttcctgtcatcaaaaaaccagaagcaccgcctcctaaagaacctgaacctgaaaaggttattgagaagccaaaactcaaaccaagacccccacctcctccacctgctccacctaaggaagatgtgaaggagaaaatattccaacttaaagctattccaaagaagaaagttcctgaaaaacctcaggttccagaaaaagtggagcttacacctctgaaagtgcctggaggtgaaaagaaagttcgcaaattacttccggaacgtaaacctgaaccaaaggaagaagttgttctgaaaagcgttctaagaaaaagacctgaagaagaagaacctaaagtagaacctaaaaaactagaaaaagttaaaaaacctgcagtaccagaaccaccacctccaaaacctgttgaagaggttgaagtacctactgttacaaaaagggaaaggaagattcctgaaccaacaaaagtgcctgaaatcaagccagcaatacctctccctgcacctgaaccgaaaccaaagcccgaagcagaagtgaaaacaatcaaaccacctcctgtggaacctgaaccaacccccatcgctgccccagtaacagtgccagtggttggaaagaaagcagaagccaaagcacctaaggaagaggctgccaagccaaaaggtcctatcaaaggtgtacccaaaaagactccttcaccaatagaagccgaaaggagaaagttaaggccaggaagtggtggagagaaacctcctgatgaagccccgttcacctaccagctaaaggctgtgccactgaagtttgtgaaagaaatcaaagacatcatcttgacagaatcagagttcgttggctcttcagcaatctttgaatgtttggtctccccttccactgcaattacaacctggatgaaagacggtagcaatatccgtgagagtcccaagcacaggtttattgcagatggtaaagacagaaagctgcacatcattgatgttcaactttccgatgctggtgaatacacctgtgttttacgtttgggaaacaaagaaaagacctccacggctaaacttgttgtagaagaacttcctgtgcgttttgtaaaaacactggaagaggaagtcacagtggtcaaaggacagccattgtacttgagctgcgagttaaacaaagagcgtgacgtggtctggaggaaggatggcaagattgtggtggagaaacctggccgaattgtgccaggcgtcattggcttgatgcgggctctgaccatcaacgatgcagatgacacagatgctggaacatacacagttactgtggaaaacgccaacaacctggagtgttcatcttgcgtaaaagtagtagaagtcattagagattggctggtgaaacctatacgagaccagcatgtgaaacccaaggggacagctatttttgcctgtgatatagcaaaagatactccaaacattaagtggttcaaaggatatgatgaaatccctgcggaaccaaatgataagactgaaatactgagagatggaaatcatctgtacctcaaaattaagaatgctatgccagaagatattgctgagtatgcagtggaaattgaaggaaaaagataccctgcaaagctgacacttggagagcgtgaagttgaactgcttaaaccaatagaggacgttaccatttatgagaaagaaagtgcaagctttgatgcagaaatctcagaggcagacattcctggacaatggaaactgaaaggagaacttctaaggccctcacctacttgtgaaatcaaagcagaaggtggaaaacgcttcttaactttgcacaaagtcaaactggaccaagctggtgaagtcctctaccaggcccttaatgcaattacaactgccattttgacagtaaaagaaatcgaacttgactttgctgtgcccctgaaggatgtcactgttccagaaaggcgacaggctcgattcgaatgtgtcctcacccgagaggcaaatgttatatggtccaaaggacctgatataattaagtcatctgacaaatttgatatcatcgctgatggaaagaaacatattcttgttattaatgattctcaatttgatgatgaaggggtctatactgctgaggtggagggcaagaagacctcagctcggttgtttgtcacaggtataagactgaaattcatgtcacctcttgaagatcaaacagtaaaagaaggtgaaacagcaacttttgtttgtgaactttctcatgaaaaaatgcatgtagtctggttcaaaaatgatgccaaactccatacaagcagaacagtactcatctcttctgagggcaagactcacaaattggaaatgaaagaagtgacattggatgatatatctcagataaaagctcaagtcaaggagctgagctccacagcacagctgaaggtcttagaggccgatccctacttcactgtgaaattacatgacaaaactgcagtggagaaggatgagattactttgaagtgtgaagtgagcaaagatgtaccagtgaaatggttcaaagatggtgaagagattgtcccttcacccaaatattctatcaaggcagatggcctgcgccgcatcttaaaaatcaaaaaggcggaccttaaagataaaggcgaatatgtgtgtgactgtggcacagacaagaccaaggcaaatgttactgttgaggctcgactaataaaagtggaaaagcctctgtacggagtagaggtgtttgttggtgaaacagcccactttgaaattgaactttctgaacctgatgttcacggccagtggaagctgaaaggacagcctttgacagcttcccctgactgtgaaatcattgaggatggaaagaagcatattctgatccttcataactgtcagctgggtatgacaggagaggtttccttccaggctgctaatgccaaatctgcagccaatctgaaagtgaaagaattgcctcttatcttcatcacacctctcagtgatgttaaagtcttcgagaaagatgaggctaagtttgagtgtgaagtatccagggagcccaaaacattccgttggctaaaaggaacccaggaaatcacaggtgatgacagatttgagcttataaaggatggcactaagcattcaatggtgatcaagtcagctgcttttgaagatgaagcaaaatacatgtttgaagctgaagataagcacacaagtggcaaactgatcattgaaggaatccggctcaaattcctcacccctctcaaagatgtaactgccaaagagaaggaaagtgctgtatttactgtggagttatctcatgataacatccgagttaaatggttcaagaatgaccagcgcctacacaccaccaggtcggtctcaatgcaagacgaagggaaaactcattcgatcacattcaaagacctgtctattgatgacacctcccaaattagagtagaagctatggggatgagttcagaagctaaactcactgtgcttgagggagacccatattttacaggaaaacttcaagattatactggtgtagagaaagatgaagttattctacagtgtgaaattagcaaagcagatgcaccagtgaaatggtttaaggatgggaaggaaataaagccatccaaaaatgctgttattaaggcagatggcaagaaacgcatgctaatcctaaagaaagccttgaaatcagatattggacagtacacctgtgactgtgggacagataagacctcaggaaaacttgacattgaggatcgggaaattaaactggtgcgacccctgcacagtgtggaggtgatggagactgagacagcacgctttgaaaccgaaatctctgaagatgatatccacgccaactggaaactcaagggagaggccctactccaaacacctgattgtgaaattaaggaagaaggcaaaatacactcccttgttttgcacaactgtcgcctggaccagacgggtggggtggatttccaagctgccaatgttaaatctagtgcccacctccgagttaagccacgagtaattggtcttctgaggcctttaaaggatgtcaccgtgactgcaggggaaacagccaccttcgactgcgagctctcctacgaagatatcccagtggaatggtatctcaaagggaagaaactagagcccagcgataaggtggtcccacgttcagaaggaaaagttcatacacttactctgagggatgtaaagttagaagatgctggggaagtccaactaacagcaaaagatttcaaaactcacgccaacctctttgtgaaagaacccccagttgaattcactaagcctcttgaggaccagacggtcgaagagggagccactgcagtgctggagtgtgaagtctccagagaaaatgctaaggtgaaatggttcaaaaatgggacagaaatcctcaaaagcaagaagtatgaaattgttgctgatggcagggtcagaaaacttgttatacatgactgtaccccagaggatattaaaacatacacttgtgatgctaaggattttaagacttcctgtaacctgaatgtcgtgcctcctcatgtggaattcttaagaccactcaccgaccttcaagttagagaaaaagaaatggctcgatttgagtgtgaactttcccgagaaaatgctaaggttaagtggtttaaagatggtgctgaaattaaaaagggcaaaaaatatgacatcatatccaagggagcagtgcgcattcttgtcatcaacaaatgtctactggatgatgaagctgaatattcctgtgaagtaaggacagcgagaacttctggcatgctgacagttctggaagaagaagctgtctttaccaaaaatcttgccaacattgaagttagtgaaacagacactataaaactggtttgtgaagtctccaaacctggcgcagaagtgatttggtataaaggggatgaggagatcattgaaacaggaagatatgaaatactgactgaaggacggaagagaatcctggtcattcagaacgctcaccttgaggatgctggcaactacaactgtcgactcccaagctctcgaaccgatggcaaagtcaaagtacatgaactggctgctgaatttatctcaaagcctcaaaaccttgaaatacttgaaggagaaaaggctgaatttgtctgctctatatcaaaagaaagctttccagtccagtggaagagggatgataagacacttgaatctggagataaatatgacgttattgctgatggtaaaaagagggtcctagttgtgaaagatgccacattacaagatatgggcacttacgttgtcatggtaggggccgccagagcagcagctcacttgacagtcattgaaaaactcaggatcgtagttcctcttaaggacacccgggtgaaggaacaacaggaagttgtcttcaactgtgaagtcaatactgaaggtgccaaagccaaatggttcagaaatgaagaagctatatttgatagttcaaaatacatcattctccaaaaagacctagtctacaccctcagaattagagatgcacacttagatgaccaagccaactataatgtgtctttgaccaatcacagaggtgaaaatgttaaaagtgcagccaatctaatagtagaagaggaagaccttaggattgttgagcctcttaaagatattgaaacaatggagaagaaatctgtcacattctggtgcaaggtgaatcgtctcaatgtaacactgaagtggaccaaaaatggtgaagaagtgccttttgacaaccgtgtctcatacagagttgataagtacaagcacatgttaaccattaaagactgtggcttcccagatgaaggtgaatacattgtcactgctggacaagataaatctgttgctgagcttctcatcatagaagccccgacagaatttgtggaacacttggaagatcagacagtcactgagttcgatgacgctgtcttctcctgccagctctccagagagaaagccaatgtaaaatggtacagaaatgggagagaaatcaaagaaggcaaaaaatacaaatttgaaaaagatggaagtatacacagactcattataaaagattgcaggctggatgatgagtgtgaatatgcttgcggggtagaagacaggaagtctcgtgctagactttttgtggaagaaattcctgttgagatcatcaggcctccacaagatattcttgaagcccctggtgctgatgttgtctttttagcagaactcaataaagataaggtggaagtccaatggctaagaaataacatggttgttgtccagggtgataaacaccagatgatgagtgaaggaaagatacatcgactacagatttgtgatattaagccccgtgaccagggtgaatacagatttattgccaaagacaaagaagccagagctaagcttgaactggcagctgcaccaaaaatcaagacagctgaccaagaccttgtggttgatgttggcaagcctctgacaatggtggtgccatatgatgcctaccccaaagcagaagctgaatggtttaaagaaaatgaacctttatctacaaaaaccattgatactacggctgaacaaacttctttcagaattttagaagccaagaaaggagacaaagggaggtataaaattgtgcttcagaacaaacatggaaaagcagaaggattcatcaatttaaaagttattgatgttcctgggccagtacgtaacttagaagtgacagaaacatttgatggtgaagtgagccttgcttgggaagaacctttaactgatggtggaagcaaaatcataggttacgttgttgaaagacgtgacattaagagaaagacctgggttctggccacagaccgtgcagagagttgtgagtttactgtcactggtctacagaaaggaggagttgagtacctattccgtgtgagtgcaagaaacagagttggcactggtgagccagtagaaactgacaatcctgtagaagcaaggagtaaatatgatgttccaggccctcctttgaatgtaaccatcactgatgtgaatcgatttggtgtctcactgacatgggaaccaccagagtatgatggaggtgctgagatcacaaactacgtcattgaattaagagacaagacttctatcaggtgggatactgccatgactgtgagagctgaagacctgtctgcaactgttactgatgtggtagaaggacaggagtacagtttccgagtgagagcccaaaatcgaattggagttggaaaaccaagtgcagccacacccttcgtcaaagttgctgatccaattgagagaccaagtcctcctgtaaacctaacttcctcagatcagactcagtcatcagttcagctcaaatgggaacctcctctgaaagatggaggaagcccaatattaggctatataattgagcgatgcgaagaaggaaaagataattggattcgttgcaatatgaaacttgtccctgaactgacttacaaggttaccggattggaaaaaggaaataaatatttatatagagtatctgcagaaaataaagctggtgtttcagatccatctgaaattcttggtcctctcaccgctgacgatgcatttgttgaaccaacaatggatttaagtgcatttaaagatggtctggaagttattgtcccaaatcctatcacgatcctggttccaagtacaggctatccaaggccaactgcaacctggtgttttggagataaagtactagaaacaggggaccgggtgaaaatgaagaccttgtctgcctatgccgaacttgtcatttctccaagtgaacgttcagacaagggcatttatacactgaaattagaaaaccgtgtgaaaacaatttctggggaaattgatgtcaatgtaattgctcgcccaagtgcacccaaagaattgaaatttggtgatataaccaaggactcagtacatttgacttgggaaccacctgatgatgatggaggaagtccgttaactggatacgttgttgaaaaacgagaagtcagccggaaaacatggactaaagttatggactttgtgactgatctagaattcacagttcctgatcttgttcaaggaaaagagtacttatttaaagtttgtgctcgtaacaaatgtggccctggagaacctgcatatgttgatgaacctgtaaatatgtcaactcctgcaacggtacctgacccaccagagaatgttaaatggagagatcgaacagccaatagcatcttcttaacatgggatccacctaaaaatgatggtggttcacgcatcaaaggatatatagttgaaagatgtccacgtggttctgataaatgggttgcctgtggagaacctgttgcagaaacaaaaatggaagtgacaggtcttgaggaaggcaaatggtatgcctaccgcgtgaaggccttaaacaggcagggtgctagcaaaccaagcagacccacagaggaaatccaggctgtggacacacaagaggccccagaaatcttcctcgatgtgaagctccttgctggtctcactgtaaaagctgggaccaagattgaacttcctgccaccgtaaccggaaaacctgaacctaaaataacttggacaaaggctgatatgattctgaagcaggacaaaagaattaccattgaaaatgtccctaagaaatccacagtgactattgttgatagtaagagaagtgacactggcacatatatcattgaggctgtgaatgtgtgtggccgggccactgctgtggtggaagtgaacgtcttagataaacccggaccaccagctgcctttgacatcacagatgtaaccaatgagtcatgtcttctaacatggaacccaccacgcgatgatggtggatctaagatcacaaactatgttgtggagagacgagcaactgatagtgaagtgtggcacaagctctcatccaccgtcaaggatacaaacttcaaggccaccaaattaatccccaataaagagtacatcttcagagttgctgcagaaaacatgtatggtgttggtgaaccagttcaggcctctccaataacagccaaatatcagtttgatccacctggtcctccaactcgcctagaaccttctgatatcactaaagacgcagtgactctcacatggtgtgagccagatgatgatggtggcagcccaatcacaggatactgggttgaaagactggatcctgatacagataaatgggttagatgcaataagatgccagtaaaggacacaacatacagagtgaaaggtctcactaataagaaaaaatacagattccgtgtgttggctgaaaatcttgctggacctggaaaaccaagcaaatcaactgaaccaatcttaataaaggatcccatagatcctccatggccccctggaaaaccaactgtaaaagatgtaggcaaaacatcagtaaggttgaattggacaaaaccagaacatgatggaggtgcaaagattgagtcttatgtcattgaaatgctgaagactggaacagatgagtgggtcagagtggcggaaggggttcccaccactcagcacttgctcccagggctcatggaaggacaggaatactcattccgagttagagctgtgaataaggctggggaaagtgaacccagtgaacccagtgaccctgtgctttgccgggagaagctatatcctccatcaccaccacgctggcttgaagttattaatatcacaaaaaatacagcagacctaaaatggacagttcctgagaaagatggagggtcccccatcaccaactacattgtggaaaagagagacgtcaggcgaaaaggctggcaaacagtggataccactgtcaaggacaccaagtgcacagtcaccccactgactgagggctctttatatgtgttccgagttgctgcagaaaatgctataggacaaagcgactacaccgaaattgaggactctgtgctggccaaagacacctttaccactcctggaccaccctacgccctggcagtggttgatgtgacaaaacgacatgttgacctaaagtgggagccacctaaaaatgatggtggaagaccaatacagagatatgtcattgagaagaaagaaaggttaggtacccgttgggtgaaagctggaaagactgcaggacctgactgtaacttcagagtaactgatgtcatcgaaggaacagaggtccagtttcaggttcgggctgaaaatgaagctggagttggccacccaagtgaacccacagaaatcctatccattgaagatccaacaagtcctccctcaccaccccttgacctacatgtgactgatgctgggagaaaacacattgccattgcttggaagcctccagagaaaaatggtggaagtcctatcataggataccatgttgaaatgtgtccagtaggcactgagaaatggatgagagttaattctcgcccaataaaggacttgaaattcaaggttgaagaaggtgttgttcctgacaaagaatatgtcctgagagtgagagcagtcaatgctattggtgtcagcgagccatctgaaatctctgaaaatgtggttgccaaagacccagactgcaagccaacaattgacctggagactcatgacattattgttattgaaggtgaaaagttaagcattcctgttcccttcagagctgtcccagttccaactgttagttggcataaagatggcaaagaagttaaagcaagtgatagattaacaatgaagaatgatcacatctctgcacaccttgaagttcccaagagtgtccgtgcagatgccggaatttataccattacactggagaataagctcggctcagcaacagcctcaatcaatgtcaaagtcataggcctacctggaccatgcaaagatattaaagcaagtgacattaccaagagttcttgtaagttaacttgggaacctccagaatttgatggtggaaccccaattcttcattatgtcctggagcgcagagaagctgggaggagaacatatataccagtcatgtctggtgagaacaaactgtcatggactgtgaaggatctcataccaaatggtgaatacttcttccgtgttaaagcagtcaacaaggttggtggaggagaatatattgaactgaaaaatccagtcattgctcaagatccaaagcaaccccctgatccacctgtagatgtagaggttcataatcctacagcggaggcaatgactattacatggaagccacctttgtatgatggagggagcaagataatgggctacatcatagagaagattgctaagggtgaagaaaggtggaagagatgcaatgaacacctggtaccaatcctgacctatacagcaaaaggacttgaagaggggaaagagtaccaattccgtgtgcgagcagagaacgccgcgggtattagtgaaccttctcgggctactcctccaaccaaagctgtagatcccattgatgcccccaaagtcattctgagaacaagcctagaagtgaaacgaggtgatgaaatagcacttgatgcaagtatttctggatcaccttacccaactattacatggataaaggatgaaaatgttattgtaccagaggaaattaagaagcgtgcagcacccttggttaggagaaggaagggtgaagttcaagaagaagaaccatttgtcctgcctctgacacagcgtttgagtattgacaacagcaaaaagggagaatctcagctacgcgtccgagattctctccgacctgaccatggtctgtatatgatcaaagttgaaaatgaccacggtattgcaaaagctccttgtactgtcagtgtgttagatacaccgggaccaccaatcaactttgtatttgaagatatcagaaagacctcagtcctttgtaaatgggaaccaccccttgatgatggtggcagtgaaatcataaactacactttggaaaagaaagacaagacaaaacccgactcagaatggattgttgtcacttcaacacttagacattgcaaatattcagtaacaaaactgattgaaggaaaagagtacctcttccgtgtaagagctgaaaacagatttgggccaggtccaccatgtgtttcaaagccacttgtggctaaagatccatttggaccacctgatgcaccagataagcccattgtggaagatgttaccagcaacagtatgctagtgaaatggaatgaaccaaaagataatggaagccccattttgggttactggcttgaaaaacgtgaagttaacagtacacattggtctcgtgtcaacaaaagccttctgaatgccttgaaagccaatgtagatggcttattagaaggactcacctatgtcttcagagtatgtgctgaaaatgcagctggacctggaaagttcagtccaccttcagatcccaaaacagcacatgatccaatctctcctcctgggccacctatcccaagagtcactgacacaagctctacaactattgaactagaatgggaacccccagctttcaatggtggtggggaaattgttggctattttgttgataagcagttggttggcacaaatgaatggtcacgctgcacagagaagatgatcaaggtccgtcagtacaccgtcaaagaaatccgagagggtgctgattacaaacttcgggtgagtgctgtcaatgccgcaggggaaggaccgcctggagaaacacaacctgttactgtggctgaaccacaagagcctccagctgtggaactggatgtttctgtcaagggtggaatacaaataatggctgggaagactcttagaattccagctgtggtgactggtcgccctgtacctacaaaagtatggaccaaagaagaaggggagctggataaagaccgtgttgtaatagacaacgttggaaccaaatctgaactaattatcaaggatgcactgcgaaaagaccatggcagatatgtgattacagctacaaatagctgtggttccaaatttgcagcagccagggtagaagtttttgatgtccctggtccagttcttgacttaaaacctgttgtaacaaacagaaaaatgtgtctacttaactggtctgatccagaagatgatggaggaagtgaaataacaggctttatcattgaaagaaaagatgccaagatgcatacttggagacaaccaatagagactgagagatctaaatgtgacatcacaggtctgcttgagggacaagaatataagttccgtgttattgccaagaacaagtttggctgtggccctcctgttgaaataggaccaattcttgcagttgatccactaggtcctccaacatctccagagaggctcacatacactgaaaggacaaagtccactatcacacttgactggaaagagccccgcagtaatggtggcagtcccatccaaggatatatcattgaaaaacggcgtcatgacaaacctgactttgaaagagttaacaagcgactctgcccaaccacatcttttctggttgaaaatcttgatgaacaccaaatgtatgagttccgtgtcaaagctgtcaatgaaattggtgaaagtgaaccatccctacctcttaatgtagtcatacaagatgatgaagtgcctccaactattaagttgcgtctgagtgttcgaggagacactatcaaagttaaggcaggagagcctgtccacatccctgcagatgtgacaggccttccaatgcctaagattgaatggtccaaaaatgaaactgtaattgaaaaacccactgatgcacttcagataaccaaggaagaggtatcccgaagtgaggcaaaaactgagcttagcattcccaaagcggtccgggaggacaaaggcacttacacagttactgcttccaatcgccttggctcagtgttccgaaatgttcacgttgaagtatatgaccgcccatccccaccaagaaatcttgctgttactgacattaaagctgaatcttgctacttgacatgggatgcccctcttgataatggtggcagtgaaatcacccattatgttattgacaaacgtgatgcaagtaggaagaaagcagaatgggaggaagtcaccaacactgctgtagagaaaagatatgggatctggaaacttatccccaatggtcagtatgagttccgagtcagggcagtgaataaatatggaatcagtgatgagtgcaaatcagataaagtagtcattcaagatccttatcgccttcctggacctccaggaaaaccaaaagttttggcacgcaccaaaggatcaatgctagtgagctggactcctcctttggacaatggtggctctccaattactggctactggctggagaaaagagaagagggaagtccttattggtcacgtgttagccgagcaccaataaccaaagtgggattgaaaggcgtggaatttaatgttcctcgtttgcttgaaggcgttaaataccagttcagagccatggcaataaatgctgcaggaattggtcctcccagtgaaccatcagatccagaggttgcaggagatcccatatttccaccggggccaccttcttgcccagaagttaaagataaaacgaagtcaagcatctcactaggatggaaacctccagccaaagatggtggcagcccaatcaaaggatacattgtagaaatgcaagaagaaggtactactgactggaaaagagtaaatgaaccagacaaacttataactacctgtgaatgtgtggtgcctaatctgaaagagctcaggaagtacagattcagagtgaaagctgtcaatgaagctggtgaatctgaaccaagtgatacaactggggagatccctgccactgatattcaagaggaaccagaagttttcattgacattggagcacaggactgtctggtttgtaaagctggctcacagattaggattcctgctgtcatcaagggacgcccaacaccaaaatcatcttgggaatttgatggaaaggcaaagaaagcaatgaaggatggagttcatgacatacccgaagatgcacagctggagactgctgaaaactcctcagtaattattattccggagtgtaaacgatctcatacaggcaaatacagcatcacagccaagaataaagcaggacaaaagactgcaaattgcagagttaaagtcatggatgtaccaggcccacccaaagatctgaaagtcagtgatatcacaaggggtagttgcagactttcatggaagatgccagacgacgatggaggagacaggatcaaaggctatgttattgagaagaggactattgatggaaaagcctggaccaaagtcaatccagactgtggaagcaccacatttgtagtgcctgatctcctctctgaacagcaatatttcttccgtgtgcgagcagaaaaccgttttggtattggcccacctgtggaaaccattcagaggaccactgccagagatccgatatatcctcctgatcctcctattaaactcaagattggcctcatcacaaagaacacagtgcatctgtcatggaaacccccgaagaatgatgggggctcccctgttacccactatattgttgagtgccttgcatgggaccctactgggacaaagaaagaagcctggaggcagtgcaataagcgtgatgtggaagaactgcaatttactgttgaagacctagtagagggtggggaatatgaattccgagtcaaagctgtcaatgctgcaggagtcagcaagccttcagccactgttggccctgtgactgtcaaagaccagacatggtgcccaccatcaattgatctaaaagaattcatggaggttgaagaaggaaccaatgttaacattgtggccaaaattaaaggtgtgccattcccgacactaacctggtttaaagctcctccaaagaagcctgataacaaagaacctgttctctatgacacccatgtcaacaaactggtggtagatgatacttgcactttagttattccgcagtctcgcaggagtgacactggcttatataccatcacagctgtaaataatctgggaacagcatcaaaggagatgagactgaatgtcctgggtcgtcctggccctccagtgggacccataaaatttgaatctgtttcagcagatcaaatgacactatcttggtttccacctaaagatgatggtgggtctaagattacaaactatgtaattgagaaaagagaagctaacaggaagacatgggtccatgtctccagtgaacctaaggagtgcacgtacacgattcccaaattgctagaaggccatgaatatgtattccgaatcatggcccagaataaatatggcattggagaacctcttgacagtgaacctgaaacagcaagaaacctcttctctgtccctggagcaccagataaaccaacagttagcagcgtgactcgtaactccatgactgtcaactgggaagagccagaatatgatggaggctctcctgtgacagggtactggctggaaatgaaagacaccacttcaaagagatggaagagagttaaccgagatcctatcaaagccatgactttgggtgtttcttataaagtgactggtcttattgaaggttccgactatcaattccgggtatatgcaatcaatgctgctggcgtgggtccagcaagtctgccatcagacccagcgactgctagagatccaattgcccctcctggtcctccatttcccaaagtgacagattggactaaatcatctgcagatctggagtggtctcccccactaaaagatggtggatccaaagtaactggatacatcgttgaatataaagaagaaggaaaagaagaatgggaaaagggtaaagataaagaagtgagaggaacaaagcttgttgtgacaggattaaaggaaggagcattctacaaatttagagttagagcagtcaacattgctggcattggagaacctggagaggtcacagatgtcattgaaatgaaggacagacttgtttcacctgaccttcagctagatgccagtgtcagagatagaattgttgtccatgctggaggggtgatccgaatcattgcctatgtgtctggaaagcctcctccaaccgtcacctggaacatgaatgaaagaaccttacctcaagaagccaccattgagaccacagccattagctcatccatggtcatcaagaactgccagaggagccatcaaggcgtctattctcttcttgccaaaaatgaagcggagaaagaaagaagacaattattgttgatgtattagatgttccaggtcccgttggaacaccattcctagctcacaacctaaccaatgagtcctgcaaactgacatggttttctccagaagatgatggaggctctccaatcaccaattatgtcattgaaaagcgtgaatctgaccgcagagcatggaccccagtgacatatacagttacccgacaaaatgctactgtccagggtctcattcaaggaaaagcctactttttccgaattgcggctgaaaatagtattggcatgggtccatttgttgagacatcagaggcacttgttatcagagagccaataactgtaccagagcgtcctgaagacctggaagtcaaagaagttactaaaaatactgtaactttgacttggaatcctcctaagtatgatggtgggtcagaaattattaactatgtcctagaaagtcggctcattgggactgagaagttccacaaagttacaaatgacaacttgcttagcagaaaatacactgttaaaggcttaaaagaaggtgatacctatgagtaccgtgtcagtgctgtcaacattgttggacaaggcaaaccatcattttgcaccaaaccaattacttgcaaggatgagctggcacccccaacgcttcacctcgacttcagagataagctcacgattcgagttggtgaagcttttgccctcactggccgttactcaggcaaaccaaagcctaaggtttcctggttcaaagatgaagctgatgtgctggaagatgatcgcactcatataaagactacaccagcaacacttgctttagagaagatcaaggccaaacgttcagattccggcaaatactgtgtggttgtggagaacagtacaggctctaggaaaggtttctgtcaagttaatgttgttgaccgtcctggaccaccagtaggaccagttagttttgatgaggtgaccaaagattacatggttatctcttggaagcctcctttagatgatggaggcagtaaaatcaccaattatattattgagaagaaggaagtgggtaaagacgtctggatgccagtgacatctgcaagtgctaaaacaacatgcaaagtttctaaactacttgaaggaaaagattatattttccggatacatgctgaaaatctgtatggaataagtgatcctctggtgtctgattcaatgaaagccaaagatcgtttcagggttcctgatgcacctgatcagccaattgttacagaagttaccaaagactctgcattagtaacctggaataagccacatgatggaggaaaacccatcacaaactacatcctggaaaagagagaaactatgtctaaacgatgggctagagttaccaaagatcctattcatccatacactaaatttagggttcctgatcttctagaaggatgtcagtatgaattccgggtttctgcagaaaatgaaattggtattggagatccaagcccaccatccaaaccagtctttgctaaagatccaattgctaaaccaagtccacctgttaatcctgaagcaatagatacaacatgcaattcagtcgatctaacttggcagccaccacgtcatgatggtgggagcaagattctgggttatattgttgagtaccagaaagttggagatgaagagtggagaagagccaatcacacccctgagtcatgtcctgaaactaaatataaagtcaccggtcttcgggacggtcaaacctataagtttagagtgttagcagtcaatgcagctggtgaatcagatccagctcatgttccggagccagtcctagtaaaagacaggcttgaaccccctgagttgattcttgatgccaacatggcaagagaacaacacattaaagttggtgatactctaagacttagtgccatcatcaaaggagtgccattcccaaaagtaacttggaaaaaagaagacagagatgctccaactaaagcaagaattgatgtgactccagttggtagcaagcttgaaattcgtaatgctgcccatgaagatggtggaatttattctttaacagtggagaatccagctggttcaaaaactgtctcagtaaaagtacttgtattagataaacctgggccacctagagatctggaagtcagtgaaattaggaaagattcatgttaccttacttggaaagaaccactggatgatggtggttctgttattaccaattatgtggttgagaggagagatgttgccagcgcccagtggtcacctctctcagctacatcaaagaaaaagagtcacttcgctaagcatctgaatgaaggcaaccagtacctcttccgagtagctgcggagaaccagtatggacgtggtccttttgttgaaacaccaaaaccaatcaaggctttggatcctctccatcccccagggccacccaaggacctgcaccatgtagatgttgacaagactgaagtctccctagtctggaataagccggatcgtgatggtggttctccaatcactggatatttggtagaatatcaagaagaaggcacccaggactggattaaatttaagactgtgacaaacttagagtgtgtggttactggactacaacaaggaaagacctatagattccgtgtaaaagctgaaaacattgtgggtcttggtctccctgacacaactatcccgatagaatgtcaagaaaaactagtgcctccatccgtggagctagatgtgaaattaattgaaggtcttgtggtaaaggctggaaccacagtcagattccctgctattataagaggtgtgcctgttcctactgcaaagtggacaaccgatgggagtgagattaaaaccgatgagcactacacagttgaaacagacaacttctcatcagtacttaccattaagaactgcttaaggagagacactggggaatatcaaatcacagtttccaatgcagccggtagcaaaacagtagccgtacatcttactgttcttgatgttcctgggccaccaacaggtcctattaatattctggatgttactcctgaacacatgactatctcatggcagccacctaaggatgatggaggaagccctgtgataaattatattgttgagaaacaagatacaaggaaagacacgtggggtgttgtctcttccggaagcagtaagacaaagctgaaaatcccacatctgcagaagggctgtgaatatgttttccgagttagagcagagaataagataggtgttggtcctccccttgactccacacctactgttgctaagcataaatttagtcctccgtctcctcctggtaaaccagtggttactgacattactgaaaatgcagcaacagtgtcttggaccctgccaaaatctgatggtggcagtccaataactggctactatatggaacgtcgagaagtaactggcaaatgggtgagggtcaacaaaacacctatcgctgacctgaagttcagagtgactggactctatgaaggaaatacatatgagtttagagtttttgctgaaaatcttgcaggactaagcaaaccatccccaagttctgatccaataaaagcttgccggcccatcaaaccacctggaccacctattaatcctaaactgaaagacaagagcagagaaacagctgatttggtgtggacaaagcctctcagtgatggtggtagccccattctaggatatgtagtggaatgtcagaaacctggcacagcacaatggaacaggattaataaagatgaactcattaggaatgtgcctttagggtacctggactaattgaaggaaatgagtacagattccgtataaaggcagctaatattgtaggagagggtgagccaagagaactagcagaatctgtgattgcaaaagatatccttcatcctccagaagtagaacttgatgttacttgtcgtgatgttattaccgtgagagtaggccaaactatccgcattctagctcgagtcaaaggcagacctgaaccagacataacttggactaaggaaggcaaagtattggtccgagaaaagagggtggaccttattcaggatctacctcgtgttgagttacaaattaaagaagctgttagagctgatcatggcaagtatatcatctcagctaagaacagcagtggacatgcccaaggttcagccatcgttaacgtccttgacagacctgggccttgccagaatttgaaggttaccaatgtaaccaaagagaactgtacaatttcttgggaaaacccactagataatggtggctcagaaataacaaacttcatagtagaatatcgcaaaccaaaccagaaaggctggtcaattgttgcatcagatgtcactaaacgattaatcaaggccaaccttttagccaacaatgaatactatttccgagtttgtgcagagaataaagtaggtgttgggccaaccatcgaaacaaaaactcccattctggctattaaccctattgacagaccaggtgagcctgaaaaccttcacattgcagataaaggaaagacatttgtctatctaaagtggcggaggcctgactatgatggtggcagtccaaatctgtcatatcatgttgagagaaggcttaagggctccgatgactgggaaagagtgcataaaggaagcattaaagaaactcactacatggttgacagatgtgttgaaaaccagatttatgagttcagagtgcaaacaaagaatgaaggtggggaaagtgactgggtgaagacagaggaagttgttgtgaaagaagacttacaaaaaccagtacttgatctgaaattaagtggggtcctaactgtcaaagcaggggacaccattaggcttgaggcaggggttagaggcaaaccattcccagaagttgcatggaccaaggacaaagacgctacagacttaacaagatcaccaagggtcaagattgatacccgtgctgattcatctaaattttctcttactaaagcaaagcgaagtgatgggggtaaatatgtagttacggcaactaacacggctggcagttttgtggcctatgccactgtcaatgttttagataagcctggtcctgtgagaaatctgaaaattgttgatgtgtccagtgataggtgtactgtttgctgggatccaccagaagatgatggtggctgtgaaatccaaaattatattctagaaaaatgtgagacaaagcgaatggtttggtctacctattctgctactgtcttgacacctggtactacagtaacacgtctcatagaaggaaatgaatatattttcagagtccgtgcagaaaataaaataggcacagggcctccaacagaaagtaaaccagtcatagccaaaaccaagtatgataaacctggtcgccctgatcccccagaagtcactaaagtaagcaaagaagagatgactgtggtttggaatccacctgaatatgatggtggaaagtctataactggatactttttggagaaaaaggaaaagcattcaacacgatgggtccctgtcaacaagagtgcaatccctgagagacgtatgaaagtacagaatctcctcccagaccatgaatatcagttccgtgtcaaggcagaaaatgaaattggaattggagaaccaagcttgccttcaagaccggtggtggcaaaagaccccatagagccacctggtccaccaaccaatttcagagtggttgatacaaccaaacattccataactcttgggtggggaaaaccagtctatgatggtggtgcaccgatcattggatatgttgtggaaatgagaccaaaaatagcagatgcgtctcctgatgaaggctggaaacggtgtaatgctgcagcacagcttgtacgcaaggaattcactgttaccagcttggatgaaaaccaggaatatgagttcagggtgtgtgcccaaaaccaagttggtattgggcgccctgcagagctaaaggaagctatcaaacctaaagaaatactagaacctccggagattgatttggatgccagcatgaggaaactggtcatagtgagagcaggatgccctattcgtctctttgctatagtgagaggacgaccagcccctaaagtcacttggcgaaaagttggcattgataatgtggtcagaaaaggacaagttgatctggttgacactatggccttccttgtcatccccaattctacccgtgatgactcaggaaaatattccttaacacttgtgaacccagcaggagaaaaggctgtattcgtaaatgtcagagtattagacactcctgggcctgtgtctgatttaaaagtttcagatgtcactaaaacatcatgccatgtgtcctgggcccctcctgaaaacgacggtgggagccaagtgacacattatatcgtggagaaacgtgaggcagacagaaagacatggtcgaccgttaccccagaagttaagaaaacaagcttccatgtaaccaatcttgtccctgggaatgagtattacttcagagtaactgctgtcaacgaatatggccctggcgtcccaacagatgtcccaaaaccagtgcttgcatcagatcctctaagtgagccggatcccccaaggaaattagaagtgactgaaatgaccaagaacagtgccaccttagcctggttacctcccctacgtgatggaggtgctaaaatcgatggctacatcactagttacagagaagaagagcagcctgcagatcgctggacagagtactcagtggtaaaagatctgagccttgttgtcactggcctaaaggaaggaaagaaatacaaatttagagtagcggccagaaatgctgttggagtcagtttgccaagagaagctgaaggagtgtatgaagccaaagaacaactgttgccaccaaagatccttatgccagagcaaataactatcaaagctgggaaaaaactccgaattgaagcccatgtgtatggaaagcctcatcccacctgtaaatggaaaaaaggagaagatgaagttgtcacatccagccacctggcagtgcataaagcagacagctcttcaattctgatcataaaagatgtgactaggaaagacagtggttactacagcctcacagcagagaacagttctgggacagacactcagaaaatcaaagttgtagtcatggatgcccccggcccccctcagcctccatttgacatttctgatatagacgctgatgcttgctccctgtcatggcacatccctctggaggacggaggcagtaacatcaccaattatatagtggagaagtgtgatgtaagccgaggtgactgggtcacggctctagcttcagtcacaaaaacttcctgcagggttggaaagctgatcccaggccaggagtacatcttccgggtccgtgctgaaaaccgatttggcatttcagagcctctcacatctccaaagatggttgcgcagttcccatttggtgttcctagtgaaccaaagaatgcacgagtcaccaaagtcaacaaggactgtatttttgttgcttgggacagaccagatagtgatggagggagccccattattggttatctgattgaacgcaaggaaagaaacagtttgctgtgggtgaaagccaatgatactcttgtccggtcaactgaatatccttgtgctggccttgtagaaggtcttgagtattcattcagaatctatgccctaaacaaagctggatccagcccacccagcaaacccacagaatatgtaactgcaagaatgccagttgatcctcctgggaaacctgaggttattgatgtcaccaagagtactgtatctctgatctgggctcgtccaaagcatgatggaggcagtaaaattattggctatttcgtagaagcttgcaaacttcctggtgataaatgggtacggtgcaatactgcacctcaccagattccccaggaagagtacacagctactggcctagaagagaaagctcagtatcaatttagagctattgccaggaccgcggtaaacattagcccaccttctgaaccttctgatccagtgactatcctcgcagaaaatgtccctcccaggatagacctgagtgtggctatgaaatctttgcttactgtgaaagctggaactaatgtctgcttggatgctactgtttttggtaaaccgatgccaacagtttcttggaaaaaagatggcacactgctaaaaccagcagaaggcataaagatggccatgcagcggaatctgtgcaccttggagctattcagcgtgaaccggaaggactcaggagactataccattactgctgaaaattcaagtggttctaaatcagccaccattaagcttaaagtgttagataaaccgggtcctccagcatctgttaaaatcaacaaaatgtattcagatcgtgctatgctttcttgggaaccgcctcttgaagatggaggctcagaaatcaccaactatattgttgacaaacgtgaaacaagcaggcccaactgggctcaagtctctgcaactgtgcctatcaccagctgcagcgtggagaaacttatagagggccatgagtatcagttccgtatttgtgctgaaaataaatatggagtaggcgatccagtcttcactgaaccagcaattgccaaaaacccatatgacccaccaggacgctgtgatcctcctgttattagcaacataaccaaagatcacatgacagtcagctggaagccaccagcagatgatgggggctcacccatcactggctatttgcttgaaaagcgggaaacccaggctgttaactggactaaggtcaacagaaaacctattatagaaagaacattaaaagcaacaggtcttcaagaaggtaccgaatatgagttccgtgttacagctataaataaagctggaccaggcaaacccagtgacgcatccaaggccgcttatgctcgggaccctcagtatcctcctggcccaccggctttccctaaagtatatgatacaactcgcagctctgtgagtctatcttggggcaagccagcctatgacggcggcagccctatcattggttatctcgttgaagtaaaacgggctgactccgataactgggtgaggtgcaacttaccacagaatctacagaaaacccgctttgaggttactggcctgatggaagacacacaatatcaattccgtgtgtatgccgttaataagattggatacagtgaccccagtgatgtgccagataaacactatcccaaggacatcttaattccacctgagggagaacttgatgcggacttaaggaagacactcatattacgtgctggagttactatgagactatatgtaccagtaaaaggacgcccacctccaaagattacttggtctaaaccaaatgtcaatctaagagacaggattggactggacataaagtcaactgactttgacactttcttgcgctgtgaaaatgtgaacaaatatgatgcaggaaaatatatcttaaccctggagaacagctgtggtaaaaaggaatataccattgttgtgaaagtgcttgatactcctgggccacctgtcaatgtgactgttaaggaaatatccaaagactctgcttatgttacctgggagcctcccattattgatggcggaagccccatcataaactatgtggtacaaaaacgtgatgcagagaggaaatcctggtctacagtgacaactgagtgctccaaaacaagcttcagagtagctaatttggaggagggaaaatcctacttcttccgagtgtttgctgaaaatgagtatggcattggtgatcccggtgaaactcgtgatgctgtcaaagcttcccaaactcctggaccagttgtggacctgaaagtgaggtctgtatctaagtcatcctgtagcattggctggaaaaagcctcacagtgatggtggaagtcggattattggatatgtagttgatttcctgactgaagaaaataagtggcaacgagttatgaaatccttaagcctacagtactctgcaaaagatttgactgaagggaaggaatataccttcagagtgagtgctgagaatgaaaatggagaaggaaccccaagcgaaatcactgttgtggcaagggatgatgttgtggctcctgatcttgacttaaagggtctacctgatttgtgctacttggctaaagaaaacagcaacttccggcttaagatccccataaaaggcaagccagctccatcagtctcctggaagaaaggggaagatcctctagcaactgacactagagtcagtgttgagtcatctgcggttaacacaactcttatagtgtacgattgccaaaaatctgatgctggaaaatacacaatcacacttaagaatgttgctggcaccaaggaaggaactatctccataaaggttgttggcaagcctggcatccccactggaccaatcaaatttgatgaagtcacagcagaagccatgaccttaaagtgggctcctccaaaggatgatggaggttctgaaatcaccaactatatcctagagaagagggattctgtgaacaacaagtgggtgacgtgcgcctcagctgtccagaaaaccacctttagagtaaccagacttcatgagggcatggaatataccttcagggtcagtgccgaaaataaatatggtgtaggggaaggcctgaaatcggagccaattgttgcgagacatccatttgatgtgcctgatgctcccccacctcccaatattgtggatgtcagacacgattcagtatctctaacttggactgaccccaagaaaactggtggttctccaattacagggtatcatctcgagttcaaggaaagaaacagccttttgtggaagagagctaacaagactccgataaggatgagagactttaaagtgacaggattaactgaaggtcttgaatatgaattccgagttatggcaatcaatttagcaggtgtgggcaagccaagcctaccatcagagcctgttgtggcactggacccaattgatcctcctggaaaacctgaggttattaacataacaaggaattcagtgactctcatttggactgaacctaaatatgacggtggtcataagttaactggatatatagtggagaagcgagatctaccttcgaagtcttggatgaaagccaaccatgttaatgtcccagaatgtgcctttactgtaactgaccttgttgagggtggaaaatatgaattcagaattagagcaaagaatacagcaggtgctatcagtgctccatcagaaagtacagaaaccattatttgcaaggatgaatacgaggcaccaacaattgtccttgatcccacaataaaagatgggctaacaattaaagcaggggataccattgttttgaatgccattagcattcttggcaaaccccttccaaaatcaagttggtccaaggcaggaaaagacattagaccatcagatatcactcagataacttcaaccccaacatcttccatgcttactatcaagtatgccactagaaaagatgcgggtgaatataccatcactgctaccaatccttttggcacgaaggtggaacatgtgaaggtaacagtccttgatgtacctggtcccccaggtcctgttgaaatcagtaatgtttctgctgaaaaagcaacacttacatggacacctcccttggaagatggcggctcaccaattaagtcctatatacttgaaaagagagaaaccagccgacttttgtggacagtggtttctgaagatattcagtcttgcaggcatgtggcaaccaaacttatccaaggaaatgagtacatcttccgggtctcagctgtaaaccactatggcaaaggagaacctgtacagtctgaacctgtcaaaatggtagacagatttggtccccctggccctcctgaaaaaccagaggtatcaaatgtcactaagaacactgccactgtcagctggaaaaggccagtggatgatggtggcagcgaaattacaggatatcatgtagaaaggagagaaaagaaaagcctgcgatgggtgagagcaataaaaacaccagtttccgatctcaggtgcaaagtaacaggactgcaagaaggaagcacctacgaattccgtgtcagtgcagaaaacagagcaggaattggtccacccagtgaggcttcagattctgttctgatgaaagatgcagcatatcctccaggaccaccttcaaatccgcatgtcactgatactaccaagaaatctgcttctttggcatggggcaagcctcattatgatggtggacttgaaatcactggctatgtcgtggagcatcaaaaagtaggagacgaggcctggataaaagataccacaggaaccgccctcagaatcactcagttcgttgttcctgatcttcagactaaagaaaaatacaacttcagaatcagtgccatcaacgatgcaggtgttggggagccagcggtgattccagatgttgaaatcgtagaacgggagatggctcctgattttgaactagatgccgagcttcgaagaacacttgttgttagagcaggactcagtattaggatatttgtgccaattaaaggtcgtcctgctcctgaagtgacatggaccaaagataacatcaacctgaaaaaccgagccaacattgaaaatacggaatcatttactcttctgattatcccagaatgtaacagatatgataccggtaaatttgtcatgaccattgaaaacccggctgggaagaaaagtggctttgtgaacgtcagagtcttggacacgccaggcccagtcctcaacctgcggcctacagacatcacaaaggacagtgtcaccctgcactgggacctccctctgatagatggaggctcacgtataacaaactacattgtagagaaacgtgaagcaacacggaaatcttattccacagccaccactaagtgccataaatgcacatataaagttaccggcttgtctgaagggtgtgaatatttcttcagagtgatggcagagaatgaatatggaattggtgagccaacagaaactacagagcccgtaaaagcctctgaagcaccatctccaccagacagccttaacatcatggacataactaagagcaccgtcagcctggcatggcctaagcccaaacacgatggtggcagcaagatcactggctatgtgattgaagcccaaagaaaaggctctgaccagtggacccacatcacaaccgtgaaagggttagaatgtgttgtgaggaatctaactgaaggagaggaatataccttccaagtgatggcagtgaacagcgcggggagaagtgcccctagagaaagcagacccgtcattgtcaaggagcagacaatgcttccagagctggatctccgtggcatctatcagaaactggtcattgccaaagctggtgacaacatcaaagttgaaattccagtgctcggtcgaccgaagcccacagtgacatggaaaaaaggagaccaaattcttaaacagacacagagagttaattttgaaaccacagcgacttcaaccattttaaatatcaatgagtgtgtcagaagtgatagtgggccctatccattaacagcaaggaacattgtaggagaggttggtgatgtcatcaccattcaagtccatgatatcccagggccacctactggaccaatcaaatttgatgaagtttcatctgattttgtaaccttctcttgggacccacctgagaacgatggtggtgtaccaataagcaactatgtagtggaaatgcggcagactgacagtactacctgggttgagttagcaaccaccgttatacgtactacctataaagccacccgccttactactggattagagtatcagttccgtgtaaaagctcagaatagatatggagttggaccaggcatcacatcagcatgcatagttgccaactatccatttaaggttcctggacctcctggtacccctcaggtaactgcagttaccaaggattcaatgacaattagctggcatgagccactttctgatggtggaagccccattttaggatatcatgttgaaagaaaagaacgaaatggtattctctggcagactgtgagcaaagctttagtaccaggcaacattttcaaatcaagtggacttacagatggtattgcttatgagttccgggtgattgcagaaaacatggcaggcaaaagtaagccaagcaagccatcagaacctatgttggctctggatcccattgacccacctggaaaaccagtacctctaaatattacaagacacacagtaacacttaaatgggctaagcctgaatatactgggggctttaaaattaccagttatatcgttgaaaagagagaccttcctaatggacggtggctgaaggccaacttcagcaacattttggagaatgaatttacagtcagtggcctaacagaagatgctgcatatgaattccgtgtgatcgccaaaaatgctgcaggtgccatcagtccaccatctgagccatctgatgctatcacttgcagggatgatgttgaggcaccaaagataaaggtggatgttaaatttaaggacacggttatattaaaagcaggtgaagcattcagactggaagctgatgtttcaggccgcccacctccaacaatggaatggagcaaagatggaaaagagctggaaggcacagcaaagttagaaataaaaattgcagatttctctactaatctggtaaacaaagattcaacaagaagggatagtggtgcctatacccttacagcgactaatcctggtggctttgctaaacacattttcaatgtcaaagttcttgacagaccaggcccacctgaaggacctttggctgtaactgaagtgacatcagaaaagtgtgtactatcatggttccctccactggatgatggaggtgccaaaattgatcattacatagtacagaaacgtgaaaccagcagattggcatggacaaatgtagcctcagaagtccaagtaacaaagctaaaggtcactaaactcttgaaaggcaatgaatacatattccgtgtcatggctgtaaataaatatggagtgggagagccactggaatcagagcctgtgcttgcagtgaatccttatggaccccctgatccgcccaaaaaccctgaagtgacaactattactaaagattcgatggttgtctgctggggacatcctgattctgatggtggaagtgaaatcatcaattatattgtggaacggcgtgataaagctggccaacgctggattaaatgcaacaaaaaaactcttactgatttaagatataaagtgtctggactgacagaaggacatgaatatgagttcaggattatggctgaaaatgctgctggaattagtgcaccaagtcctaccagtccattttacaaggcttgtgacactgtgtttaaacctggaccaccaggtaacccacgtgttctggatacaagcagatcatccatttcaatcgcttggaataaacctatctatgatggtggttcagaaatcactgggtatatggttgagattgccctgccagaggaagatgaatggcagattgtcactccaccagcaggactcaaggcaacttcgtatactatcactggcctcacagagaatcaggaatataagatccgcatctatgccatgaattccgaaggacttggggaacctgcccttgttcctggaactccaaaggctgaagacagaatgctgcctccagaaattgaactggatgctgacctgcgcaaagttgttactataagggcctgctgcaccctgagactttttgttcccatcaaaggaaggcctgcacctgaggtgaagtgggcccgggaccatggagaatctttagataaagctagcatcgaatccacaagctcttacaccctgcttattgttggaaatgtaaacagatttgacagtggcaaatatatactaactgtagaaaatagttcaggcagcaagtctgcatttgtcaatgttagagttctcgatacaccaggccccccacaggatctgaaggtaaaagaggtcactaagacatctgtcacactcacatgggacccacctctccttgatggaggttcaaaaatcaagaactatattgttgaaaagcgggaatcaacaagaaaagcatattcaactgttgcaacaaactgccacaagacttcctggaaggtagaccagcttcaagaaggctgtagctactatttcagggttctcgcagaaaatgaatatggcattgggctgcctgctgaaaccgcagaatctgtgaaagcatcagaacgacctcttcctccaggaaaaataactttgatggatgtcacaagaaatagtgtgtcactctcttgggagaaaccagagcatgatggaggcagccgaattctaggctacattgtggagatgcagaccaaaggcagtgacaaatgggccacgtgtgccacagtcaaggtcactgaagccactatcactggattaattcagggtgaagaatactctttccgtgtttcagctcagaatgaaaagggcatcagtgatcctagacaactgagtgtgccagtgatcgccaaagatcttgtcattccaccagccttcaaactcctgttcaatactttcactgtactggcaggtgaagacctaaaagttgatgttccattcattggccgccctaccccagctgtaacctggcataaagataatgtaccactgaagcagacaactagagtaaatgcagagagcacagaaaataattcactactgacaataaaggacgcctgccgagaagatgttggccattatgtggttaaactgactaactcagctggtgaagctattgaaacccttaatgttatcgttcttgacaaaccagggcctccaactggaccagttaaaatggatgaagtgacagctgatagtattactctttcctggggcccacccaagtatgatggtggaagttctatcaataattacattgttgagaaacgggacacttccacaaccacctggcaaattgtatcagctacagttgcaaggacaacaataaaggcttgcagactgaagactggatgtgaatatcagtttagaattgcagctgaaaacagatatgggaagagtacctacctcaattcagagcctactgtagcccaatatccattcaaagttcctggtcctcctggcactccagttgtcacactgtcctccagggacagcatggaagtacaatggaatgagccaatcagtgatggaggaagtagagtcattggctatcatctagaacgcaaggaaagaaatagcatcctctgggttaagttgaataaaacacctattcctcaaaccaagtttaagacaactggccttgaagaaggtgttgaatatgaatttagagtctctgcagagaacatcgtgggcattggcaagccgagtaaagtatcagaatgttatgtggctcgtgacccatgtgatccaccaggacggccagaggcaatcattgtcacaaggaattctgtgactcttcagtggaagaaacccacctatgacggtggaagcaagatcactggttatattgttgagaagaaagaattacctgagggccgttggatgaaagccagttttacaaatattattgacactcattttgaagtaactggcctagttgaagatcacagatatgagttccgggttatagcccgaaatgccgcaggagtgtttagtgagccttcagaaagcacaggagcaataacagctagagatgaggtagatccaccacgaataagtatggatccaaaatacaaagacacaatcgtggttcatgctggtgaatcattcaaggttgatgcagatatttatggcaaaccaataccaaccattcagtggataaaaggtgatcaggagctttcaaacacagctcgattagaaataaagagcaccgactttgccaccagtctcagtgtaaaagatgcagtacgtgtcgacagtggaaattacatactgaaggccaaaaatgttgcaggagaaagatcagttactgtgaatgtcaaggttcttgacagaccagggccacctgaaggacctgttgttatctcaggagttacagcagaaaaatgcacactagcttggaaacccccacttcaggatggtgggagtgacatcataaattatattgtggaaaggagagaaaccagccgcttagtttggactgtggttgatgccaatgtgcagactctcagctgcaaggttactaagcttcttgaaggcaatgaatatactttccgtataatggcagtaaacaaatatggtgttggtgaacctcttgaatctgagccagtagttgccaagaatccatttgtagtaccagatgcaccaaaagctccagaagtcacaacagtgaccaaggactcaatgattgttgtatgggaaagaccagcatctgatggtggtagtgaaattcttggatatgttcttgagaaacgggataaagaaggcattagatggacaagatgccataagcgtctgattggagagttgcgcctgagagtaactggactcatagaaaatcacgattatgagttcagagtttctgctgagaatgctgctggacttagtgaaccaagccctccttctgcttaccaaaaggcttgtgatcctatttataaaccaggacccccaaacaaccccaaagtcatagacataaccagatcttcagtattcctttcttggagcaaaccaatatatgatggtggctgtgaaattcaaggatacattgttgaaaaatgtgatgtgagtgttggtgaatggacaatgtgcactccaccaacaggaattaataaaacaaacatagaagtagagaagctgttggaaaagcatgaatacaacttccgtatctgtgctattaataaagctggagttggagaacatgctgacgtccctggacctattatagttgaagaaaaattagaagcaccagacattgatcttgacctagaactaaggaaaatcataaatataagggcaggtggctccttaaggttatttgttcctataaaaggtcgtcctacaccagaagttaaatggggaaaggtggatggtgaaatccgagatgcagctataattgatgtcactagcagtttcacctctcttgttcttgacaatgtcaaccgatatgatagtggaaaatatacgcttacattagaaaacagcagtggaacaaagtctgcctttgttactgtgagagttctggacacgccaagtccacctgttaacctgaaagtcacagaaatcaccaaagactcagtatcaattacatgggaacctcctttgttggatgggggatccaaaataaaaaattacattgttgagaaacgtgaagccacaagaaaatcatatgctgctgttgtaactaactgccataagaattcttggaaaatcgatcagctccaagaaggttgcagttattactttagagtcacagctgagaatgagtatggtattggccttcctgcccagactgctgatccaattaaggttgcagaagtgccacaacctcctggaaaaataactgtggatgatgtcaccagaaacagtgtctctctgagttggacaaaacctgaacatgatggtggcagtaaaatcattcagtatattgtggaaatgcaagctaaacacagtgagaaatggtcagagtgtgctcgagtaaagtctcttcaggcagtaattaccaacctaactcaaggggaagaatatctttttagagttgttgctgtaaatgaaaaggggagaagtgatcctcggtcccttgcagttccaatagttgccaaagatctggtaattgagccagatgtaaaacctgcattcagtagttacagtgtacaggttggccaagatttgaaaatagaagtgccaatttctggacgtcctaagccaaccattacctggactaaagatggtctcccactgaagcagaccacaagaatcaatgttaccgattcactggatctcaccacactcagtattaaagaaactcataaggatgatggtggacaatatggaatcacagttgccaatgttgttggtcagaagacagcatccatcgaaattgtaactctagataaacctgatcctccaaaaggacctgttaaatttgatgacgtcagtgctgaaagtattacattatcttggaaccctccattatatacagggggctgccaaatcaccaactacattgttcagaaaagagatacaaccaccacagtatgggatgttgtttctgctactgttgctagaactacactcaaagtgaccaaactgaaaactggtacagaataccaatttagaatatttgccgaaaacagatatggacaaagctttgccttagagtctgatccaattgtagctcaatatccctacaaagaaccaggccctccaggtacaccatttgccacagccatttccaaagactccatggtcatacagtggcatgaaccagtcaacaatggtggaagccccgtcataggttaccacctggagagaaaagaaagaaacagtattttgtggacaaaggtcaacaaaactattattcatgacacccaattcaaagcacagaatcttgaagaaggcattgaatatgaattcagagtgtatgctgaaaatattgttggtgtaggcaaagcaagcaagaattctgaatgctatgtagccagagatccctgtgacccaccaggaaccccagaaccaataatggttaaaagaaatgaaatcactttacagtggaccaaacctgtgtatgatggtggaagtatgattacaggctacattgtagagaaacgtgatttgcctgatggtcgttggatgaaagctagctttacaaatgtcattgaaactcaatttactgtgtcaggtcttactgaagatcaaagatatgaattcagagtcattgcaaagaatgcagctggtgcaataagtaaaccctctgacagtactggaccaataactgccaaggatgaggttgaactcccaagaatttcaatggatccaaaattcagagacacaattgtggtaaatgctggagaaacattcagacttgaggctgatgtccatggaaagcccctacctaccattgagtggttaagaggagataaggaaattgaagaatctgctagatgtgaaataaagaacacagatttcaaggctttacttattgtaaaagatgcaattagaattgatggtgggcagtatattttaagagcttccaatgttgcaggttctaagtcattcccagtaaatgtaaaagtattagatagaccaggacctccagaagggccagtccaggttactggagtcacttctgaaaaatgctctttaacatggtctccaccacttcaagatggtggcagtgacatttctcactatgttgttgaaaagcgagaaaccagtcgacttgcctggactgttgttgcttcagaagttgtgaccaattctctgaaagttaccaaactcttagaaggtaatgaatatgttttccgtataatggctgtcaacaaatatggtgttggagagcctttggaatctgcaccagtactaatgaaaaatccatttgtgcttcctggaccaccaaaaagcttggaagtcacaaatattgccaaagactccatgaccgtctgttggaaccgtccagatagtgatggtggaagtgagattattggttacattgtagagaaaagagacagaagtggcattcgatggataaaatgtaataaacgccgcattacagatttgcgtctaagagtgacaggattaacagaagatcatgagtatgaattcagggtctctgcagaaaatgctgctggagttggggaaccaagtccagctacagtttattataaagcctgtgatcctgtgttcaaacctggcccacctaccaatgcacacattgtagacaccactaaaaattcaatcacacttgcctggggtaaacccatctatgatggcggcagtgagatcttgggatatgtagtagaaatctgtaaagcagatgaagaagaatggcaaatagttactccacagactggcctgagagtcactcgatttgaaatttcaaaactcactgaacaccaagagtataaaatacgagtctgtgccctcaacaaagttggtttaggtgaggctacatcagttcctggtactgtgaaaccagaagataaacttgaagcacctgaacttgaccttgactccgaattaagaaaaggaattgttgtaagagctggtggatctgccagaattcacattccattcaaaggtcgtccaacgcctgagatcacttggtctcgagaggaaggtgaattcacagataaggtccaaattgaaaagggagtaaactatacccaactatcaatagataactgtgatagaaatgatgctggaaaatacattcttaagttggaaaacagcagtggatcaaagtctgcttttgtaactgtgaaagttcttgacactccaggaccaccacagaatttggcagtcaaagaagtgagaaaagattctgccttcctggtatgggagccacccatcattgatggaggggcaaaggtcaagaactatgtgattgacaaacgtgagtcaaccagaaaagcgtatgctaatgtgagtagtaaatgcagcaaaacaagttttaaagtggaaaaccttacagaaggagccatttattacttcagagtcatggctgaaaatgaatttggagttggtgttccagtggaaactgttgatgccgtgaaagctgctgaacctccttccccaccaggaaaggttacactcactgatgtgtcccagaccagtgcatcacttatgtgggagaaacctgaacatgatggcggtagcagagtcctggggtacgttgttgaaatgcagcccaaaggaactgaaaaatggagcattgtggctgaatccaaagtctgtaatgcagttgttactggtttgagttctggacaagaatatcagttccgtgtcaaggcttataatgagaaaggaaaaagcgatccaagagtgttgggtgttcctgtcatagccaaggacttgactatacagcctagtttaaagttaccatttaacacatatagtatccaagctggagaagatcttaaaatagaaattccagttataggccgaccaagacctaacatttcttgggtcaaagatggtgagcctcttaaacagacaacaagagtaaacgttgaagaaacagctacctcaactgttttgcacattaaagaaggtaacaaagatgactttggaaaatacaccgtaacggcaacaaatagtgcaggcacagcaacagaaaatctcagtgttatcgttttagaaaagcctggacctccagttggcccagttcggtttgatgaagttagtgcagactttgtagtcatatcttgggaacctccagcctatactggtggctgccaaataagcaactacattgtagagaagcgagatacaaccaccaccacttggcacatggtatcagcaacagttgcaagaacaacaattaaaataaccaaactgaaaacaggcacggagtaccagtttagaatttttgctgaaaacaggtatggaaaaagtgccccactggattctaaggcagttattgtacaatatccatttaaagaacctggaccacctggaactccttttgtgacatcaatctcaaaagatcagatgcttgtgcaatggcatgagccagtgaatgatggaggcaccaaaattattggctaccatcttgaacagaaagaaaagaacagtattttatgggtcaagttaaataagacccccattcaggacaccaaattcaaaacaactgggcttgatgagggccttgagtatgagttcaaagtttctgctgaaaatattgttggcattggcaagcctagcaaagtgtcagaatgctttgttgctcgtgatccatgtgacccacctggtcgccctgaagccattgttattacaagaaacaatgtcacactgaaatggaagaaacctgcctatgatggtggtagcaaaataacaggttatattgtagaaaagaaagatctacctgatggccgctggatgaaagccagctttaccaacgtattagaaactgaatttacagtgagtggacttgtagaagaccaaagatatgaatttagagtaattgcaagaaatgcagctggaaactttagtgaaccatctgatagtagtggtgccattactgcaagagatgaaattgatgcaccaaatgcctctctggatccaaaatataaagatgtcatcgttgttcatgcaggagagacttttgttcttgaagccgacatccgtggcaaacctatacctgatgttgtttggtcaaaagatggaaaagaacttgaagaaacagctgctagaatggaaattaaatctactattcagaaaacaactcttgttgtcaaagactgtatacggactgatggaggacaatatattctgaaactcagcaatgttggtggtacaaagtctatacccatcactgtaaaggtacttgacaggccagggcctcctgaagggcctctgaaagttactggagttactgcggaaaaatgttacctggcatggaacccacctttgcaagatggtggtgctaatatttcacattacatcattgaaaagagggagacaagccgactctcttggacccaggtttcaactgaggtacaggcccttaactacaaagttactaaacttcttcctggtaatgagtacattttccgtgtcatggctgtgaataaatatggaattggagagcccttggaatctgggcctgttacggcctgtaatccttataagccaccaggtcctccctcaacacctgaagtctcagcaatcaccaaagattctatggtagtaacatgggcacgcccagtagacgacggaggtaccgaaattgagggctacattcttgaaaaacgagataaggaaggcgttagatggaccaagtgcaacaagaaaacattaacggatctgcggctcagggtaactggtcttaccgaaggccattcctatgaattcagagttgctgctgaaaatgcagctggtgtgggagaacctagtgagccatctgttttctaccgtgcgtgtgatgccttgtatccaccaggtcccccaagcaatccaaaagtgacggacacttccagatcttctgtctccctggcatggagtaagccaatttatgatggtggcgcacctgttaaaggctatgttgtagaggtcaaagaagctgctgcggatgaatggacaacctgcactccaccaacaggattacaaggaaagcagttcacagtgaccaagcttaaagaaaacactgaatataacttccgtatttgtgccatcaattctgaaggtgtaggtgaacctgcaactctacctggctcagtggttgctcaggagaggatagagccaccagaaatagaactcgatgctgatctcagaaaggtggtcgttctgcgtgcaagtgctactttacgcttatttgtcactatcaaaggtcgaccagaacccgaagttaaatgggaaaaggcagaaggcattctcactgacagggctcagatagaggtgaccagctcatttacaatgttggtgattgataatgttaccagatttgacagtggtcggtataatctgacattagaaaataatagtggctccaaaacagcttttgttaacgtcagagttcttgactcaccaagtgcccctgtgaatttgaccataagagaagtgaagaaagactcagtgacgttgtcctgggaaccaccacttattgatggtggagctaagattacaaactacattgtcgaaaaacgagaaactacaagaaaagcctatgctaccattacaaataattgcactaaaactactttcagaattgaaaatctacaagaaggatgttcttactacttccgagtcttggcttccaatgaatatgggattggtttgccagctgaaacaacagaacccgttaaagtgtctgaaccacccctcccacctggaagagtaactcttgttgatgtgacccgtaatacagctacaattaagtgggagaaaccagaaagtgatggtggcagcaaaattactggttatgtggttgaaatgcagactaaagggagtgaaaagtggagcacctgcacacaagttaagactctagaagcaactatatctggcttaactgcaggagaagagtatgtcttcagggtagctgcagttaacgaaaagggaagaagtgatccaagacaacttggagtgccagtaattgcaagggatattgaaataaagccttcagttgagcttcctttccatactttcaatgtaaaggctagagaacaacttaagattgatgtgccattcaaaggaagacctcaagctactgtgaactggagaaaagatggtcagactcttaaagagacaactagagtcaatgtttcttcttcaaagactgtaacatcactatctattaaggaagcttcaaaggaagatgttggaacttatgaattatgtgtttcaaacagtgctggatccataacagttcctattactataattgtccttgacagaccaggacctccaggtcctatacgtattgatgaggttagttgtgacagcataaccatttcttggaatcctccagaatatgatggtggctgccaaattagcaattacattgttgaaaagaaagaaaccacctctacaacatggcacatagtttcacaagcagttgcaagaacatccattaaaatagttcgcctgacaacaggaagtgagtatcagttccgtgtttgtgcagaaaaccgctatggaaagagctcctacagtgaatcttcagctgttgttgcagagtatccattcagtcccccaggtcctcctggtactcctaaagttgtgcatgccacaaaatctaccatgcttgtaacctggcaagtgccagttaatgatggaggaagtcgagtaattggctatcatcttgagtataaagaaagaagcagcattctttggtcaaaagcaaataaaatcctcattgctgatactcaaatgaaagtctccggccttgatgaaggactgatgtatgagtatcgtgtatatgctgaaaatattgctggaattggtaaatgcagtaaatcttgtgaaccagtccctgcaagagatccttgtgaccctcctggacaacctgaagtcacaaatatcacaagaaaatcagtgtcacttaaatggtctaaaccacattatgatggtggagctaagatcacaggatacattgttgaacgcagagaactaccagatggccggtggctgaagtgcaattatactaatatacaagaaacatactttgaagtaactgaacttactgaagatcagcgttatgaattccgggtttttgcaaggaatgctgctgactcagttagtgagccatctgaatccactgggcctattatagttaaagatgatgttgagcctccaagagttatgatggatgtcaagttccgagacgttattgttgtcaaagctggagaggtccttaagataaatgcagacattgcagggcgacctctgccagtaatttcctgggccaaggatggtatagaaattgaagaaagagcaagaacagaaatcatctcaacagacaatcatactttgttaacagttaaagactgtataagacgagacactgggcaatatgtactaacactgaagaatgttgccggcactcggtctgtggccgttaattgcaaagtacttgataagcctggtccaccagcaggaccacttgaaataaatggcctcactgctgagaaatgctctctttcctggggacgtccccaagaagatggtggtgcagatatcgactattacatcgtagaaaaacgtgaaacaagccaccttgcatggacaatatgtgaaggagagttacagatgacatcctgtaaagtaaccaagttactcaaaggcaatgaatatatatttagagtaactggtgttaataaatatggtgttggtgagcccctagagagtgtagctataaaggcactagatccatttacagttccaagtccacccacgtctttggaaattacttctgtgaccaaagaatctatgacactttgctggtcaagacccgagagtgatggaggtagtgaaatatctggatatataattgaaaggcgagagaaaaatagcctaagatgggtgcgtgtaaacaaaaaaccagtttatgatctaagagtgaaatcaacaggacttcgggaaggatgtgaatatgaatatcgtgtttatgcagaaaatgctgctggcctaagtcttccaagtgaaacctctcccttaattagggcagaagatccagtgttcctaccatctcctccatccaaacccaaaattgtggactcaggcaagacaactataactattgcctgggttaagccgctgtttgatggtggggccccgataactggatatactgtagaatacaaaaaatctgatgacactgactggaaaacttccattcagagcttacgagggacagaatatacaataagcggactaacaacaggagctgaatatgttttcagagtaaaatctgtcaataaggttggtgctagtgaccccagtgatagctctgaccctcagatagcaaaggaaagagaagaagaacctttatttgatattgacagtgaaatgaggaagaccttgattgtcaaggctggtgcctcatttaccatgactgtgcctttccgaggaagaccagtacccaatgtcttgtggagtaagccagacactgacctccgtactagagcttatgttgataccacagactctcgtacatcactgaccattgaaaatgccaacagaaatgactctggaaagtacacattaacaattcagaatgttttgagtgctgcttcactgaccttagttgtcaaagttttagataccccaggtcctccaaccaacattactgtgcaagatgtaaccaaagagtctgcagtgttatcctgggatgttcctgaaaacgatggtggagcaccagtgaagaattaccacatagaaaaacgtgaggccagcaagaaagcatgggtctctgtgaccaacaactgtaaccgcctctcctacaaagttaccaatttacaagaaggagctatctattacttcagagtctctggagaaaatgagtttggtgttggtataccagctgaaacaaaggaaggagtaaaaataacagaaaaaccaagcccacctgaaaaacttggagtaacaagtatatccaaagacagtgtttccctgacctggctgaagcctgaacatgatggcggaagcagaattgtacactatgtcgttgaagcactagaaaaaggacagaaaaactgggttaaatgtgcagtggcaaagtcaacccatcacgttgtttccggtctgagagagaattctgaatactttttccgagtgtttgctgaaaatcaagctggcctgagtgacccgagagagcttctgcttcctgttcttattaaggagcaactagaaccacctgaaattgatatgaagaatttcccaagtcacactgtatatgttagagctggttcaaaccttaaagttgacattccaatctctggaaaaccacttcccaaagtgaccttatcaagagatggtgtcccccttaaggcaaccatgagatttaataccgaaattactgctgagaacctgaccatcaatctcaaagaaagtgttacagctgacgctgggagatatgaaatcactgctgccaactccagtggtacaaccaaagctttcattaacattgttgtgctagacaggcctggtcctccaactggccctgttgttattagtgatataactgaagaaagtgtgactctcaaatgggagccacctaagtatgacggtggaagtcaagttaccaactacattctactcaaaagagaaacaagtactgcagtgtggactgaagtgtctgcaacagttgcaagaaccatgatgaaagtcatgaaactgaccacaggagaagaataccaattccgcatcaaggcagaaaaccgctttggcatcagtgatcatatagattcagcttgtgtgactgtcaaactaccatacacaacacctggaccaccatctacaccatgggtcactaatgttactcgagaaagcatcactgtgggctggcatgaaccagtgtcaaatggaggcagtgcagtcgtaggctatcacctggaaatgaaagacagaaacagtattttatggcaaaaagccaacaaactggtcatccgcacaactcacttcaaagtcacaacaatcagtgctggacttatttatgaattcagggtgtatgcagaaaatgctgctggagttggaaaacctagccatccttctgaaccagtcttggcaattgatgcttgtgaacccccaagaaatgttcgtatcactgatatttcaaagaactctgtcagcctttcatggcaacaaccagctttcgatggaggtagcaagattacaggctacattgttgagagacgtgaccttccagatggcagatggaccaaggccagcttcaccaatgttactgaaactcaattcatcatctctggcttgactcagaattcccagtatgaattccgtgtctttgctaggaatgctgttggttccattagcaatccatctgaggttgtagggcccattacttgcatcgattcttatggtggtcctgtaattgatttgcctctagaatatacagaagttgtcaaatacagagcaggtacatctgtgaagctcagagctggcatttctggcaaacctgcgcctactattgagtggtataaagatgataaagaattacaaaccaatgcactggtgtgtgttgaaaataccacggacctcgcatctatactcatcaaagatgccgatcgccttaatagtggatgctatgaattaaaactaaggaatgccatgggctcagcctcagccaccatcagagtacagatccttgacaaaccaggcccacctggtggaccaattgaatttaagactgtaactgctgagaagatcacccttctctggcggcctccagctgatgatggtggtgcaaaaatcactcactacattgtggaaaagcgtgagacaagccgcgttgtgtggtctatggtgtctgaacatttggaagagtgcatcattacaaccaccaaaattatcaaaggaaatgaatacatcttccgggtccgagccgtgaacaaatatggaattggcgagccactggaatctgattccgttgtagccaagaacgcatttgttacacctgggccaccaggcataccagaagtgacaaagattaccaagaattcgatgactgttgtatggagcaggccaattgcagatggcggtagtgatataagtggctatttccttgaaaaacgagacaagaagagcctaggatggtttaaagtactaaaagagactatccgtgacaccagacaaaaagtaacaggactcacagaaaacagtgactatcaatacagagtttgtgctgtaaacgctgctggacagggtccattttctgaaccatctgaattctacaaagctgctgatcctattgatcctccaggtccacctgctaagataagaatcgcagattcaaccaagtcatccatcacccttggctggagtaagcctgtctatgatgggggcagtgctgttactgggtatgttgtcgagataagacaaggagaggaagaggaatggactactgtctctaccaaaggagaggtcagaactacagaatatgtggtatccaacctgaaacctggagtcaattactacttccgggtatctgctgtaaactgtgctggacaaggagaacctatagaaatgaatgaacctgtacaagctaaagatatacttgaggcaccagagattgacctggatgtggctctcagaacttctgttattgccaaagctggtgaagatgtacaagtgttgattccctttaaaggcagacctccacctactgtcacatggagaaaagatgagaagaatcttggcagtgatgccagatacagcattgaaaacactgattcatcctcattactcaccattcctcaagttactcgcaatgatacaggaaaatatattctcacaatagaaaatggagttggtgaacctaagtcttcaactgtgagtgttaaagtgcttgacacaccagctgcctgccagaaactacaggttaaacatgtttctcgaggcacagtcactttgctctgggatcctcctctcattgatggaggatctccaataattaattatgtcattgaaaagagagatgccaccaagagaacatggtctgtcgtgtcacacaaatgttctagcacatccttcaagctaatagatttgtcggagaagactccattcttcttcagagttcttgcagaaaatgaaattggaattggggaaccctgtgaaactacagagccagtgaaggctgctgaagtaccagctcctatacgtgatctctcaatgaaagactcaacaaagacatctgtcatcctcagctggaccaaacctgactttgatggtggtagcgtcatcacagaatatgttgtagaaaggaaaggtaaaggtgaacagacgtggtcccacgctggcataagtaagacatgtgaaattgaggttagccaacttaaggagcagtcagtcctggagttcagagtgtttgccaaaaatgagaaaggactgagtgatcctgtcactattgggccaattacagtgaaagaacttattattacacctgaagttgacctgtcagatatccctggggcacaagtcactgtgagaattgggcacaatgtgcaccttgaattaccttataagggaaaacccaaaccatccatcagttggctgaaagatggcttgccactgaaagaaagtgaatttgttcgcttcagtaaaactgaaaacaaaattactttgagtattaagaatgccaagaaggagcatggaggaaaatacactgttattcttgataatgcagtgtgtagaattgcagtccccattacagtcatcacccttggcccaccatcaaagcccaaaggacccattcgatttgatgaaatcaaggctgatagtgtcatcctgtcatgggatgtacctgaagataatggaggaggagaaattacttgttacagcatcgagaagcgggaaacttcacaaactaactggaagatggtgtgttcaagtgttgccagaacgactttcaaagttcctaatctagtcaaagatgctgagtaccagtttagagtgagagcagaaaacagatacggagtcagccaaccacttgtctcaagcattattgtggcaaaacaccagttcaggattcctggtcccccaggaaagccagttatatacaatgtgacttctgatggcatgtcactaacttgggatgctccagtttatgatggtggttcagaagttactggattccatgttgaaaagaaagaaagaaatagcatcctctggcaaaaagttaatacatcaccaatctctggaagagaatatagagccactggactggtagaaggtctggattaccaattccgtgtatatgctgaaaattctgctggcctaagctcacctagtgacccaagcaaatttaccttagctgtttctccagtagacccacctggcactcctgactacattgatgtcacccgggaaaccatcacacttaaatggaacccaccattgcgtgatggaggcagtaagattgtgggctatagcattgagaaacggcaaggaaatgaacgctgggtgagatgcaactttactgacgtcagtgaatgtcagtacacagttacaggactcagtcctggggatcgctatgagttcagaataattgcaagaaatgctgttggaactataagcccgccctcacagtcttctggcattattatgacaagagatgaaaatgttccaccaatagtagagtttggccctgaatactttgatggtctcattattaagtccggagagagccttagaattaaagctttggtacaaggaagaccagtgcctcgagtaacttggttcaaagatggagtggaaatcgaaaagaggatgaatatggaaataaccgacgtacttggatccaccagcctatttgttagagatgctactcgggaccatcgtggtgtatacacagtggaagccaaaaatgcatctggttctgcaaaagcagaaattaaagtgaaagtacaagatacaccaggaaaagtagttgggccaataagattcaccaatattactggggagaagatgactctgtggtgggatgccccactcaatgacggttgtgctcccataacccactacatcattgaaaaacgggaaaccagcagacttgcctgggcactaattgaggataaatgtgaagcccaaagttacactgccattaaactaataaacggcaatgaataccaattccgtgtttctgcagttaacaagtttggtgttggcaggccacttgattctgatccagtggttgctcaaatacaatatactgttcctgatgcccctggcattccagaacctagcaacataacaggcaacagcattaccctgacatgggcaaggccagaatcagatggtggcagtgaaattcaacagtatatccttgaaagaagagaaaagaaaagcacaagatgggtaaaagtgatcagcaaacgaccaatctctgaaacaagattcaaagtcactggtctgacagaaggcaatgagtatgaattccatgtcatggctgaaaatgctgcaggagttggacctgcaagtggcatctcaagactcattaaatgtagagagcccgtcaacccaccaggtcctcccacagtggtcaaagtaacagacacatcaaagacaactgtgagcttagaatggtccaaaccagtgtttgatggtggcatggaaataattgggtatattattgaaatgtgtaaggccgacttaggagactggcacaaggtgaatgcagaggcatgtgtgaaaacaagatatacagtcactgatctacaagcaggtgaagaatacaaattccgagttagtgctatcaatggtgctggaaaaggcgacagctgtgaagtgactggcacaattaaagcagttgaccggttaacagctcctgagttagacatagatgcaaacttcaaacagactcatgttgttagagctggggccagtattcgcctcttcattgcctaccaaggtagacctactcctacagctgtgtggagcaaaccagactctaaccttagccttcgggctgatatccatacaacagattccttcagcaccctcactgtggaaaactgcaacagaaatgatgcagggaaatatacccttactgtggaaaacaacagtggtagtaagtcaatcacattcaccgtgaaagtgctagacactccaggcccacctggcccaattaccttcaaagatgtgacccggggatctgctacattgatgtgggatgcccctcttcttgacggtggtgcccgaatccatcattatgtggtagagaaacgagaggcaagtcgccgtagttggcaggttatcagtgaaaaatgcactcgtcagatcttcaaggtcaatgacctggccgaaggtgttccgtactatttccgtgtttctgcagtaaatgagtatggtgttggtgagccctatgaaatgccagaaccaattgtagccacagaacagcctgctccacctaggagacttgatgttgttgatactagcaaatcctccgcagtcttagcttggcttaaacctgaccacgatggaggcagccggatcactggctacctgcttgaaatgagacaaaagggatctgacttctgggttgaagctggtcacaccaaacagctaactttcacagtagagcgtcttgttgagaaaactgaatatgaattccgtgtgaaggccaagaatgatgctggctatagtgaacccagagaagccttctcttctgtcatcattaaggagcctcaaatcgagcccactgctgacctcactggaattaccaatcagcttataacttgcaaagcaggaagcccatttaccattgacgtaccaatcagtggtcgtcctgcccccaaagtaacatggaaactggaagaaatgagacttaaagagacagatcgagtgagcattacaacaacaaaagacagaaccacactgactgtaaaggacagcatgagaggtgactctggaagatacttcttgaccctggaaaatacagctggtgttaaaacatttagcgtcacagttgtggtcattggaaggccaggtccagtaaccggccccattgaggtctcatctgtctcagctgaatcgtgtgtcctgtcatggggagaacctaaagatggaggaggcactgaaattactaattacatagttgaaaaggtgaatcgggtacaacagcttggcagcttgtcaattccagtgtcaagcgcactcaaattaaagtcactcatctcacaaaatacatggaatattctttccgtgtcagttcagagaacagatttggtgtcagcaaacctctagaatcagcaccaataattgctgaacatccatttgtcccaccaagcgctcctaccagacctgaggtctaccatgtgtctgccaatgccatgtctattcgttgggaagaaccctaccacgatggtggcagtaaaatcattggctactgggttgagaagaaagaacgtaatacaattctttgggtgaaagaaaacaaagtgccatgcttagagtgcaactacaaagtaactggtttagtagaaggactggaatatcagttcagaacttatgcactcaatgctgcaggtgttagcaaggccagcgaagcttcaagacctataatggctcaaaatccagttgatgcaccaggcagaccagaggtgacagatgtcacaagatcaacagtatcactgatttggtctgccccagcgtatgatggaggcagcaaggttgtgggctacatcatagagcgtaagccagtcagtgaggtaggagatggtcgctggctgaagtgcaactacaccattgtatctgacaatttcttcaccgtgactgctctcagtgaaggagacacttatgagttccgtgtgttagccaagaatgcagcaggcgtaattagcaaagggtctgaatctacaggccctgtcacttgccgagatgaatacgctccacccaaagccgaactggatgcccgattacacggtgatctggttaccatcagagcaggttctgatcttgttctggatgctgcagttggtggcaaacctgaacccaaaattatctggaccaaaggagacaaggagctagatctctgtgaaaaagtctctttgcagtatactggcaaacgagcaactgctgtgatcaagttctgtgacagaagtgacagtggaaaatacactttaacagtgaaaaatgccagcgggaccaaggccgtgtctgtcatggtcaaagtgcttgattcccctggcccatgtggaaagctcaccgtcagcagagtaacacaggagaagtgcactttagcctggagccttccgcaggaagacggaggagcagaaatcactcactacatcgtggaaagacgcgagactagcaggctcaactgggtgattgttgaaggcgaatgcccaaccctatcctatgtcgttaccaggctcatcaagaacaatgagtacatattccgagtgagggcagtaaacaaatatggccctggtgtgcctgttgaatcagagccaattgtagccagaaactcattcactattccatcaccacccggcatacctgaagaagttgggactggcaaagagcatatcatcattcagtggacaaaacctgaatctgatggtggcaatgaaatcagcaactacctagtagacaaacgtgagaagaagagcctgcgctggacacgtgtcaacaaagactatgtggtgtatgataccaggctgaaggtgaccagcctgatggagggttgtgattaccagttccgggtgaccgcagtgaatgcagctggtaacagtgagcccagcgaagcttccaacttcatctcatgcagagaaccatcatatacccctggaccaccttctgctccaagagttgtggataccaccaaacacagcattagtttggcatggaccaaacccatgtacgatggtggtactgacattgtaggatatgttctggaaatgcaagagaaggacactgatcagtggtaccgagtgcataccaatgccacaataagaaatactgaattcactgtgccagaccttaaaatgggccagaaatattccttcagagttgctgccgtgaacgtgaagggtatgagcgaatacagcgaatcaattgctgaaattgagcccgtggaaagaatagaaataccagatcttgagcttgcagatgatctaaagaagactgtgaccatcagggctggggcctccttgcgcttgatggtgtctgtatctggaagaccacctcctgtcataacgtggagcaagcagggcattgaccttgcaagccgggcaattattgacaccactgagagctactcattgctaatagtggacaaagttaatcggtacgatgctggaaaatacacaattgaagctgaaaaccaatctggcaagaaatcagcaacagtccttgttaaagtctatgatactcctggtccctgtccttcagtgaaagttaaggaagtatcaagagattctgtgactataacttgggaaattcccacgattgatggtggagctccagtcaacaattacatcgttgagaagcgtgaagctgctatgagagcattcaaaacagtaactaccaaatgcagcaagacactttacagaatttctggacttgtagaaggaaccatgtactatttcagagtgctgccagaaaatatttatggcattggagaaccttgtgaaacatctgatgcagtactggtctcagaagtgcctttggtgcctgcaaagctagaagtggtcgatgtcaccaaatccactgttacccttgcctgggaaaaaccactctacgatggtggtagccgactcactggatatgttctcgaggcctgcaaagctggcacagagagatggatgaaggttgtcaccttaaaacccacagtcctagagcacactgttacttccttaaatgaaggtgaacaatacttatttagaataagggcacaaaatgagaaaggtgtgtcagaaccaagagagactgtcacagccgtgactgtacaagacctcagagtgttgccaacaatcgatctttctacaatgcctcagaagaccatccatgtcccagctggcagaccagtagagctggtgatacctattgctggccgtccacctcctgctgcttcctggttctttgctggttctaaactgagagaatcagagcgtgtcacagttgaaactcacactaaagtagctaaattaaccatccgtgaaaccactatcagagatactggagaatacacacttgaattgaagaatgttaccggaactacttcagaaaccattaaagttatcattcttgacaagcctggtccaccaacaggacctattaagattgatgaaattgatgctacatcaattaccatttcctgggaaccacctgaattggacggtggtgctccactgagtggttatgtggtagaacaacgtgacgctcatcgtccaggatggctgcccgtttctgaatcagtgactaggtccacgtttaagtttaccagactcaccgaaggaaatgagtatgtgttccgtgtggctgcaacaaaccgcttcgggattggctcttacttgcagtctgaggtcatagagtgtcgcagcagcatccgtattcctggacccccagaaacattacagatatttgatgtttcccgtgatggcatgacacttacttggtacccaccagaggatgacggtggctcccaagtgactggatatattgtggagcgcaaagaagtgagagcagatcgatgggtccgtgtaaataaagtacctgtgacaatgacacggtaccgctccactggccttactgaaggcttagaatatgaacaccgtgtcacagccattaatgcaagagggtctgggaaaccaagtcgtccttccaaacccatcgttgccatggatccaattgctcctccaggaaagccacaaaacccaagagttactgatacaacaaggacatcagtctccctggcctggagtgttccagaagatgaaggaggatctaaagtcacaggctacttgattgaaatgcaaaaagtagatcaacatgaatggaccaagtgtaacaccactccaaccaagattcgagagtatactctaacacacctacctcagggtgcagaatacaggttccgcgtcctagcttgtaatgctggtggacctggtgagcctgctgaggtaccaggaacagtcaaagtcactgaaatgcttgaatatcctgattatgaacttgatgaaagataccaagaaggtatctttgtaaggcaaggtggcgtcatcagacttaccataccaatcaaaggaaaaccattcccaatatgtaaatggaccaaggaaggccaggatattagtaagcgtgccatgattgcaacatctgaaacacacactgagcttgtgatcaaagaagcagacaggggtgattctggcacttatgacctggttctggaaaataaatgtggcaagaaggctgtctacatcaaggtcagggtgataggaagtcccaacagtccagaagggccactggaatatgatgacatccaagtccgctctgtgagggtcagctggagacctcctgctgatgatggtggtgctgacatcttaggctacatcctcgagagacgagaagtgcctaaagccgcctggtataccattgattccagagtccgaggtacatctctggtggtaaaaggcctcaaagagaatgtagaataccatttccgtgtttcagcagaaaaccagtttggcataagcaaacccttgaaatctgaggaaccagtcacaccaaaaacaccattgaatcctccagaacctccaagcaatcctccagaagtactcgatgtaaccaagagttctgttagcttgtcctggtcccggcccaaagatgatggtggttctagagtcacaggctactacatcgaacgcaaagagacatccactgacaagtgggtcagacacaacaagactcagatcaccaccacaatgtacactgtcacagggcttgttcccgatgctgagtatcagttccgcatcatcgcacagaatgatgttggcctgagtgagaccagccctgcttctgaaccagttgtttgcaaagatccatttgataaaccaagccaaccaggagaacttgagattctttcaatatccaaagatagtgtcactctacagtgggagaaacctgaatgtgatggtggtaaagaaattcttggatactgggttgaatatagacagtctggagacagtgcctggaagaagagcaataaggaacgtattaaggacaagcaattcacaataggaggtttgctggaagctactgagtatgaattcagggtttttgctgagaatgagactgggctgagcagacctcgcagaactgctatgtctataaagactaaactcacatctggagaggccccaggaatacgcaaagaaatgaaggatgttaccacaaaattgggtgaagctgctcaactctcatgccagattgttggaaggcctcttcctgacattaaatggtacagatttggtaaagagctcatacaaagccggaaatacaaaatgtcttcagatggacgcacacacactcttacagtaatgacagaggaacaggaagatgaaggtgtttatacctgcatagccaccaatgaggttggagaagtagaaaccagtagtaagcttctcctgcaagcaacaccgcagttccatcctggttacccactgaaagagaaatattatggagctgtgggttccacacttcggcttcatgttatgtacattggtcgtccagtacctgccatgacttggttccatggtcagaaacttttgcaaaactcagaaaacattactattgaaaacactgagcactatactcatcttgtcatgaagaatgtccaacgtaagactcatgctgggaaatacaaagtccagctcagcaatgtttttggaacagttgatgccatccttgatgtggaaatacaagataaaccagacaaacctacaggaccaattgtgatcgaagctctattgaagaactccgcagtgatcagctggaaaccacccgcagatgacggaggctcctggatcaccaactatgtggtggaaaaatgtgaggccaaggagggggctgaatggcaattggtgtcttcagccatctcagtgacaacctgtagaattgtgaacctcacagaaaatgctggctattacttccgggtttcagctcagaacactttcggcatcagtgaccctctagaagtgtcctcagttgtgatcattaagagtccatttgaaaagccaggtgctcctggcaaaccaactattactgctgtcacaaaagattcttgtgttgtggcctggaagccacctgccagtgatggaggtgcaaagattagaaattactaccttgagaagcgtgagaagaagcagaataaatggatttctgtgacaacagaagaaattcgagaaactgtcttttcagtgaaaaaccttattgaaggtcttgaatacgagtttcgtgtgaaatgtgaaaatctaggtggggaaagtgaatggagtgaaatatcagaacccatcactcccaaatctgatgtcccaattcaggcaccacactttaaagaggaactgagaaatctaaatgtcagatatcagagcaatgctaccttggtctgcaaagtgactggtcatccaaaacctatcgtcaaatggtacagacaaggcaaagaaatcattgcagatggattaaaatataggattcaagaatttaagggtggctaccaccagctcatcattgcaagtgtcacagatgatgatgccacagtttaccaagtcagagctaccaaccaagggggatctgtgtctggcactgcctccttggaagtggaagttccagctaagatacacttacctaaaactcttgaaggcatgggagcagttcatgctctccgaggtgaagtggtcagcatcaagattcctttcagtggcaaaccagatcctgtgatcacctggcagaaaggacaagatctcattgacaataatggccactaccaagttattgtcacaagatccttcacatcacttgttttccccaatggggtagagagaaaagatgctggtttctatgtggtctgtgctaaaaacagatttggaattgatcagaagacagttgaactggatgtggctgatgttcctgacccacccagaggagtcaaagttagtgatgtctcacgagattctgtcaacttaacatggactgagccagcctctgatggtggcagcaaaatcaccaactacattgttgaaaaatgtgcaactactgcagaaagatggctccgtgtaggacaggcccgagaaacacgttataccgtgatcaacttatttggaaaaacaagttaccagttccgggtaatagctgaaaataaatttggtctgagcaagccttcagagccttcagaaccaaccataaccaaagaagataagaccagagctatgaactatgatgaagaggtagatgaaaccagggaagtctccatgactaaagcatctcactcttcaaccaaggaactctatgagaaatatatgattgctgaagatcttgggcgtggtgagtttggaattgtccatcgttgtgttgaaacatcctcaaagaagacatacatggccaaatttgttaaagtcaaagggactgatcaggttttggtaaagaaggaaatttccattctgaatattgctaggcatagaaacatcttacacctccatgaatcatttgaaagcatggaagaattagttatgatctttgagtttatatcaggacttgacatatttgagcgcattaacacaagtgcttttgaacttaatgaaagagaaattgtaagttatgttcaccaggtctgtgaagcacttcagtttttacacagtcataatattggacactttgacattagaccagaaaatatcatttaccaaaccagaagaagctctaccattaaaatcatagaatttggtcaagcccgtcagctgaaaccaggggacaacttcaggcttctattcactgccccagaatactatgcacctgaagtccaccagcatgatgttgtcagcacagccacagacatgtggtcacttggaacactggtatatgtgctattgagtggtatcaacccattcctggctgaaactaaccaacagatcattgagaatatcatgaatgctgaatatactttcgatgaggaagcattcaaagagattagcattgaagccatggattttgttgaccggttgttagtgaaagagaggaaatctcgcatgacagcatcggaggctctccagcacccatggttgaagcagaagatagaaagagtcagtactaaagttatcagaacattaaaacaccggcgttattaccacaccctgatcaagaaagacctcaacatggttgtgtcagcagcccggatctcctgtggtggtgcaattcgatctcagaagggagtgagtgttgctaaagttaaagtggcatccattgaaattggcccagtttctgggcagataatgcatgcagttggtgaagaaggaggacatgtcaaatatgtatgcaaaattgaaaattatgatcagtctacccaagtgacttggtactttggcgtccgacagctggagaacagtgagaaatacgaaatcacctacgaagatggagtggccatcctctatgtcaaagacattaccaaattagatgatggtacctacagatgcaaagtagtcaatgactatggtgaagacagttcttatgcagagctatttgttaaaggtgtgagagaagtctatgactattactgccgtagaaccatgaagaaaattaagcgcagaacagacacaatgagactcctggaaaggccaccagaatttaccctgcctctctataataagacagcttatgtaggtgaaaatgtccggtttggagtaactataactgtccacccagagcctcatgtaacatggtataaatcaggtcagaaaatcaaaccaggtgacaatgacaagaagtacacatttgagtcagacaagggtctttaccaattaacaatcaacagtgtcactacagatgatgacgctgaatatactgttgtggcaaggaacaaatatggtgaagacagctgtaaagcaaagctgacagtaaccctacacccacctccaacagatagtaccttaagacccatgttcaaaaggttactggcaaatgcagaatgccaagaaggccaaagtgtctgctttgagatcagagtgtctggcatccccccaccaacattaaaatgggagaaagatggtcagccactgtccctcgggcctaacattgaaattatccatgaaggcttggattattatgctctgcacatcagggacactttgcctgaagacacgggttattatagagtcacagccactaacacagctgggtccaccagctgccaggctcacctacaagtggaacgcctgaggtacaagaaacaggaattcaagagtaaggaggagcatgagcgacacgtacaaaaacaaattgacaaaaccctcagaatggctgaaattctttctggaactgaaagtgtaccactgacacaggtagctaaagaggctctgagagaagctgctgtcctttataaaccggctgtaagcaccaagactgtaaaaggggaattcagacttgagatagaagaaaagaaggaggagagaaaactccggatgccttatgatgtaccagagccacgcaagtataagcagactaccatagaagaagaccaacgcatcaagcagttcgtgcccatgtctgacatgaagtggtataaaaagatacgtgatcagtatgaaatgcctgggaaacttgacagagttgtacagaaacgacccaagcgcatccgcctttcaagatgggaacagttctatgtgatgcctcttccacgcattacagatcaatacagacctaaatggcgtattcctaaactgtcccaagatgatcttgagatagtgagaccagcccgccggcgtacaccttctcctgattatgacttttactaccgacctagaagacgttctcttggggacatctctgatgaagaattactcctccccattgatgactacttagcaatgaaaagaacagaggaagagaggctgcgtcttgaagaagagcttgagttaggtttttcagcttcacccccaagtcgaagccctccacactttgagctttctagcctacgttactcttcaccacaagctcatgtcaaggtggaggaaacaagaaaagacttcaggtattcaacctatcacatcccaacgaaggctgaagctagtacaagttatgcagaactgagggaacggcatgcccaggctgcgtacagacagccaaagcaacggcaaagaatcatggctgagagggaggatgaagagttgcttcgcccagttacgaccacccagcatctctcagaatacaaaagcgaacttgacttcatgtcaaaggaggaaaagtctagaaagaaatcaaggcgacaaagagaagtgacagaaataacagaaattgaggaagaatacgaaatctcaaaacatgctcaaagagaatcatcctcatctgcgtctagactactgagacgacggcgctccctgtctccaacttatattgagttaatgaggccagtgtctgagctgatccggtcacgtccacaaccggctgaggaatacgaagatgacacagaaagaaggtcacctactccagagagaactcgcccacgatcccccagccctgtgtctagtgagagatcactctcgagatttgagaggtctgcaagatttgatatcttttccaggtatgagtccatgaaagctgctttaaaaactcagaagacatcagaaaggaagtatgaagttttgagtcagcagcctttcacactggaccatgcccctcgaatcacactgagaatgcgctcgcacagggtaccatgtggccaaaatacacgttttattttaaatgttcagtctaagccaactgccgaggttaaatggtaccacaatggtgtggaactccaagaaagcagtaagattcattacaccaacacgagtggagtcctcaccctggaaattctggactgtcatactgatgacagtggaacctaccgtgctgtgtgcaccaactacaagggcgaagcttctgactatgcaacgttggacgtgacaggaggggattataccacctatgcttcccaacgcagagatgaagaggtccccagatctgttttccctgagctgacaagaacagaggcgtatgctgtttcatcatttaagaaaacatctgagatggaagcttcgtcttctgtcagggaagtgaaatcacagatgacggagacaagggaaagtctctcctcatatgaacactctgcatctgcagaaatgaaaagtgctgcattagaagaaaagtcactggaagaaaaatccacaaccagaaagatcaagacgactttggcagcaagaattctaacaaagccacggtccatgaccgtctacgagggcgagtctgcaaggttttcttgtgacaccgatggtgagccggtaccaactgtgacctggctgcgtaaaggacaagtgctaagtacttctgcccgccaccaagtgaccaccacaaagtacaaatcaacctttgagatctcttcagtccaggcttccgatgagggcaattacagcgtggtggtagaaaacagtgaagggaaacaagaagcagagttcactctgactattcaaaaggccagggtaactgaaaaggctgtgacatcaccaccaagagtcaaatccccagagcctcgggtgaaatccccagaagcagttaagtctccaaaacgagtgaaatctccagaaccttctcacccgaaagccgtatcacccacagagacaaaaccaacaccaacagagaaagttcagcacctcccagtctctgccccaccaaagattactcagttcctgaaagcagaagcttctaaagagattgcaaaactgacctgtgtggttgaaagcagtgtattaagggcaaaagaggtcacctggtataaagatggcaagaaactgaaggaaaatgggcatttccagtttcattattcagcagatggtacctatgagctcaaaatcaataacctcactgaatctgatcaaggagaatatgtttgtgagatttctggtgaaggtggaacgtctaaaaccaacttacaatttatggggcaagcctttaagagtatccatgagaaggtatcaaaaatatcagaaactaagaaatcagatcagaaaaccactgagtcaacagtaaccagaaaaactgaaccaaaagctcctgaaccaatttcctcaaaaccagtaattgttactgggttgcaggatacaactgtttcttcagacagtgttgctaaatttgcagttaaggctactggagaaccccggccaactgccatctggacaaaagatggaaaggccattacacaaggaggtaaatataaactctctgaagacaagggagggttcttcttagaaattcataagactgatacttctgacagtggactttatacttgtacagtaaaaaattcagctggatctgtgtcctctagctgcaaattaacaataaaagctataaaagatactgaggcacagaaagtctctacacaaaagacttctgaaattacacctcagaagaaagctgttgtccaagaggaaatttcccaaaaagccctaaggtctgaagaaattaagatgtcagaggcaaaatctcaagaaaagttagccctcaaagaggaagcttcaaaggttctgatttctgaagaagtcaagaaatcagcagcaacctccctggaaaaatccattgtccatgaggaaatcactaaaacatcacaggcatcagaagaagtcagaactcatgctgagattaaagcattttctactcagatgagcataaacgaaggtcaaagactggttttaaaagccaacattgctggtgccactgatgtgaaatgggtactgaatggcgtagagcttaccaactctgaggagtaccgatatggtgtctcaggcagcgatcagaccctaaccatcaagcaagccagtcacagagatgaaggaatcctcacctgcataagcaaaaccaaggaaggaatcgtcaagtgtcagtatgatttgacactgagcaaagaactctcagatgctccagccttcatctcacagcctagatctcaaaatattaatgaaggacaaaatgttctctttacttgtgaaatcagtggcgagccatcccctgaaatcgaatggtttaaaaacaacctgccaatttctatttcttcaaatgtcagcataagccgctccagaaatgtatactcccttgaaatccgaaatgcatcagtcagcgacagtggaaagtacacaattaaggccaaaaatttccgtggccagtgttcagctacagcttccttaatggtccttcctctagttgaagaaccttccagagaggtagtattgagaacaagtggtgacacaagcttgcaaggaagcttctcgtctcagtcagtccaaatgtctgcctccaagcaggaggcctccttcagcagtttcagcagcagcagtgctagcagcatgactgagatgaaatttgcaagcatgtctgcccaaagcatgtcctccatgcaagagtcctttgtagaaatgagttccagcagctttatgggaatatctaatatgacacaactggaaagctcaactagtaaaatgcttaaagcaggcataagaggaattccgcctaaaattgaagctcttccatctgatatcagcattgatgaaggcaaagttctaacagtagcctgtgctttcacgggtgagcctaccccagaagtaacatggtcctgtggtggaagaaaaatccacagtcaagaacaggggaggttccacattgaaaacacagatgacctgacaaccctgatcatcatggacgtacagaaacaagatggtggactttataccctgagtttagggaatgaatttggatctgactctgccactgtgaatatacatattcgatccatttaagagggcctgtgcccttatactctacactcattcttaacttttcgcaaacgtttcacacggactaatctttctgaactgtaaatatttaaagaaaaaaaagtagttttgtatcaacctaaatgagtcaaagttcaaaaatattcatttcaatcttttcataattgttgacctaagaatataatacatttgctagtgacatgtacatactgtatatagccggattaacggttataaagttttgtaccatttattttatgacattttacaatgtaagttttgaaactaactgttggtaggagaaagtttcttatggaacgaataccctgctcaacatttaatcaatctttgtgcctcaacatactgttgatgtctaagtatgcctcagtgggttgagaaaatccccattgaagatgtcctgtccacctaaaagagaatgatgctgtgcatatcacttgatatgtgcaccaatacctactgaatcagaaatgtaaggcattggtgatgtttgcatttaccctcctgtaagcaacactttaacgtcttacattttctctgatgatgtcacacaaaattatcatgacaaatattaccagagcaaagtgtaacggccaacactttgttcgctcattttacgctgtctctgacataaggagtgcctgaatagcttggaaaagtaacatctcctggccatcccttcatttaaccaagctattcaagtattcctatgccagagcagtgccaactcttggaggtcccagagtgcagccaatgcctttgtgtggtagttctaaattttaattgcacctgaaaaacctgggcacctaagcaatgagccacagcaaaaagtaaagaacaacaacaaaataaagctgttgttaaattttaaacaatattactaattgcccaaaatgtcaatttgatgtagttcttttcatgcaagtataaattcaattgttagttataattgttggacctccttgagatagtaacaacaaaataaagcaagctatctgcacctcaaaa

SEQ ID NO: 296 - DNA, 5367 bp, Homo sapiens
actcgattgtaatttcatccccgggccggtcgagcctccctccctcccgcggccagcccttccctcccagtcggcctccttcgtcgcccccgcccccgcgaaaagccctgcagcttgcagccggcttcactcgcgcacgccgacctcccggctgcagtcctacctcttggaactacccgtgtttccgggcccagccctcgcagccccccacctcctcgccccggcccggggatccgttggggccgcgtcccccacgcgcccccggagacgccctttccgtgtgcgcccgggacttggtgaaactttgcaggcgccggctgcgaaatggatttaatccgaggcgtcttgctccggctcctgctcctggcttccagcctcggacccggcgcggtgtcgctccgagcggccatccgaaaaccaggcaaggtagggcctcctcttgacatcaagctgggcgcattgaactgtacggctttcagcatccagtggaaaatgccaaggcatcctggaagtcccatccttgggtacactgtcttttactctgaggttggcgcagataaatccctgcaggagcagttgcacagcgtgcctctcagccgggacatcccgaccacggaggaagtgattggagatttgaaaccaggcactgaatatcgtgtgagcatagcagcttacagccaggctggcaaagggcggctgagctctcctcggcatgtcaccactttgtcccaagattcctgcctgcctcctgcagctccccagcagccacatgtcattgtggtttcggattctgaggtggccctgtcttggaaacctggagcgagtgaaggaagcgcccctattcagtactattctgtggaattcatcaggccagatttcgacaagaagtggacctcaatccatgagcggatccagatggactccatggttatcaagggcctcgatccagataccaactaccagtttgccgtgagggcaatgaattcccatggccccagcccccgcagctggcccagtgacatcatccggaccctctgacaactgagacggctgcagaccatggggcagggagcatatggagcacggatatgccagacagagggatgattcatatcccaggcaggatggagcagggcagtgtgctatttcatcgtgctactcagaacttatgaattgtttatttctggaatttcccatttaatatttttggactgtggttgatcgagggtaaatgaaattgcagaaagcaaaaatacagataagggggactgcttgctgtacaaagatagagacaagaggaaggagctgtcctcaagggccttttgtgtgaagacatctggcacacagatacgctgcatgcaggtggcttgagagaacatgcatccaggccctgaggaggcgggaagtggccgctatggaccccgttatatcaccgacatgggagctggtgaggatgatgaaggatttgaagacgacttagatttggatatttcctttgaggaggttaaaccacttcctgctaccaaaggagggaataagaaatttttggtggaaagcaagaagatgtctatatctaacccaaagaccatttctaggctcatcccccctacctcagcatctctccctgtgaccacggtggctccccagcccattcccatacagagaaaggggaagaatggtgtggccataatgtcaaggctctttgacatgccttgtgatgaaactctctgctctgctgacagcttctgtgtcaatgactacacctgggggggctcgcgatgccagtgcaccctgggcaaaggtggtgagagctgctcagaagatattgttatccagtatcctcagttctttggccactcctatgtaacgtttgaacctctgaagaattcttatcaggcatttcaaattactcttgaatttagggcggaggcagaggatggcttactgctctactgtggggagaacgaacacgggaggggggatttcatgtccctggctatcatccgacgctccctgcagttcaggtttaattgtggaactggggttgccatcatcgtaagtgagaccaaaatcaaactagggggttggcacacggttatgctctacagagatgggctgaacgggctgctgcagctgaacaatggcaccccagtgacaggccagtctcagggccaatacagtaaaattactttccggacacctctctatcttggtggcgctcccagcgcttactggttggttagagcaacagggacaaaccgaggctttcaaggctgtgtgcagtcgctcgctgtgaatgggaggagaattgacatgaggccctggcccctgggaaaagcactcagtggggctgatgtgggggaatgcagcagtggaatctgtgatgaggcctcgtgcatccatggtggcacctgcacagcaatcaaagccgactcctacatttgcctctgtccccttgggtttaaaggtcgacactgtgaagatgctttcaccttgaccattcctcagttcagagagtctctgagatcttacgctgcaactccctggccactggagccccagcattacctttccttcatggaatttgagatcacatttcggccagactcaggagatggtgtcctcctgtacagctatgacacaggcagcaaagacttcctgtccatcaacttggcagggggccacgtggagttccgctttgactgtggctctgggaccggtgtcctcaggagtgaagatcccctcaccctgggcaactggcacgagcttcgtgtatctcgcacagcaaagaatggaatcttacaggtggataagcagaagatagtggagggaatggcagagggaggcttcacacagattaagtgcaacacagacattttcattggcggagtccccaattatgatgatgtgaagaagaactcgggtgtcctgaagcctttcagcgggagcatccagaagatcatcctgaatgaccgaaccatccatgtgaagcatgacttcacctccggagtgaatgtggagaatgcggcccacccctgtgtgagagccccttgtgcccatgggggcagctgccggcccaggaaggagggctatgactgtgactgccccttgggctttgaggggcttcactgccagaaagtaagaggacgttctggactctcgggcagagctttgtgagagaaacaaggctggcttcaagtgatctgcaaccagagtaattgggatttgacaaggactgtgaaaggctgactctccctgttctctttcatgctggcaccgggcagagtgtgggaactactgcctcaatacgatcatagaagccattgagatcccgcagtttatcggccgcagttacctgacgtatgacaacccagatatcttgaagagggtgtcaggatcaagatcaaatgtgttcatgaggtttaaaacaactgccaaggatggccttttgctgtggaggggagacagccccatgagacccaacagcgacttcatttccttgggccttcgggatggagccctcgtgttcagctataacctgggcagtggtgtggcatccatcatggtgaatggctccttcaacgatggtcggtggcaccgagttaaggccgttagggatggccagtcaggaaagataaccgtggatgactatggagccagaacaggcaaatccccaggcatgatgcggcagcttaacatcaatggagctctgtatgtgggtggaatgaaggaaattgctctgcacactaacaggcaatatatgagagggctcgtgggctgtatctctcacttcaccctgtccaccgattaccacatttccctcgtggaagatgccgtggatgggaaaaacatcaacacttgtggagccaagtaacaccagctggccttgtccaagggacagagccttctattctgagaatcccaggggccctcagaccctgcctgatgctatatgcagaggcccagggaccaggtgtgtttcctctcaccaagaagaaagtacacactgatgagaaactgagaaccaagacaggcatccctgggtggcctttcctgctgacactccacgagctgacccagcagaattctctgtgtaggaagcatcggactttgtccattgaatatgtagcggctgccagagatcacacatcaatgcaaattccagagcctgtctgctatagctcagtgactgtgttgtgattcatagtacattaaaaagagagagagagagaaagaatcccacagggcactattaaaatacttctctccttccctgactcatgacactcttcctgacagcagaatgactgtgtgaccttgaacttcacatttcccacattggcccttggattgttcggattaaccccttccactcctcactggctggttcactgtgttctgactagtccataaaaataaagatggaaggagatcaaacacagaatcataatcataatgcggcccccttccccagagcttacctcgaatgtgaaatccctacttcttataatgcagagttaaggagctgagcccccatgattttgtagctgtacttttgtatgtgtatatttttatagctgcagattgtccacacagtatacttttggaagtttgggtggatgactctgaattcttgcacacctttcctaaaaatttctcccaagagagacttgtttgggccttttgtggtgtcagtggaatggataggtaacttgggtgggcaacttggggagctgaccattctcttttggtaaatgttgacggctcaagaggatgaatatgaagctttccaagataagcagattaaaaggaacatgtgttaccgaggtaggtcactgtcatttttgttttaagagttggggggagtatctatagtaaacttgaataaaggggacaaagctagaacttattcattcattcattcacttatggagttgttactgattttgcggaggtcaggttcataccaatggacactaatacaatcagtgttcccaaggctgtgcaggggtggggggacatgctgtcaggatggtctgagcatctgggtgagaaccagagaaacaggacttcttccttctgtaccatgagctgtgtccctttactatgcaagcacatgaccccagagacagctggttcactggcagatccccatgatggacttactaagggaaaggtgagatgaacactgcccccaaggagggggtgaaatatgatctaacttatgcaagagcctataattagtcccagtctcgactctacatttgtttgtgcagcattcattcagcaaagacttttggggtttgtgcaaggcacagttttaagcacataatgtaattctaaaagatgaataaactagagaggttc

SEQ ID NO: 297 - DNA, 14829 bp, Homo sapiens
attcccaccgggacctgcggggctgagtgcccttctcggttgctgccgctgaggagcccgcccagccagccagggccgcgaggccgaggccaggccgcagcccaggagccgccccaccgcagctggcgatggacccgccgaggcccgcgctgctggcgctgctggcgctgcctgcgctgctgctgctgctgctggcgggcgccagggccgaagaggaaatgctggaaaatgtcagcctggtctgtccaaaagatgcgacccgattcaagcacctccggaagtacacatacaactatgaggctgagagttccagtggagtccctgggactgctgattcaagaagtgccaccaggatcaactgcaaggttgagctggaggttccccagctctgcagcttcatcctgaagaccagccagtgcaccctgaaagaggtgtatggcttcaaccctgagggcaaagccttgctgaagaaaaccaagaactctgaggagtttgctgcagccatgtccaggtatgagctcaagctggccattccagaagggaagcaggttttcctttacccggagaaagatgaacctacttacatcctgaacatcaagaggggcatcatttctgccctcctggttcccccagagacagaagaagccaagcaagtgttgtttctggataccgtgtatggaaactgctccactcactttaccgtcaagacgaggaagggcaatgtggcaacagaaatatccactgaaagagacctggggcagtgtgatcgcttcaagcccatccgcacaggcatcagcccacttgctctcatcaaaggcatgacccgccccttgtcaactctgatcagcagcagccagtcctgtcagtacacactggacgctaagaggaagcatgtggcagaagccatctgcaaggagcaacacctcttcctgcctttctcctacaagaataagtatgggatggtagcacaagtgacacagactttgaaacttgaagacacaccaaagatcaacagccgcttctttggtgaaggtactaagaagatgggcctcgcatttgagagcaccaaatccacatcacctccaaagcaggccgaagctgttttgaagactctccaggaactgaaaaaactaaccatctctgagcaaaatatccagagagctaatctcttcaataagctggttactgagctgagaggcctcagtgatgaagcagtcacatctctcttgccacagctgattgaggtgtccagccccatcactttacaagccttggttcagtgtggacagcctcagtgctccactcacatcctccagtggctgaaacgtgtgcatgccaacccccttctgatagatgtggtcacctacctggtggccctgatccccgagccctcagcacagcagctgcgagagatcttcaacatggcgagggatcagcgcagccgagccaccttgtatgcgctgagccacgcggtcaacaactatcataagacaaaccctacagggacccaggagctgctggacattgctaattacctgatggaacagattcaagatgactgcactggggatgaagattacacctatttgattctgcgggtcattggaaatatgggccaaaccatggagcagttaactccagaactcaagtcttcaatcctgaaatgtgtccaaagtacaaagccatcactgatgatccagaaagctgccatccaggctctgcggaaaatggagcctaaagacaaggaccaggaggttcttcttcagactttccttgatgatgcttctccgggagataagcgactggctgcctatcttatgttgatgaggagtccttcacaggcagatattaacaaaattgtccaaattctaccatgggaacagaatgagcaagtgaagaactttgtggcttcccatattgccaatatcttgaactcagaagaattggatatccaagatctgaaaaagttagtgaaagaagctctgaaagaatctcaacttccaactgtcatggacttcagaaaattctctcggaactatcaactctacaaatctgtttctcttccatcacttgacccagcctcagccaaaatagaagggaatcttatatttgatccaaataactaccttcctaaagaaagcatgctgaaaactaccctcactgcctttggatttgcttcagctgacctcatcgagattggcttggaaggaaaaggctttgagccaacattggaagctctttttgggaagcaaggatttttcccagacagtgtcaacaaagctttgtactgggttaatggtcaagttcctgatggtgtctctaaggtcttagtggaccactttggctataccaaagatgataaacatgagcaggatatggtaaatggaataatgctcagtgttgagaagctgattaaagatttgaaatccaaagaagtcccggaagccagagcctacctccgcatcttgggagaggagcttggttttgccagtctccatgacctccagctcctgggaaagctgcttctgatgggtgcccgcactctgcaggggatcccccagatgatcgcccagactcccttacgatcccagctgcacaagcccgaaaagatgcttgtactttcttcagagatggaggtttgccttgaatttcactgaagatgactcttggatcacatggaaatgttaacatttagaaattaagctattcataatgttagctgtatttttaagagcattaatttattcatctggaaaacaatgttcggtataccttcctctacctttgctgaaggtccttttatttttatttttatttttttaattttttgagatggagtcttgctcccaggctggagtgcagtgatacaatctcggctcactgcaactctgccttccgggttcaagcaattctcctgcctcagcctcccaagtagctgggactgtggacgtgcaccagcatgcccggctaatttgtgtatctttagtagagacaagcctgttgacaaccatgtcaggctggtttcgaactcctgacctcaagtgatcctccagcctgggcctcccacagtgctggaataacaggtgtgagccactgcacctgacctgaaggtccttttaagattgaaatgatacaatgattataaaagaaagtatttggcaaactataattcactatctaaatatgctataatttttattattaattcataaaaggaaatatataaatgtactcctatggcttgattaaaaaaatgttgactttaagaaaaattggagaggtcatcaggaagggctcaaagaatgacttttttcttcactacatcttcatggagaatgcctttgaactccccactggagctggattacagttgcaaatatcttcatctggagtcattgctcccggagccaaggctggagtaaaactggaagtagccaacatgcaggctgaactggtggcaaaaccctccgtgtctgtggagtttgtgacaaatatgggcatcatcattccggacttcgctaggagtggggtccagatgaacaccaacttcttccacgagtcgggtctggaggctcatgttgccctaaaagctgggaagctgaagtttatcattccttccccaaagagaccagtcaagctgctcagtggaggcaacacattacatttggtctctaccaccaaaacggaggtgatcccacctctcattgagaacaggcagtcctggtcagtttgcaagcaagtctttcctggcctgaattactgcacctcaggcgcttactccaacgccagctccacagactccgcctcctactatccgctgaccggggacaccagattagagctggaactgaggcctacaggagagattgagcagtattctgtcagcgcaacctatgagctccagagagaggacagagccttggtggataccctgaagtttgtaactcaagcagaagggtgcgaagcagactgaggctaccatgacattcaaatataatcggcagagtatgaccttgtccagtgaagtccaaattccggattttgatgttgacctcggaacaatcctcagagttaatgatgaatctactgagggcaaaacgtcttacagactcaccctggacattcagaacaagaaaattactgaggtcgccctcatgggccacctaagttgtgacacaaaggaagaaagaaaaatcaagggtgttatttccataccccgtttgcaagcagaagccagaagtgagatcctcgcccactggtcgcctgccaaactgcttctccaaatggactcatctgctacagcttatggctccacagtttccaagagggtggcatggcattatgatgaagagaagattgaatttgaatggaacacaggcaccaatgtagataccaaaaaaatgacttccaatttccctgtggatctctccgattatcctaagagcttgcatatgtatgctaatagactcctggatcacagagtccctcaaacagacatgactttccggcacgtgggttccaaattaatagttgcaatgagctcatggcttcagaaggcatctgggagtcttccttatacccagactttgcaagaccacctcaatagcctgaaggagttcaacctccagaacatgggattgccagacttccacatcccagaaaacctcttcttaaaaagcgatggccgggtcaaatataccttgaacaagaacagtttgaaaattgagattcctttgccttttggtggcaaatcctccagagatctaaagatgttagagactgttaggacaccagccctccacttcaagtctgtgggattccatctgccatctcgagagttccaagtccctacttttaccattcccaagttgtatcaactgcaagtgcctctcctgggtgttctagacctctccacgaatgtctacagcaacttgtacaactggtccgcctcctacagtggtggcaacaccagcacagaccatttcagccttcgggctcgttaccacatgaaggctgactctgtggttgacctgctttcctacaatgtgcaaggatctggagaaacaacatatgaccacaagaatacgttcacactatcatatgatgggtctctacgccacaaatttctagattcgaatatcaaattcagtcatgtagaaaaacttggaaacaacccagtctcaaaaggtttactaatattcgatgcatctagttcctggggaccacagatgtctgcttcagttcatttggactccaaaaagaaacagcatttgtttgtcaaagaagtcaagattgatgggcagttcagagtctcttcgttctatgctaaaggcacatatggcctgtcttgtcagagggatcctaacactggccggctcaatggagagtccaacctgaggtttaactcctcctacctccaaggcaccaaccagataacaggaagatatgaagatggaaccctctccctcacctccacctctgatctgcaaagtggcatcattaaaaatactgcttccctaaagtatgagaactacgagctgactttaaaatctgacaccaatgggaagtataagaactttgccacttctaacaagatggatatgaccttctctaagcaaaatgcactgctgcgttctgaatatcaggctgattacgagtcattgaggttcttcagcctgctttctggatcactaaattcccatggtcttgagttaaatgctgacatcttaggcactgacaaaattaatagtggtgctcacaaggcgacactaaggattggccaagatggaatatctaccagtgcaacgaccaacttgaagtgtagtctcctggtgctggagaatgagctgaatgcagagcttggcctctctggggcatctatgaaattaacaacaaatggccgcttcagggaacacaatgcaaaattcagtctggatgggaaagccgccctcacagagctatcactgggaagtgcttatcaggccatgattctgggtgtcgacagcaaaaacattttcaacttcaaggtcagtcaagaaggacttaagctctcaaatgacatgatgggctcatatgctgaaatgaaatttgaccacacaaacagtctgaacattgcaggcttatcactggacttctcttcaaaacttgacaacatttacagctctgacaagttttataagcaaactgttaatttacagctacagccctattctctggtaactactttaaacagtgacctgaaatacaatgctctggatctcaccaacaatgggaaactacggctagaacccctgaagctgcatgtggctggtaacctaaaaggagcctaccaaaataatgaaataaaacacatctatgccatctcttctgctgccttatcagcaagctataaagcagacactgttgctaaggttcagggtgtggagtttagccatcggctcaacacagacatcgctgggctggcttcagccattgacatgagcacaaactataattcagactcactgcatttcagcaatgtcttccgttctgtaatggccccgtttaccatgaccatcgatgcacatacaaatggcaatgggaaactcgctctctggggagaacatactgggcagctgtatagcaaattcctgttgaaagcagaacctctggcatttactttctctcatgattacaaaggctccacaagtcatcatctcgtgtctaggaaaagcatcagtgcagctcttgaacacaaagtcagtgccctgcttactccagctgagcagacaggcacctggaaactcaagacccaatttaacaacaatgaatacagccaggacttggatgcttacaacactaaagataaaattggcgtggagcttactggacgaactctggctgacctaactctactagactccccaattaaagtgccacttttactcagtgagcccatcaatatcattgatgctttagagatgagagatgccgttgagaagccccaagaatttacaattgttgcttttgtaaagtatgataaaaaccaagatgttcactccattaacctcccattttttgagaccttgcaagaatattttgagaggaatcgacaaaccattatagttgtactggaaaacgtacagagaaacctgaagcacatcaatattgatcaatttgtaagaaaatacagagcagccctgggaaaactcccacagcaagctaatgattatctgaattcattcaattgggagagacaagtttcacatgccaaggagaaactgactgctctcacaaaaaagtatagaattacagaaaatgatatacaaattgcattagatgatgccaaaatcaactttaatgaaaaactatctcaactgcagacatatatgatacaatttgatcagtatattaaagatagttatgatttacatgatttgaaaatagctattgctaatattattgatgaaatcattgaaaaattaaaaagtcttgatgagcactatcatatccgtgtaaatttagtaaaaacaatccatgatctacatttgtttattgaaaatattgattttaacaaaagtggaagtagtactgcatcctggattcaaaatgtggatactaagtaccaaatcagaatccagatacaagaaaaactgcagcagcttaagagacacatacagaatatagacatccagcacctagctggaaagttaaaacaacacattgaggctattgatgttagagtgcttttagatcaattgggaactacaatttcatttgaaagaataaatgacattcttgagcatgtcaaacactttgttataaatcttattggggattttgaagtagctgagaaaatcaatgccttcagagccaaagtccatgagttaatcgagaggtatgaagtagaccaacaaatccaggttttaatggataaattagtagagttggcccaccaatacaagttgaaggagactattcagaagctaagcaatgtcctacaacaagttaagataaaagattactttgagaaattggttggatttattgatgatgctgtcaagaagcttaatgaattatcttttaaaacattcattgaagatgttaacaaattccttgacatgttgataaagaaattaaagtcatttgattaccaccagtttgtagatgaaaccaatgacaaaatccgtgaggtgactcagagactcaatggtgaaattcaggctctggaactaccacaaaaagctgaagcattaaaactgtttttagaggaaaccaaggccacagttgcagtgtatctggaaagcctacaggacaccaaaataaccttaatcatcaattggttacaggaggctttaagttcagcatctttggctcacatgaaggccaaattccgagagaccctagaagatacacgagaccgaatgtatcaaatggacattcagcaggaacttcaacgatacctgtctctggtaggccaggtttatagcacacttgtcacctacatttctgattggtggactcttgctgctaagaaccttactgactttgcagagcaatattctatccaagattgggctaaacgtatgaaagcattggtagagcaagggttcactgttcctgaaatcaagaccatccttgggaccatgcctgcctttgaagtcagtcttcaggctcttcagaaagctaccttccagacacctgattttatagtccccctaacagatttgaggattccatcagttcagataaacttcaaagacttaaaaaatataaaaatcccatccaggttttccacaccagaatttaccatccttaacaccttccacattccttcctttacaattgactttgtagaaatgaaagtaaagatcatcagaaccattgaccagatgctgaacagtgagctgcagtggcccgttccagatatatatctcagggatctgaaggtggaggacattcctctagcgagaatcaccctgccagacttccgtttaccagaaatcgcaattccagaattcataatcccaactctcaaccttaatgattttcaagttcctgaccttcacataccagaattccagcttccccacatctcacacacaattgaagtacctacttttggcaagctatacagtattctgaaaatccaatctcctcttttcacattagatgcaaatgctgacatagggaatggaaccacctcagcaaacgaagcaggtatcgcagcttccatcactgccaaaggagagtccaaattagaagttctcaattttgattttcaagcaaatgcacaactctcaaaccctaagattaatccgctggctctgaaggagtcagtgaagttctccagcaagtacctgagaacggagcatgggagtgaaatgctgttttttggaaatgctattgagggaaaatcaaacacagtggcaagtttacacacagaaaaaaatacactggagcttagtaatggagtgattgtcaagataaacaatcagcttaccctggatagcaacactaaatacttccacaaattgaacatccccaaactggacttctctagtcaggctgacctgcgcaacgagatcaagacactgttgaaagctggccacatagcatggacttcttctggaaaagggtcatggaaatgggcctgccccagattctcagatgagggaacacatgaatcacaaattagtttcaccatagaaggacccctcacttcctttggactgtccaataagatcaatagcaaacacctaagagtaaaccaaaacttggtttatgaatctggctccctcaacttttctaaacttgaaattcaatcacaagtcgattcccagcatgtgggccacagtgttctaactgctaaaggcatggcactgtttggagaagggaaggcagagtttactgggaggcatgatgctcatttaaatggaaaggttattggaactttgaaaaattctcttttcttttcagcccagccatttgagatcacggcatccacaaacaatgaagggaatttgaaagttcgttttccattaaggttaacagggaagatagacttcctgaataactatgcactgtttctgagtcccagtgcccagcaagcaagttggcaagtaagtgctaggttcaatcagtataagtacaaccaaaatttctctgctggaaacaacgagaacattatggaggcccatgtaggaataaatggagaagcaaatctggatttcttaaacattcctttaacaattcctgaaatgcgtctaccttacacaataatcacaactcctccactgaaagatttctctctatgggaaaaaacaggcttgaaggaattcttgaaaacgacaaagcaatcatttgatttaagtgtaaaagctcagtataagaaaaacaaacacaggcattccatcacaaatcctttggctgtgctttgtgagtttatcagtcagagcatcaaatcctttgacaggcattttgaaaaaaacagaaacaatgcattagattttgtcaccaaatcctataatgaaacaaaaattaagtttgataagtacaaagctgaaaaatctcacgacgagctccccaggacctttcaaattcctggatacactgttccagttgtcaatgttgaagtgtctccattcaccatagagatgtcggcattcggctatgtgttcccaaaagcagtcagcatgcctagtttctccatcctaggttctgacgtccgtgtgccttcatacacattaatcctgccatcattagagctgccagtccttcatgtccctagaaatctcaagctttctcttccagatttcaaggaattgtgtaccataagccatatttttattcctgccatgggcaatattacctatgatttctcctttaaatcaagtgtcatcacactgaataccaatgctgaactttttaaccagtcagatattgttgctcatctcctttcttcatcttcatctgtcattgatgcactgcagtacaaattagagggcaccacaagattgacaagaaaaaggggattgaagttagccacagctctgtctctgagcaacaaatttgtggagggtagtcataacagtactgtgagcttaaccacgaaaaatatggaagtgtcagtggcaacaaccacaaaagcccaaattccaattttgagaatgaatttcaagcaagaacttaatggaaataccaagtcaaaacctactgtctcttcctccatggaatttaagtatgatttcaattcttcaatgctgtactctaccgctaaaggagcagttgaccacaagcttagcttggaaagcctcacctcttacttttccattgagtcatctaccaaaggagatgtcaagggttcggttctttctcgggaatattcaggaactattgctagtgaggccaacacttacttgaattccaagagcacacggtcttcagtgaagctgcagggcacttccaaaattgatgatatctggaaccttgaagtaaaagaaaattttgctggagaagccacactccaacgcatatattccctctgggagcacagtacgaaaaaccacttacagctagagggcctctttttcaccaacggagaacatacaagcaaagccaccctggaactctctccatggcaaatgtcagctcttgttcaggtccatgcaagtcagcccagttccttccatgatttccctgaccttggccaggaagtggccctgaatgctaacactaagaaccagaagatcagatggaaaaatgaagtccggattcattctgggtctttccagagccaggtcgagctttccaatgaccaagaaaaggcacaccttgacattgcaggatccttagaaggacacctaaggttcctcaaaaatatcatcctaccagtctatgacaagagcttatgggatttcctaaagctggatgtaaccaccagcattggtaggagacagcatcttcgtgtttcaactgcctttgtgtacaccaaaaaccccaatggctattcattctccatccctgtaaaagttttggctgataaattcattattcctgggctgaaactaaatgatctaaattcagttcttgtcatgcctacgttccatgtcccatttacagatcttcaggttccatcgtgcaaacttgacttcagagaaatacaaatctataagaagctgagaacttcatcatttgccctcaacctaccaacactccccgaggtaaaattccctgaagttgatgtgttaacaaaatattctcaaccagaagactccttgattcccttttttgagataaccgtgcctgaatctcagttaactgtgtcccagttcacgcttccaaaaagtgtttcagatggcattgctgctttggatctaaatgcagtagccaacaagatcgcagactttgagttgcccaccatcatcgtgcctgagcagaccattgagattccctccattaagttctctgtacctgctggaattgtcattccttcctttcaagcactgactgcacgctttgaggtagactctcccgtgtataatgccacttggagtgccagtttgaaaaacaaagcagattatgttgaaacagtcctggattccacatgcagctcaaccgtacagttcctagaatatgaactaaatgttttgggaacacacaaaatcgaagatggtacgttagcctctaagactaaaggaacatttgcacaccgtgacttcagtgcagaatatgaagaagatggcaaatatgaaggacttcaggaatgggaaggaaaagcgcacctcaatatcaaaagcccagcgttcaccgatctccatctgcgctaccagaaagacaagaaaggcatctccacctcagcagcctccccagccgtaggcaccgtgggcatggatatggatgaagatgacgacttttctaaatggaacttctactacagccctcagtcctctccagataaaaaactcaccatattcaaaactgagttgagggtccgggaatctgatgaggaaactcagatcaaagttaattgggaagaagaggcagcttctggcttgctaacctctctgaaagacaacgtgcccaaggccacaggggtcctttatgattatgtcaacaagtaccactgggaacacacagggctcaccctgagagaagtgtcttcaaagctgagaagaaatctgcagaacaatgctgagtgggtttatcaaggggccattaggcaaattgatgatatcgacgtgaggttccagaaagcagccagtggcaccactgggacctaccaagagtggaaggacaaggcccagaatctgtaccaggaactgttgactcaggaaggccaagccagtttccagggactcaaggataacgtgtttgatggcttggtacgagttactcaagaattccatatgaaagtcaagcatctgattgactcactcattgattttctgaacttccccagattccagtttccggggaaacctgggatatacactagggaggaactttgcactatgttcataagggaggtagggacggtactgtcccaggtatattcgaaagtccataatggttcagaaatactgttttcctatttccaagacctagtgattacacttcctttcgagttaaggaaacataaactaatagatgtaatctcgatgtatagggaactgttgaaagatttatcaaaagaagcccaagaggtatttaaagccattcagtctctcaagaccacagaggtgctacgtaatcttcaggaccttttacaattcattttccaactaatagaagataacattaaacagctgaaagagatgaaatttacttatcttattaattatatccaagatgagatcaacacaatcttcagtgattatatcccatatgtttttaaattgttgaaagaaaacctatgccttaatcttcataagttcaatgaatttattcaaaacgagcttcaggaagcttctcaagagttacagcagatccatcaatacattatggcccttcgtgaagaatattttgatccaagtatagttggctggacagtgaaatattatgaacttgaagaaaagatagtcagtctgatcaagaacctgttagttgctcttaaggacttccattctgaatatattgtcagtgcctctaactttacttcccaactctcaagtcaagttgagcaatttctgcacagaaatattcaggaatatcttagcatccttaccgatccagatggaaaagggaaagagaagattgcagagctttctgccactgctcaggaaataattaaaagccaggccattgcgacgaagaaaataatttctgattaccaccagcagtttagatataaactgcaagatttttcagaccaactctctgattactatgaaaaatttattgctgaatccaaaagattgattgacctgtccattcaaaactaccacacatttctgatatacatcacggagttactgaaaaagctgcaatcaaccacagtcatgaacccctacatgaagcttgctccaggagaacttactatcatcctctaattttttaaaagaaatcttcatttattcttcttttccaattgaactttcacatagcacagaaaaaattcaaactgcctatattgataaaaccatacagtgagccagccttgcagtaggcagtagactataagcagaagcacatatgaactggacctgcaccaaagctggcaccagggctcggaaggtctctgaactcagaaggatggcattttttgcaagttaaagaaaatcaggatctgagttattttgctaaacttgggggaggaggaacaaataaatggagtctttattgtgtatcata

SEQ ID NO: 298 - DNA, 2102 bp, Homo sapiens
agcccaagatttctagggcattggccgcgctgctgggtgatccctccgggctcaagttgcaagggggcgggccgggccggaggtggagtctcccgccaattgaagcctccgctataaattgaactccctgcactgctgaagcccagatgcctcgccaggccacgtcgcggttggtggtcggagagggcgaggggtcccagggggcttcggggcctgcagccaccatgctccgctccctgctgcttcactccttgaggctctgcgcccagaccgcctcgtgcctcgtgctcttcccgcgcttcctcggcacggccttcatgctctggcttctcgatttcttgtgtatccgcaagcatttcctgggccgccgccgccgggggcagcccgagcccgaagtggagctcaacagtgaaggcgaggaggtgcctcccgatgacccgcccatctgcgtgtccgacgacaaccgcctgtgcaccctggcgtcgctcaaggcggtgtggcatggccagaagttggatttcttcaagcaggcgcacgagggcggtccggcgcccaactccgaggtggttctgcccgacggcttccagagccagcacatcctcgactacgcgcaagggaaccgcccgctggttctcaatttcggcagctgcacctgaccaccgttcatggcgcgcatgagcgccttccagcgcctggtcactaagtaccagcgcgacgtcgacttcctcatcatctacatcgaggaagcgcacccctccgacggctgggtcaccacggactctccctacatcatcccacagcaccggagcctggaggaccgggtcagcgcagcgagggtactgcagcaaggtgcacccggctgcgctctggtcctcgacaccatggccaactccagcagctcggcctatggcgcctacttcgagcgtctctatgtcatccagagtggcactattatgtaccagggcggccgtggccccgacggctaccaggtctctgagctgcgcacttggttggaacgctatgatgagcaactgcacggcgctcggccccggagggtgtaaacatccaacggacaattgactgaacttggtgggctgggccttcgagccttcgaagcccacgtgcaagcgcctcaaaccaagtcacgcttggcgaggccccagtgacactgatgtgctgagccaccatttcagactgagtctgcaccctcagccacatgaacaatctcccctacctccctgggactctgcttctgtaactgtctcattcacacctgcctggctcactggaaatcctcttttgagcgcgggatatggcttgcccttgtccgtgtgcccccaggactttgcctctacagcattttcttacaccccctccccagcgtgccctcagccaagtgctttggcccggtgcttcccgcagctgcacagagaccttggccacgcccgcgcgccctgagcgcagctgggttccaggagactctcagctcagctgagctagttgcctggcacccacctgtcgcgcgcggagagggggttccctgttgcttttgtgtctgtttcctgtccctggtaggggaagtgatgtcgtggatggggaggggtgggcagggtagtttcccccgcttgttttgggtgcacaggagccccactgctgatgacgaactatctctaactggtcttgaccacgagctagttctgaattgcaggggcctcaaagcagcacctaaaccttgagggggagggtgctctgggtttccgtgaggtaaccaccttaaatgggagggaagttggggtgtctgctttgggaccagaggaagatagcttgagaggcattggcgaggttcgcagcgccccagggagagagaaaaagctgagactcctggggaatgacgttggggtgatggagtccggggaaagagaggtggggggagagcctgaggtccccaagtgaggggagtcctaggcagagctgctgattgtggggctgggaggtggagggcccctgattcgaaggccatttggtgagtgttttgctggaaatatttcctgtatataaacttctttcaatctacaataataaaggcttgaggtaaactgctt

SEQ ID NO: 299 - DNA, 1853 bp, Homo sapiens
gccctctcaagctgcttccagtgaatgctacacacctgcaccatggtttgtccgacatccttagccaagatcaggattggctatgttggtacttacatatcctcatgagaattgtggttctggtactagtttggtaaagaaattattaaacctagctgatgcttgaaggtagttggattaacagaagagaagacaaacttggagtatattctttagtacatttttccccaaagatgttgggttcagttgccacaacactgccattgtcatcttcaaattccagtggaatgcctcttggttactatctgtctagtcctcagattagtagagtaactatatcaacaactggacaattgacttctaaagctactgtaggtagctgttccagagtggaaaacagcttgggaaaacggaaacttggaaaacttacatcacgtggcttagtaaatggcagaactgaaatataattacaagtctgtctaaatgcaagacacgttgttctttccacttcatcacgacgcgtctttgtaatatgccagccccttctcagttccgaagaaacaggatgaatcacccatgattggggatggagaagattatttcctttctttgtttggtgattcaaagaaacttacagcacactcaaactacactcagaaaactttaaaatacttttctatgattcttgaagaagttggccaatttacctccagttctcttggagatgttgaaatagctgaagtgaatgtcaagggtttgttcgtgaagctcattaactcttcccttgacaaagaaatggcaattggagatcatattctccagcaaaatgtgaatggacaaaccatttctttgtaccgattccttccaaacatcgtaatgcaggcaaattccacagtaacagtgtgggcagcagcatctgaagcaaagcatcaacctccatcagattttctttggaaggaacaagacaagtttagagcaagtcctgattgtataacaatcctgtgcaaaccgaacggtcaagccattgcgtggtacacccctatccactggaagcaagcgtgggaaaaattagatgctgacgttgaatttaacagatgttcagtagtatctccaacattccgaaagcgtgtgtttcagtggacagcatctacagctacaataactaaagaaaaacaagatcaacctaagaaagatatctcaaattatcaggtggaacaagctcaagttcttcttaagagagagaaggaaatcccaccaaccgttttccctaatcgcagcccttggtgccagaatccctatgtctctgcacatccttactgtcctctgattgaaccacacaatacatccaccgctggaggcagattggatagacagcccaggactcggtcaaccagacctaatcgagcctcagggtctaagaaaaagaagacatctgagtcacaaaagcaataagcagtcaactcaacctttaaagtaatctagtccaccctcaaccagctactagaaaagcaaaagagaactcaaatccctgaggcctgctctgcaacctccctgctattccatgagagggtgaagacatcacatttctatatggaaaaaggatccaaaatttgtattgctgtagaattggtgaattatagatgcttgatgaaatcacaagtcctaccactcctgccttccaaatccctgcagaaaacaagcagatggttagtattattcaatggataaaattgctatttgccttagatttctctttttgtaaacaaagttattttgggtacagaactcacaaaagaagagcacgtgcaattgtttaaccattttacattgactgataaatctcttttttccat

SEQ ID NO: 300 - DNA, 6335 bp, Homo sapiens
ggacaggcgtggcggccggagccccagcatccctgcttgaggtccaggagcggagcccgcggccaccgccgcctgatcagcgcgaccccggcccgcgcccgccccgcccggcaagatgctgcccgtgtaccaggaggtgaagcccaacccgctgcaggacgcgaacctctgctcacgcgtgttcttctgatggagtctcgctgtgtcacccaggctggagtgcagtggcgcagtctcagctcactgcagcctccacctcctgtgttcaagcagtcctcctgcctcagccaccagactagcaggtctcccccgcctctttcttggaaggacacttgccattggatttaggacccacttggataatccaggatgatgtcttcactccaacatcctcagtttaattccatgtgcaaatacccttttcccaaataacattcaattctttaccaggaaaggtggctcaatcccttgtttaaaattggccataaacggagattagaggaagatgatatgtattcagtgctgccagaagaccgctcacagcaccttggagaggagttgcaagggttctgggataaagaagttttaagagctgagaatgacgcacagaagccttctttaacaagagcaatcataaagtgttactggaaatcttatttagttttgggaatttttacgttaattgaggaaagtgccaaagtaatccagcccatatttttgggaaaaattattaattattttgaaaattatgatcccatggattctgtggctttgaacacagcgtacgcctatgccacggtgctgactttttgcacgctcattttggctatactgcatcacttatatttttatcacgttcagtgtgctgggatgaggttacgagtagccatgtgccatatgatttatcggaaggcacttcgtcttagtaacatggccatggggaagacaaccacaggccagatagtcaatctgctgtccaatgatgtgaacaagtttgatcaggtgacagtgttcttacacttcctgtgggcaggaccactgcaggcgattgcagtgactgccctactctggatggagataggaatatcgtgccttgctgggatggcagttctaatcattctcctgcccttgcaaagctgttttgggaagttgttctcatcactgaggagtaaaactgcaactttcacggatgccaggatcaggaccatgaatgaagttataactggtataaggataataaaaatgtacgcctgggaaaagtcattttcaaatcttattaccaatttgagaaagaaggagatttccaagattctgagaagttcctgcctcagagggatgaatttggcttcatttttcagtgcaagcaaaatcatcgtgtttgtgaccttcaccacctacgtgctcctcggcagtgtgatcacagccagccgcgtgttcgtggcagtgacgctgtatggggctgtgcggctgacggttaccctcttcttcccctcagccattgagagggtgtcagaggcaatcgtcagcatccgaagaatccagacctttttgctacttgatgagatatcacagcgcaaccgtcagctgccgtcagatggtaaaaagatggtgcatgtgcaggattttactgctttttgggataaggcatcagagaccccaactctacaaggcctttcctttactgtcagacctggcgaattgttagctgtggtcggccccgtgggagcagggaagtcatcactgttaagtgccgtgctcggggaattggccccaagtcacgggctggtcagcgtgcatggaagaattgcctatgtgtctcagcagccctgggtgttctcgggaactctgaggagtaatattttatttgggaagaaatacgaaaaggaacgatatgaaaaagtcataaaggcttgtgctctgaaaaaggatttacagctgttggaggatggtgatctgactgtgataggagatcggggaaccacgctgagtggagggcagaaagcacgggtaaaccttgcaagagcagtgtatcaagatgctgacatctatctcctggacgatcctctcagtgcagtagatgcggaagttagcagacacttgttcgaactgtgtatttgtcaaattttgcatgagaagatcacaattttagtgactcatcagttgcagtacctcaaagctgcaagtcagattctgatattgaaagatggtaaaatggtgcagaaggggacttacactgagttcctaaaatctggtatagattttggctcccttttaaagaaggataatgaggaaagtgaacaacctccagttccaggaactcccacactaaggaatcgtaccttctcagagtcttcggtttggtctcaacaatcttctagaccctccttgaaagatggtgctctggagagccaagatacagagaatgtcccagttacactatcagaggagaaccgttctgaaggaaaagttggttttcaggcctataagaattacttcagagctggtgctcactggattgtcttcattttccttattctcctaaacactgcagctcaggttgcctatgtgcttcaagattggtggctttcatactgggcaaacaaacaaagtatgctaaatgtcactgtaaatggaggaggaaatgtaaccgagaagctagatcttaactggtacttaggaatttattcaggtttaactgtagctaccgttctttttggcatagcaagatctctattggtattctacgtccttgttaactcttcacaaactttgcacaacaaaatgtttgagtcaattctgaaagctccggtattattctttgatagaaatccaataggaagaattttaaatcgtttctccaaagacattggacacttggatgatttgctgccgctgacgtttttagatttcatccagagatgggatctcgctgtgttgtcctggctggtctcaaactcctaggctcaagcaatcctcctccctcctcaagcaaacctcagtgctgggattataggcatgagccactgtacctggctaaatgttgtttttttgatattcaatttttgtttatagaattttcatttgttttgctcttatacttttcatctttttatgtttattgaccaattaaatatcatttgggtaagcacctaacattgctacaagtggttggtgtggtctctgtggctgtggccgtgattccttggatcgcaatacccttggttccccttggaatcattttcatttttcttcggcgatattttttggaaacgtcaagagatgtgaagcgcctggaatctacaactcggagtccagtgttttcccacttatcatcttctctccaggggctctggaccatccgggcatacaaagcagaagagaggtgtcaggaactgtttgatgcacaccaggatttacattcagaggcttggttcttgtttttgacaacgtcccgctggtttgccgtccgtctggatgccatctgtgccatgtttgtcatcatcgttgcctttgggtccctgattctggcaaaaactctggatgccgggcaggttggtttggcactgtcctatgccctcacgctcatggggatgtttcagtggtgtgttcgacaaagtgctgaagttgagaatatgatgatctcagtagaaagggtcattgaatacacagaccttgaaaaagaagcaccttgggaatatcagaaacgcccaccaccagcctggccccatgaaggagtgataatctttgacaatgtgaacttcatgtacagtccaggtgggcctctggtactgaagcatctgacagcactcattaaatcacaagaaaaggttggcattgtgggaagaaccggagctggaaaaagttccctcatctcagccctttttagattgtcagaacccgaaggtaaaatttggattgataagatcttgacaactgaaattggacttcacgatttaaggaagaagatgtcaatcatacctcaggaacctgttttgttcactggaacaatgaggaaaaacctggatccctttaatgagcacacggatgaggaactgtggaatgccttacaagaggtacaacttaaagaaaccattgaagatcttcctggtaaaatggatactgaattagcagaatcaggatccaattttagtgttggacaaagacaactggtgtgccttgccagggcaattctcaggaaaaatcagatattgattattgatgaagcgacggcaaatgtggatccaagaactgatgagttaatacaaaaaaaaatccgggagaaatttgcccactgcaccgtgctaaccattgcacacagattgaacaccattattgacagcgacaagataatggttttagattcaggaagactgaaagaatatgatgagccgtatgttttgctgcaaaataaagagagcctattttacaagatggtgcaacaactgggcaaggcagaagccgctgccctcactgaaacagcaaaacaggtatacttcaaaagaaattatccacatattggtcacactgaccacatggttacaaacacttccaatggacagccctcgaccttaactattttcgagacagcactgtgaatccaaccaaaatgtcaagtccgttccgaaggcattttccactagtttttggactatgtaaaccacattgtacttttttttactttggcaacaaatatttatacatacaagatgctagttcatttgaatatttctcccaacttatccaaggatctccagctctaacaaaatggtttatttttatttaaatgtcaatagttgttttttaaaatccaaatcagaggtgcaggccaccagttaaatgccgtctatcaggttttgtgccttaagagactacagagtcaaagctcatttttaaaggagtaggacaaagttgtcacaggtttttgttgttgtttttattgcccccaaaattacatgttaatttccatttatatcagggattctatttacttgaagactgtgaagttgccattttgtctcattgttttctttgacataactaggatccattatttcccctgaaggcttcttgttagaaaatagtacagttacaaccaataggaacaacaaaaagaaaaagtttgtgacattgtagtagggagtgtgtaccccttactccccatcaaaaaaaaaaatggatacatggttaaaggatagaagggcaatattttatcatatgttctaaaagagaaggaagagaaaatactactttctcaaaatggaagcccttaaaggtgctttgatactgaaggacacaaatgtgaccgtccatcctcctttagagttgcatgacttggacacggtaactgttgcagttttagactcagcattgtgacacttcccaagaaggccaaacctctaaccgacattcctgaaatacgtggcattattcttttttggatttctcatttatggaaggctaaccctctgttgactgtaagccttttggtttgggctgtattgaaatcctttctaaattgcatgaataggctctgctaacgtgatgagacaaactgaaaattattgcaagcattgactataattatgcagtacgttctcaggatgcatccaggggttcattttcatgagcctgtccaggttagtttactcctgaccactaatagcattgtcatttgggctttctgttgaatgaatcaacaaaccacaatacttcctgggaccttttgtactttatttgaactatgagtctttaatttttcctgatgatggtggctgtaatatgttgagttcagtttactaaaggttttactattatggtttgaagtggagtctcatgacctctcagaataaggtgtcacctccctgaaattgcatatatgtatatagacatgcacacgtgtgcatttgtttgtatacatatatttgtccttcgtatagcaagttttttgctcatcagcagagagcaacagatgttttattgagtgaagccttaaaaagcacacaccacacacagctaactgccaaaatacattgaccgtagtagctgttcaactcctagtacttagaaatacacgtatggttaatgttcagtccaacaaaccacacacagtaaatgtttattaatagtcatggttcgtattttaggtgactgaaattgcatcagtgatcataatgaggtttgttaaaacgatagctatattcaaaatgtctatatgtttatttggacttttgaggttaaagacagtcatataaacgtcctgtttctgttttaatgttatcatagaattttttaatgaaactaaattcaattgaaataaatgatagttttcatctcca

SEQ ID NO: 301 - DNA, 5607 bp, Homo sapiens
agatcgcaagtcctgcaaacttacgtggcatttctgaagtcatcagaggaggtagagatgcagtttcagagcttaaaagaattttatgaaaccgaaatccctcagaaggagcaggatgatgctaaagccaagcattgttctgactcggctgagaagcagtggcagctatttttaaagaagagttttataacacaagatctagggcttgagttccttaatttaataaatatggcaaaagagaacgagatattagatgtgaaaaatgaagtgtacctcatgaagaacaccatggaaaaccagaaagcagaacgggaagaacttagcctccttcggctggcatggcagcttaaagccacggaaagcaagcctggaaaacagcagtgggcggcattcaaagagcaacttaaaaagacttctcacaacttaaaacttcttcaggaagcacttatgcctgtgtctgcacttgacctcggagggagcctccagttcattttagatctacgacaaaaatggaatgacatgaagcctcagttccagcaattgaatgatgaggttcagtacattatgaaagaatcagaggagttaactggcagaggagcccctgtaaaagaaaagtctcaacaactgaaggaccttattcacttccatcaaaaacagaaagagagaatccaggattacgaggatatcctgtacaaggtggtccagttccatcaagtcaaggaagagctgggacgtctcatcaaatcaagagagctggagtttgtagagcagccgaaggaactgggtgatgcccatgatgtgcagattcacctccggtgctctcaggaaaagcaagcccgtgtagaccatctccacagactggccctttccttaggagtcgacatcatctcatcagtgcagcggcctcactgctctaatgtttctgcaaagaacctacagcagcagctggagctccttgaggaggacagcatgaagtggcgtgccaaagctgaggagtatggacggaccctgtcccgtagtgtggagtactgcgccatgagagacgagataaatgagctcaaagactcattcaaagatatcaaaaagaaattcaataatttgaagtttaattacactaagaaaaatgaaaaatctcggaatctgaaggcgcttaaatatcaaattcagcaagttgatatgtatgctgaaaaaatgcaggctttgaaaaggaaaatggaaaaagttagtaataaaacctctgattctttcttaaattatccaagtgataaagttaatgtccttttggaagtcatgaaggatttgcaaaaacatgtggatgactttgacaaagttgtgacagattacaagaagaatttggacctgactgagcatttccaggaggtgatagaagagtgtcatttttggtacgaagatgcaagtgccacagttgtaagagttggaaaatattccacagagtgcaagacaaaggaagctgtgaaaattctccaccagcagtttaataagtttattgcaccctcagtgccgcagcaagaagaaaggattcaggaggccactgaccttgctcagcacttatatggtttggaagaaggacagaaatatattgagaaaatagtgacaaaacacaaagaggttcttgaatctgtgactgaattatgtgagtccctcacagagctcgaagaaaaactgaagcagggagatgttttaaagatgaatccgaatttggaagacttccattatgattacattgacttgctaaaggaaccagcaaaaaataagcagacaatattcaatgaagaaaggaataaggggcaggtgcaggtggcagatcttttgggcatcaatggaacaggggaagagcgactaccacaagacctgaaggtgtccactgacaaggagggtggcgtccaggacctgctcctgcctgaagacatgctctcaggggaagaatatgagtgtgtctcacctgatgacatctccttgcctcctctcccaggaagccctgagtcccctcttgcaccatctgacatggaggtggaagagcctgtcagctcctccctcagccttcacataagcagctatggggtgcaggctgggaccagcagcccaggggatgcccaggaatctgttcttccaccacctgttgcctttgcggatgcatgcaatgataagagagaaacattttcaagtcattttgagaggccttacctccagttcaaagctgagcccccactaacctccagaggattcgtggaaaagagtactgccttacacagaatcagtgctgaacatccagagagcatgatgagtgaagtgcatgagagagctttacagcagcaccctcaggctcagggtggtttgctagaaacacgggagaaaatgcatgctgataataacttcactaaaacccaagataggctgcatgcttcctctgatgcattctcgggcctcaggtttcaatcaggcaccagcaggggctatcagaggcaaatggttcctcgagaagagattaaaagcacatcagcaaagagcagcgtggtcagcctagctgaccaggcacctaatttctccaggctcctgtctaatgtaactgtcatggaaggttctccagtgactttggaagttgaagtaacaggatttccagagcctacactgacatggtgggtagcctataatgacaagccataaatggaaacaaattcaatcacagagaaaaatcattctgtgagcactaactgaaaggtttagggctagctgattaatattctatgacactgcaactctgcatgattcaatctcacatcagacccctctcattttagtagcagcatagttaatacctttaagaaaaataaaaggtaaccatataaagtactaataatttaacaaatttccaaagcactgtaggttggttgtgcttgttttcttctgtgtttaacattccacatttctaaagattgtgggttgaaattattttttattgtctatttccatataagcatggcatctgcttgctttaactacctttatgcaattgaaaatataagaatttgtttttatttccctttactctcatttacctctttcatctttttcctctttccaacagagtcacacgtgtcatctttgtaacattttgttttactaggatttctttttacaaattttttcaatgtgagaggtggaatataaatatttctgtcacagttcctccaggtgacaggcaataaactcatttttgaaaggtagtataataactgagctgtaaacaatatgatttcactctggagacatcattattttttagcctctttttttcagtaaaagcaaactgtagaatactggttttggatcacctactattggtaacaaaagcagttctttctcaatatgtgggttacttttaaacatttagaaaattctcatccttaagtaaatttatttcaggacaaagttacaaatctgcaaaagccagtttatacttataaactaagattaagtaaaatagcatttattgatcacaatgtttcagtagatattaaatgatcagtttcagttattgtgtgtgcccattgatggtacttgaaatatgaaccagttatctaaggaacttatgagaaaactttggtttctcaaattatttaaaaaactgcacttgtgctatattagtgcagtcacttttgctttttgttttattgtctttactgttgcatgttttttacaaatcaagagtgtcatatttatgaattttaaagatatttaattcattattaaatctcagttcactccgtacaagaagggccagaaattgtctgcagatgggcacttacaggttttacacaaggagacaaggcattcggtgttcattccaaaggtatgcaaggcagacgcaggcctctatgtggctcgggcccaaaactctagcggcgctctctcttccaatgtcatcctccacgtgacaggtaactgcaggctgccaatcacaagagtaaactggataaccctgtgtgtcgtctatgttagtgtgtccctaatgtactggctcctcacacaataactgtggtgttggcaccaatggacatcattctcatgtgcctaaagaaaagtgccgccgtttatcttcctgcacctcctgcaaagcatctcccaccaagtgtatctccagtctgatcaccatacttgtttggctaataccactgctaggtgaaataatcaaattttctggagcgtttaatatatttgagaagcttggtaaattatctgtagtggataagaacagatttttgtactctagaaacagatgttttcaacataatatgcagcaaaattattctatgcctattccctcctaatttaagggcgtgcagatgaaggctgacatcggcatagaaatgtgctaaatttcaaatatggttgttcaataatatatttttaattgtattttaaaacatccctttgtagggaatatcagtagaactattgaattgatgttgtatttttgcattagctgtcctttaattttgctttccatgtcttgatcttgttaccgaaatgcattctgtgtaatttcaacgtagactacgttcctgagtctgatgatgtcattgtaaataatcattcctcatgttgctctcacgggtttgacattggaggatagatgtgccatcaactttaaatagagtttccatcttttgtcagctctgcatgtcatacagcaagatggaacacaggttgcaagaaagaaccaacgttattcctgacattctattgatgtgttttgagcagcaatgtgtaaccaggtgtttctgcttctaatcttgattctgctgatgaccatttttatactttatggcaaagcctcattgcctcagtttcctgtctggaaaatgagttcatcatctacctcttgggcaattgagagttttcattttgtgtcttttaaacatctggaaaatggaaaacactgagggctaaggataatgatattgtttaatgtaatttgtcatcagaccggcctcctgctcactatttctttttttttagatgctgtttttttagaatattaaattaaaggagtgctgttaatatgtaatcttcaactagttccatggaggaaagtgatgttttatgaattagagcttaaattcctatctaatttctgaagactgcattcttttcaaagacttgaaattaaactcaggaggatacattttgtttgttctagggggaaacgtaatagaatggtatgagatgaattctatccttttacaataattattactataatattgaagtattctatgcctttctgaaacactttattcagaaaagatcattttttggcttccttttaaaaataagcttgaagtagggaagcatttgcttcttagattttaaatgtagtcttattatgctgaggaaaatctttagttgaaagaataattcattacagatttttgatgaagggaagaaattaattatgttgctggaagactgtctacaaataatcaaaatatttaaatgtaatgtattcaagttgttattaaaaagttactgaatgttatctgaagatgtgaaatgtgtagtcaagtaaaaagttggcgtatactt

SEQ ID NO: 302 - DNA, 5517 bp, Homo sapiens
agagtccagccgggggtgccgcacccactggggagtggggagggaggacacataggaaatgcctggggctggagtctctttggctctctgccagcaagaaacttaaacgtcctggcttgctcaacccgagtgtccctaaactgtccagacttttgcccgtccattgccactatctctccccactctgggtgtcctacccaaggcgctgtctatgcgtgcccagggcctgtcctgcggatacccagctcgccccttgcagccctttttagagcatctcgcgggctctggcatcaccaagcgcacagccccgggctgcgctcccctaaggtgggtccctcagatccggggctgtccattaaccaggctggcccaaagaggcgcagacactcgaacccgggaaaacttattttattctcggttcccggggttgcagctgccagcggctgagacagtgcgtccgctttgtctctctgcactccccgcagcccccctctcccgcttcctctcccgattaactcccccgacacgctcttctctagctcctctcctcctcccactccttctcctcctcttcctcctcctacaccacaggccgcgctaatgcgcttcctccctcccccggtgtcggtctctttgcatacgcgccccctcccctccccgccgcgccacttatagcggggcgcacggcggcggggcgcagactgctctggcagccggagaggaggcggtgcggcggtggcgctgcggagacccggtccagacgcctggcggccgccggcacacaaggcgctttctagctccctcccccgagcgcacagcccgcctccttccgcggcgcctgcagtggcaggcttgctctgccctaccgtgacgcgctccggagacgctctgcgggtcctggacaccgggtccgcggcgtggggacgacagacggaggcgaacgccatcggtagccggtccgcgagccatcgttcggggcgcagtcctctccccggctggccctcctttctccggggcattcgccaccgcttccctgggctgagacgaccggttcgtcgcctccttgcccgtgaccgtcgctagaactcagttgtgcgttgcggccagtcgccactgctgagtggaaacaaaatgtcagtcagtgtgcatgagaaccgcaagtccagggccagcagcggctccattaacatctatctgtttcacaagtcctcctacgctgacagcgtcctcactcacctgaatcttttacgccagcagcgtctcttcactgacgtccttctccatgccggaaataggaccttcccttgccaccgggcagtgctggctgcatgcagtcgctactttgaggccatgttcagtggtggcctgaaagagagccaggacagtgaggtcaactttgacaattccatccacccagaagtcttggagctgctgcttgactatgcgtactcctcccgggtcatcatcaatgaagaaaatgcagaatcgctcctggaagctggtgacatgctggagtttcaagacatccgggatgcatgtgcagagttcctggaaaagaacctgcatcccaccaactgcctgggcatgctgctgctgtctgatgcacaccagtgcaccaagctgtacgaactatcttggagaatgtgtctcagcaacttccaaaccatcaggaagaatgaagatttcctccagctgccccaggacatggtagtgcaactcttgtccagtgaagagctggagacagaggatgaaaggcttgtgtacgagtctgcaattaactggatcagctatgacctgaagaagcgctattgctacctcccagaactgttgcagacagtaaggctggcacttctgccagccatctatctcatggagaatgtggccatggaggaactcatcaccaagcagagaaagagtaaggaaattgtggaagaggccatcaggtgcaaactgaaaatcctgcagaatgacggtgtggtaaccagcctctgtgcccgacctcggaaaactggccatgccctcttccttctgggaggacagactttcatgtgtgacaagttgtatctggtagaccagaaggccaaagaaatcattcccaaggctgacattcccagcccaagaaaagagtttagtgcatgtgcgattggctgcaaagtgtacattactggggggcgggggtctgaaaatggggtctcaaaagatgtctgggtttatgataccctgcacgaggagtggtccaaggctgcccccatgctggtggccaggtttggccatggctctgctgaactgaagcactgcctgtatgtggttggggggcacacggccgcaactggctgcctcccggcctccccctcagtctctctaaagcaggtagaacattatgaccccacaatcaacaaatggaccatggtggccccactccgagaaggcgttagcaacgccgcagtagtgagtgccaaacttaagttatttgctttcggaggtaccagtgtcagtcatgacaagctccccaaagttcagtgttacgatcagtgtgaaaacaggtggactgtaccggccacctgtccccagccctggcgttacacagcagcagctgtgctggggaaccagatttttattatggggggtgatacagaattctctgcctgctctgcttataaattcaacagtgagacttaccagtggaccaaggtgggagatgtgacagcaaagcgcatgagctgccatgctgtggcctctggaaacaaactctacgtggttggaggatactttggcattcagcgatgcaagactttggactgctacgatccaacattagacgtgtggaacagcatcaccactgtcccgtactcgctgattcctactgcatttgtcagcacctggaaacatctgccttcttaaatgcagtacattctaaagagagtgagcatgagctcactccatcactcgatgagataatatgagatttctacttcggagaggccaagtctaatgaagagaaaaaaaggaaaagaagttgcaagactcgaataaaatctgctgcaccttgtaaatgctctaactggacatgaaggaaaggggcgagggaggggggtgggatttttggtgcaagtagcacatggtttaaatatgaatgaacaaacctgtgatctagtccttgtcttgtaattgtggattaatgtcaatgttaatcagcccctcaaagggagagaaaagctggaccttttcccttgctgtaccatattcagcatttgatttccatgggccccaccatttatgtgtagaatttgaaatggttgtcacctctctctgaggacagagcttgaagcctccacaccagctgctgctggagattcaaagcccaactgtgggtccgagagggaagctggctgggctggctgaagaatgaagaccactggactctccgttaatctctaaggggtctgctccccaggaacgtttctgaacaatggggactttgttggtagccatttggtagatgttcttttctatttataagtgactttaaactttcccttggctgttaagaagtttgttatagatttagctatttattgttcgatgcctgcatgctgaaacaatgcctacagctgtcttcacatgtatggacgtgtgtgaatggttgtacgttttgcacattttgtggctgttgagatgtgctttgctgcacaaacatgaaaatttttgagttacaatttggagcataactggagggtgggttggggaggggtggatttttaaaatgtcaagacagggaaggatgacaaaatggaaatttaaatgacatcctagaggtagagaaaccgtggagatcgcttttctcagactcaccaacttttaatgggatttcatggggtttggttgtgctgatagggtaaggggaggctgctttctgcccttctccccactcccatctgatttacttaattcagtctcagctgctgaaatttggaaaggaccaaattgctttacagtttttttctttgtgtagtatcttgaaatcctggaaaattctatggaatagttctgtatatagggcacaagtaaaggcattgtccaaagtttatttatttatttattaccctaagaatgctttgccataaccacatttaatgggaaaaacggcagtatcacagatgtaaattaactcaccagatttactgggcctgaactcattctcttcttgctatatgatttagcaagttctagaaggtctccaagacaataattacattggcacaatgtatacttcagtgctcacccgtaggcaaatctctttttaaaaaactctttggtgcacaagtaacacatttggccacaaaacaccaaagaattgtaggcagtggcccctattgagaagttttccggtagagttggaaatcagttgtgaatacattctttgctagttggagtgcttgtttactaagcatgtgccgtcgtaggtattagtgctagtctcagataggtgcttcccctgaggtgcaggggaagaccaaagtttgcaactcgaactgctttcgtccatgtttctcacattgctgtattttagaaaataggggttaagactgataacaaccttttacattgtgactgtgtttgcattgtctaatgacagataaatccttaacatttctctccaccttagtactttagactaattgtgtttgtccgtccatgccatgaatgagtgggctgtagttgggcctaaataaatgagctgttggaagaaaagaatcacagtactttccagcagtcagtccctggttcctagatgtgttctaagcaatgcaaatgtctaattgtcccccagtgggcatagtcagtgtcgtttatattgtagcagttacagctctgtagtttatgatgcaaatctgccaagagagatgtatgtgtcactgcatggcttctgaaagcaggatgaattttctgcagctgtttcaaagttggggtctgttcttgaatcctctattaattactgtgtgtgagccagagggagctgtggtaagggttgggcccccagcctgtagggaactttctggactcccactctttgaatcgatataggcatttggtctcactacttgaccattctcaccctgtgaaacgtcccacactttgaagcaaatacaattcacagcacagtacacacaaaaaccttggcataagacagagaaggttcttcttattttgtgggctggttgctgtagaaacacataacaaagggcagccctccacttctggtataattgtgtagccccttttctttgggcttgacacctgtcttgaataagagtgattagagctgcataatgtccctctcttggctattgaccatgtggttcacgtacaaaactctgtataagttgaaggaaaatgttcatgttcatatgtacttgtttgctatgactacattttgaggttttgtaaaactgttatttttttttttttcacaatgtgaaactgaaggtcaataaattattagagattttctcttca

SEQ ID NO: 303 - DNA, 2814 bp, Homo sapiens
ggttaaacggggcccaaggcaggggtggcgggtcagtgctgctcgggggcttctccatccaggtccctggagttcctggtccctggagctccgcacttggcggcgcaacctgcgtgaggcagcgcgactctggcgactggccggccatgccttcccgggctgaggactatgaagtgttgtacaccattggcacaggctcctacggccgctgccagaagatccggaggaagagtgatggcaagatattagtttggaaagaacttgactatggctccatgacagaagctgagaaacagatgcttgtttctgaagtgaatttgcttcgtgaactgaaacatccaaacatcgttcgttactatgatcggattattgaccggaccaatacaacactgtacattgtaatggaatattgtgaaggaggggatctggctagtgtaattacaaagggaaccaaggaaaggcaatacttagatgaagagtttgttcttcgagtgatgactcagttgactctggccctgaaggaatgccacagacgaagtgatggtggtcataccgtattgcatcgggatctgaaaccagccaatgttttcctggatggcaagcaaaacgtcaagcttggagactttgggctagctagaatattaaaccatgacacgagttttgcaaaaacatttgttggcacaccttattacatgtctcctgaacaaatgaatcgcatgtcctacaatgagaaatcagatatctggtcattgggctgcttgctgtatgagttatgtgcattaatgcctccatttacagcttttagccagaaagaactcgctgggaaaatcagagaaggcaaattcaggcgaattccataccgttactctgatgaattgaatgaaattattacgaggatgttaaacttaaaggattaccatcgaccttctgttgaagaaattcttgagaaccctttaatagcagatttggttgcagacgagcaaagaagaaatcttgagagaagagggcgacaattaggagagccagaaaaatcgcaggattccagccctgtattgagtgagctgaaactgaaggaaattcagttacaggagcgagagcgagctctcaaagcaagagaagaaagattggagcagaaagaacaggagctttgtgttcgtgagagactagcagaggacaaactggctagagcagaaaatctgttgaagaactacagcttgctaaaggaacggaagttcctgtctctggcaagtaatccaggtatgagaatcaacttggtcaacagaagctggtgctacaaatgaagaaatgtgcaccagtgttgctcccaaagtggcttaggtagcccttttcatttacaaatctcaaattttaagatggatttcattgaatatatgcatttcaatggaaacaaaattctgttatagcaatgatttatttcctgggttcatagacctgaggcaatgagtcatagaatttcatgtttgattttctttaccttatcaaactacatgtttagtaattgatacttatttttattatcattatttatttttttattttttttgagatggagtctcactctgtagcccaggctggagtgcagtggcacaatctcggctcactgcaagctctgcctcccgggttcacgccattcttctgcctcagcctcccaagtagctgggactacagacacccgccaccaagcccggctaatttttgtatttttagtagagacggggtttcaccgtgttagccaggatggtctcgatttcctgacctcgtgatccgcctgcctcggcctcccaatgtgctgggattacaggcatgagacaccgtgcccagccgatacttatttttaaaaattagggcatttacaaaactattgtatgtttcagatttcagagagataaactgcatttcaagtaaaaataaaaacttcttaatcttccatcctcagtaattaagaagaaagttcatttcagtggggaaagtaaagagaacatcatgaggagtgagaattctgagagtcagctcacatctaagtccaagtgcaaggacctgaagaaaaggcttcacgctgcccagctgcgggctcaagccctgtcagatattgagaaaaattaccaactgaaaagcagacagatcctgggcatgcgctagccaggtagagagacacagagctgtgtacaggatgtaatattaccaacctttaaagactgatattcaaatgctgtagtgttgaatacttggttccatgagccatgcctttctgtatagtacacatgatatttcggaattggttttactgttcttcagcaactattgtacaaaatgttcacatttaatttttctttcttcttttaagaacatattataaaaagaatactttcttggttgggcttttaatcctgtgtgtgattactagtaggaacatgagatgtgacattctaaatcttgggagaaaaaataatgttaggaaaaaaatatttatgcaggaagagtagcactcactgaatagttttaaatgactgagtggtatgcttacaattgtcatgtctagatttaaattttaagtctgagattttaaatgtttttgagcttagaaaacccagttagatgcaatttggtcattaataccatgacatcttgcttataaatattccattgctctgtagttcaaatctgttagctttgtgaaaattcatcactgtgatgtttgtattctttttttttttctgtttaacagaatatgagctgtctgtcatttacctacttctttcccactaaataaaagaattcttcagtttccctgta

SEQ ID NO: 304 - DNA, 4221 bp, Homo sapiens
aagtgagagcagcggcagccggcggtgcagcagccggccgacccagagtgtaagtgcgtgtgctggggcgagcgggagcgggcgaggatgggcacaggatagaggcagagccacccacgccgccgcggccccacgctgggcgacagagcctccagttccccttcaatggtggcgggtcgccggagctctgatcgccgggaacccttgccgctgctgtcctgcgaccccaagcagaggtatagacacgtgtggccgtttacgctgtaggatcctcattcccactggctttgaacattttggggacttacaatgccgccacccgcggacatcgtcaaggtggccatagaatggccgggcgcctaccccaaactcatggaaattgatcagaaaaaaccactgtctgcaataataaaggaagtctgtgatgggtggtctcttgccaaccatgaatattttgcactccagcatgccgatagttcaaacttctatatcacagaaaagaaccgcaatgagataaaaaatggcactatccttcgattaaccacatctccagctcagaacgcccagcagctccatgaacgaatccagtcctcgagtatggatgccaagctggaagccctgaaggacttggccagcctctcccgggatgtcacgtttgcccaggagtttataaacctggacggtatctctctcctcacgcagatggtggagagcggcactgagcgataccagaaattgcagaagatcatgaagccttgctttggagacatgctgtccttcaccctgacggccttcgttgagctgatggaccatggcatagtgtcctgggatacattttcggtggcgttcattaagaagatagcaagttttgtgaacaagtcagccatagacatctcgatcctgcagcggtccttggccattttggagtcgatggtgctcaatagccatgacctctaccagaaagtggcgcaggagatcaccatcggccagctcattccacacctgcaagggtcagatcaagaaatccaaacctatactattgcagtgattaatgcgcttttcctgaaggctcctgatgagaggaggcaggagatggcgaatattttggctcagaagcaactgcgttccatcattttaacacatgtcatccgagcccagcgggccatcaacaatgagatggcgcaccagctgtatgttctacaagtgctcacctttaacctcctggaagacaggatgatgaccaaaatggacccccaggaccaggctcagagggacatcatatttgaacttcgaagaattgcttttgatgctgagtctgaacctaacaacagcagtggcagcatggagaaacgcaagtccatgtacacgcgagattataagaagcttgggttcattatgtccgaacatcagaaggaacaaactctggacacaccatctttaagaactgtaacactcactgtgagggtccatggcttcattcttgaagtcagcaagaccaagaacccaccaattccagacacattttggccacccagatgggaccatcgcccatcgccaggcggtgagactaatgcctattgccaaatgaatcatgtcaaccctgccatggacttcacgcagactccacctgggatgttggctctggacaacatgctgtactttgccaagcaccaccaagatgcctacatccggattgtgcttgagaacagtagtcgagaagacaagcatgaatgtccctttggccgcagtagtatagagctgaccaagatgctatgtgagatcttgaaagtgggcgagttgcctagtgagacctgcaacgacttccacccgatgttcttcacccacgacagatcctttgaggagtttttctgcatctgtatccagctcctgaacaagacatggaaggaaatgagggcaacttctgaagacttcaacaagccatttaaaggtgtgcggcgggtctctgttcacatggctcaactggaaacctgtttcatgaacaagcttactcaggaaccatctggtggtattccagcacattgttcttcagggggacgactctaagtcgctttgtggtggcagcagcttagaatcagtatttgtggttgggaaagatggacttacgggagcttgtggaggggcagcgtggggaacgagaaactctttgcctgtagggacccttctagctgcaaacttaaaaatgtatgtggcaagatgcaacccaagcaccgagcaggattccagacgagttataatcattctgaacggggagaggaaaggtaatgcaggtggtgaaggagcaggttatgagagcacttacaaccaagcctagctccctggaccagttcaagagcaaactgcagaacctgagctacactgagatcctgaaaatccgccagtccgagaggatgaaccaggaagatttccagtcccgcccgattttggaactaaaggagaagattcagccagaaatcttagagctgatcaaacagcaacgcctgaaccgccttgtggaagggacctgctttaggaaactcaatgcccggcggaggcaagacaagttttggtattgtcggctttcgccaaatcacaaagtcctgcattacggagacttagaagagagtcctcagggagaagtgccccacgattccttgcaggacaaactgccggtggcagatatcaaagccgtggtgacgggaaaggactgccctcatatgaaagagaaaggtgcccttaaacaaaacaaggaggtgcttgaactcgctttctccatcttgtatgactcaaactgccaactgaacttcatcgctcctgacaagcatgagtactgtatctggacggatggactgaatgcgctactcgggaaggacatgatgagcgacctgacgcggaatgacctggacaccctgctcagcatggaaatcaagctccgcctcctggacctggaaaacatccagatccctgacgcacctccgccgattcccaaggagcccagcaactatgacttcgtctatgactgtaactgaagtggccgggcccagacatgccccttccaaaactggaacacctagctaacaggagagaggaatgaaaacacacccacgccttggaaccgtcctttggtaaagggaagctgtgggtccacattcccttcagcatcacctctagccctggcaactttcagcccctagctggcatcttgctcaccgccctgattctgttcctcggctccactgcttcaggtcacttcccatggctgcagtccactggtgggacaagagcaaagcccactgccagtaagaaggccaaagggcccttccatcctagccctctgcaggcatgcccttccttcccttgggcaggaaagccagcagccccagactgcccaaaaacttgcccaccagaccaagggcagtgccccaaggcccctgtctggaggaaatggcctagctatttgatgagaagaccaaaccccacatcctcctttcccctctctctagaatcatctcgcaccaccagttacacttgaattaagatctgcgctcaaatctcctcccacctctctccctgcttttgccttgctctgttcctctttggtcccaagagcagcagccgcagcctcctcgtgatcctccctagcataaatttcccaaacagtccacaggtcccatgcccactttgcgtctgcactgtgatcgtgacaaatcttccctcctcaccagctagtctggggtttcctctccctgccccaggccagaactgccttcttcatttccacccacgctcccagcctcttagctgaaagcacaaatggtgaaatcagtagtctcgctccatctctaatagactaaacctaaatgcctctaggacggactgttgctatccaagcgtttggtgttaccttctcctgggaggtcctgctgcaactcaagttccacaggatggtcaagctgtcagacatccaagtttacatcattgtaattattactggtatttacaatttgcaagagttttgggttagtttttttttttttttttgctttgtttttgtacaaaagagtctaacattttttgccaaacagatatatatttaatgaaaagaagagatacataaatgtgtgaatttccagtttttttttaattattttaatcccaaacatcttcctgaaaataacattcccttaaacatgctgtggaataaaatggattgtgatgatttgg

SEQ ID NO: 305 - DNA, 3419 bp, Homo sapiens
ggggggagcgcgccgggcgcagggagctgagtggacggctcgagacggcggcgcgtgcagcagctccagaaagcagcgagttggcagagcagggctgcatttccagcaggagctgcgagcacagtgctggctcacaacaagatgctcaaggtgtcagccgtactgtgtgtgtgtgcagccgcttggtgcagtcagtctctcgcagctgccgcggcggtggctgcagccggggggcggtcggacggcggtaattttctggatgataaacaatggctcaccacaatctctcagtatgacaaggaagtcggacagtggaacaaattccgagacgtaagtgaagtagagaggatgattatttccgcacttggagtccaggaaaacccttcgatcaggctttagatccagctaaggatccatgcttaaagatgaaatgtagtcgccataaagtatgcattgctcaagattctcagactgcagtctgcattagtcaccggaggcttacacacaggatgaaagaagcaggagtagaccataggcagtggaggggtcccatattatccacctgcaagcagtgcccagtggtctatcccagccctgtttgtggttcagatggtcatacctactcttttcagtgcaaactagaatatcaggcatgtgtcttaggaaaacagatctcagtcaaatgtgaaggacattgcccatgtccttcagataagcccaccagtacaagcagaaatgttaagagagcatgcagtgacctggagttcagggaagtggcaaacagattgcgggactggttcaaggcccttcatgaaagtggaagtcaaaacaagaagacaaaaacattgctgaggcctgagagaagcagattcgataccagcatcttgccaatttgcaaggactcacttggctggatgtttaacagacttgatacaaactatgacctgctattggaccagtcagagctcagaagcatttaccttgataagaatgaacagtgtaccaaggcattcttcaattcttgtgacacatacaaggacagtttaatatctaataatgagtggtgctactgcttccagagacagcaaggtaaaagatgagacccttacagacgcaaatagttgacctgcatgtcaaattttacttattttttaagaaaataaaacagtacactatgctcattcattttgtgtatgtttttgtaattcaagtgttgaataaaagagcaaataagaagcatgttgaacaaataactctgccagagatacaacacatgctaaataagatgaaaaatagtaattaatattttgtattaatgccactacattatagtttccattatgagccaccaagaagcacacagaaatattaagaacttagatactgaaagtaatcattaaaattaatttgctatctgctttgcccacaatgtaaaataaatggattttttatcactatacggtggagttttaatgttctattttgtgatcttattaaatgagttgaatgaaacccaccttgccagactgagctcagcaatattcagaagcggcaaggggtaaagaagctcctaggacagtatatccccctgtgtgatgaagatggttactacaagccaacacaatgtcatggcagtgttggacagtgctggtgtgttgacagatatggaaatgaagtcatgggatccagaataaatggtgttgcagattgtgctatagattttgagatctccggagattttgctagtggcgattttcatgaatggactgatgatgaggatgatgaagacgatattatgaatgatgaagatgaaattgaagatgatgatgaagatgaaggggatgatgatgatggtggtgatgaccatgatgtatacatttgattgatgacagttgaaatcaataaattctacatttctaatatttacaaaaatgatagcctatttaaaattatcttcttccccaataacaaaatgattctaaacctcacatatattttgtataattatttgaaaaattgcagctaaagttatagaactttatgtttaaataagaatcatttgctttgagtttttatattccttacacaaaaagaaaatacatatgcagtctagtcagacaaaataaagttttgaagtgctactataataagtttttcacgagaacaaactttgtaaatcttccataagcaaaatgacagctagtgcttgggatcgtacatgttaattttctgaaagataattctaagtgaaatttaaaataaataaatttttaatgacctgggtcttaaggatttaggaaaaatatgcatgctttaattgcatttccaaagtagcatcttgctagacctagttgagtcaggataacagagagataccacatggcaagaaaaacaaagtgacaattgtagagtcctcaattgtgtttacattaatagtggtgtttttacctatgaaattattctggatctaataggacattttacaaaatggcaagtatggaaaaccatggattctgaaagttaaaaatttagttgttctccccaatgtgtattttaatttggatggcagtctcatgcagattttttaaaagattctttaataacatgatttgtttgcctttctagatttctttatctttctgaccagcaacttagggagcagaatttaaattaggaagacaaagggaaagattcatttaaaccatatttttacaaagtttgtcatttgccccaaggtcaaattttaaattcttaattttcattttatttcccattttaggtaaaagtttgcatttaatcttagaattatgttatttttgttagtagtgtggaaacttagagaacttattgtatggtgccttgcaaaaatagagatagaaagattttagcatgcataccaatatagtatattacgcaatatataagcacacctaattaacagattaatatcagtaaaggtattgctgctggaatgaagaaaatgggatacgtttgtttctttttttctattgttacataattgccatgtggacttgtttatgattattgtgtagagtagcatttaagatttaactgtagcaaaaattactttaaccgctgtatttaagttagcatgttaattaattgtgtagacattttggcacaccatcacttttaactatatcataccaatggttttgtgcccataataaaaatggaaaaacctgttgaatgttacgtattggtatctttaatttcaacagtgggtaaactggtttcccagtatacaattcattgaaagcaaaattgattaattatttccatttaatttatacacactcaatacaaaatttaatgttgactttacgtaataaagtataatgcattttcttttttactgtttatgtatagtttacaaaataaagaatcttgtaaccaaa

SEQ ID NO: 306 - DNA, 1908 bp, Homo sapiens
agtttcccgggagagacgaaagcaggaacgagagcggagcggagcacagtccgccgagcacaagctccagcatcccgtcaggggttgcaggtgtgtgggaggtaagcgtgggtccttcttcggggcgtctgcactgccctggagaaaacgtcttccaataggaattacatcaagacacagctaaaagagtccgcgttgggttaggaaaccggtgcaaaacctctcgggtgaaagatttacatttttcgactttaagggcaaaaaagcaaaaggaagcttgactctgggtataaagggcgtggttagtgtttttggtttgagttgcaccagtaaaactgttctgggagatctgaagattgagaaaaatcctgctaattgaggacgaggtggatgttatctggtggatgttataggcttgaaactgttacaatatggctttccttggactcttctctttgctggttctgcaaagtatggctacaggggccactttccctgaggaagccattgctgacttgtcagtgaatatgtataatcgtcttagagccactggtgaagatgaaaatattctcttctctccattgagtattgctcttgcaatgggaatgatggaacttggggcccaaggatctacccagaaagaaatccgccactcaatgggatatgacagcctaaaaaatggtgaagaattttctttcttgaaggagttttcaaacatggtaactgctaaagagagccaatatgtgatgaaaattgccaattccttgtttgtgcaaaatggatttcatgtcaatgaggagtttttgcaaatgatgaaaaaatattttaatgcagcagtaaatcatgtggacttcagtcaaaatgtagccgtggccaactacatcaataagtgggtggagaataacacaaacaatctggtgaaagatttggtatccccaagggattttgatgctgccacttatctggccctcattaatgctgtctatttcaaggggaactggaagtcgcagtttaggcctgaaaatactagaaccttttctttcactaaagatgatgaaagtgaagtccaaattccaatgatgtatcagcaaggagaattttattatggggaatttagtgatggctccaatgaagctggtggtatctaccaagtcctagaaataccatatgaaggagatgaaataagcatgatgctggtgctgtccagacaggaagttcctcttgctactctggagccattagtcaaagcacagctggttgaagaatgggcaaactctgtgaagaagcaaaaagtagaagtatacctgcccaggttcacagtggaacaggaaattgatttaaaagatgttttgaaggctcttggaataactgaaattttcatcaaagatgcaaatttgacaggcctctctggataataaggagatttttctttccaaagcaattcacaagtccttcctagaggttaatgaagaaggctcagaagctgctgctgtctcaggaatgattgcaattagtaggatggctgtgctgtatcctcaagttattgtcgaccatccatttttctttcttatcagaaacaggagaactggtacaattctattcatgggacgagtcatgcatcctgaaacaatgaacacaagtggacatgatttcgaagaactttaagttactttatttgaataacaaggaaaacagtaactaagcacattatgtttgcaactggtatatatttaggatttgtgttttacagtatatcttaagataatatttaaaatagttccagataaaaacaatatatgtaaattataagtaacttgtcaaggaatgttatcagtattaagctaatggtcctgttatgtcattgtgtttgtgtgctgttgtttaaaataaaagtacctattgaacatg

SEQ ID NO: 307 - DNA, 3911 bp, Homo sapiens
tggctcagccgcggcggtggcgggggcgcaaccagcgggccgaggcggcggcgccagcggcgccttaaatagcatccagagccggcgcggggcagggagtgggctgcagtgacagccggcggcggagcggccggtccacggaggaggggactgtgttaagaaccaagggcatataaagacagatgggaggagaccctggccggggagaggaagaagcatctacataggtactaagtaccattcgctagaattcagcttagagaactatcaacacaggacaatgcaagcccatgagctgttccggtattttcgaatgccagagctggttgacttccgacagtacgtgcgtactcttccgaccaacacgcttatgggcttcggagcttttgcagcactcaccaccttctggtacgccacgagacccaaacccctgaagccgccatgcgacctctccatgcagtcagtggaagtggcgggtagtggtggtgcacgaagatccgcactacttgacagcgacgagcccttggtgtatttctatgatgatgtcacaacattatacgaaggtttccagaggggaatacaggtgtcaaataatggcccttgtttaggctctcggaaaccagaccaaccctatgaatggctttcatataaacaggttgcagaattgtcggagtgcataggctcagcactgatccagaagggcttcaagactgccccagatcagttcattggcatctttgctcaaaatagacctgagtgggtgattattgaacaaggatgctttgcttattcgatggtgatcgttccactttatgatacccttggaaatgaagccatcacgtacatagtcaacaaagctgaactctctctggtttttgttgacaagccagagaaggccaaactcttattagagggtgtagaaaataagttaataccaggccttaaaatcatagttgtcatggatgcctacggcagtgaactggtggaacgaggccagaggtgtggggtggaagtcaccagcatgaaggcgatggaggacctgggaagagccaacagacggaagcccaagcctccagcacctgaagatcttgcagtaatttgtttcacaagtggaactacaggcaaccccaaaggagcaatggtcactcaccgaaacatagtgagcgattgttcagcttttgtgaaagcaacagagaatacagtcaatccttgcccagatgatactttgatatctttcttgcctctcgcccatatgtttgagagagttgtagagtgtgtaatgctgtgtcatggagctaaaatcggatttttccaaggagatatcaggctgctcatggatgacctcaaggtgcttcaacccactgtcttccccgtggttccaagactgctgaaccggatgtttgaccgaattttcggacaagcaaacaccacgctgaagcgatggctcttggactttgcctccaagaggaaagaagcagagcttcgcagcggcatcatcagaaacaacagcctgtgggaccggctgatcttccacaaagtacagtcgagcctgggcggaagagtccggctgatggtgacaggagccgccccggtgtctgccactgtgctgacgttcctcagagcagccctgggctgtcagttttatgaaggatacggacagacagagtgcactgccgggtgctgcctgaccatgcctggagactggaccgcagacaggccatgttggggccccgatgccgtgcaatttgataaaacttgttgatgtggaagaaatgaattacatggctgccgagggcgagggcgaggtgtgtgtgaaagggccaaatgtatttcagggctacttgaaggacccagcgaaaacagcagaagctttggacaaagacggctggttacacacaggggacattggaaaatggttaccaaatggcaccttgaaaattatcgaccggaaaaagcacatatttaagctggcacaaggagaatacatagcccctgaaaagattgaaaatatctacatgcgaagtgagcctgttgctcaggtgtttgtccacggagaaagcctgcaggcatttctcattgcaattgtggtaccagatgttgagacattatgttcctgggcccaaaagagaggatttgaagggtcgtttgaggaactgtgcagaaataaggatgtcaaaaaagctatcctcgaagatatggtgagacttgggaaggattctggtctgaaaccatttgaacaggtcaaaggcatcacattgcaccctgaattattttctatcgacaatggccttctgactccaacaatgaaggcgaaaaggccagagctgcggaactatttcaggtcgcagatagatgacctctattccactatcaaggtttagtgtgaagaagaaagctcagaggaaatggcacagttccacaatctcttctcctgctgatggccttcatgttgttaattttgaatacagcaagtgtagggaaggaagcgttcgtgtttgacttgtccattcggggttcttctcataggaatgctagaggaaagagaacactgccttacagtcacctcatgttgcagaccatgtttatggtaatacacactttccaaaatgagccttaaaaattgtaaaggggatactataaatgtgctaagttatttgagacttcctcagtttaaaaagtgggttttaaatcttctgtctccctgtttctctaatcaaggggttaggactttgctatctctgagatgtctgctacttgctgcaaattctgcagctgtctgctgctctaaagagtacagtgcactagagggaagtgttccctttaaaaataagaacaactgtcctggctggagaatctcacaagcggaccagagatctttttaaatccctgctactgtcccttctcacaggcattcacagaacccttctgattcgtaagggttacgaaactcatgttcttctccagtcccctgtggtttctgttggagcataaggtttccagtaagcgggagggcagatccaactcagaaccatgcagataaggagcctctggcaaatgggtgctcatcagaacgcgtggattctctttcatggcagaatgctcttggactcggttctccaggcctgattccccgactccatcctttttcaggggttatttaaaaatctgccttagattctatagtgaagacaagcatttcaagaaagagttacctggatcagccatgctcagctgtgacgcctgaataactgtctactttatcttcactgaaccactcactctgtgtaaaggccaacagatttttaatgtggttttcatatcaaaagatcatgttgggattaacttgcctttttccccaaaaaataaactctcaggcaagcatttctttaaagctattaagggagtatatacttgagtacttattgaaatggacagtaataagcaaatgttcttataatgctacctgatttctatgaaatgtgtttgacaagccaaaattctaggatgtagaaatctggaaagttcatttcctgggattcacttctccagggattttttaaagttaatttgggaaattaacagcagttcactttattgtgagtctttgccacatttgactgaattgagctgtcatttgtacatttaaagcagctgttttggggtctgtgagagtacatgtattatatacaagcacaacagggcttgcactaaagaattgtcattgtaataacactacttggtagcctaacttcatatatgtattcttaattgcacaaaaagtcaataatttgtcaccttggggttttgaatgtttgctttaagtgttggctatttctatgttttataaaccaaaacaaaatttccaaaaacaatgaaggaaaccaaaataaatatttctgcatttcaggtga

SEQ ID NO: 308 - DNA, 2327 bp, Homo sapiens
cgggaaggcttggaccgacgcggcccagaggccaggaacattccgcgcgtggaccagccgggccagggcgatgctgcgggtgcggtgtctgcgcggcgggagccgcggcgccgaggcggtgcactacatcggatctcggcttggacgaaccttgacaggatgggtgcagcgaactttccagagcacccaggcagctacggcttcctcccggaactcctgtgcagctgacgacaaagccactgagcctctgcccaaggactgccctgtctcttcttacaacgaatgggaccccttagaggaagtgatagtgggcagagcagaaaacgcctgtgttccaccgttcaccatcgaggtgaaggccaacacatatgaaaagtactggccattttaccagaagcaaggagggcattattttcccaaagatcatttgaaaaaggctgttgctgaaattgaagaaatgtgcaatattttaaaaacggaaggagtgacagtaaggaggcctgaccccattgactggtcattgaagtataaaactcctgattttgagtctacgggtttatacagtgcaatgcctcgagacatcctgatagttgtgggcaatgagattatcgaggctcccatggcatggcgttcacgcttctttgagtaccgagcgtacaggtcaattatcaaagactacttccaccgtggcgccaagtggacaacagctcctaagcccacaatggctgatgagctttataaccaggattatcccatccactctgtagaagacagacacaaattggctgctcagggaaaatttgtgacaactgagtttgagccatgctttgatgctgctgacttcattcgagctggaagagatatttttgcacagagaagccaggttacaaactacctaggcattgaatggatgcgtaggcatcttgctccagactacagagtgcatatcatctcctttaaagatcccaatcccatgcatattgatgctaccttcaacatcattggacctggtattgtgctttccaaccctgaccgaccatgtcaccagattgatcttttcaagaaagcaggatggactatcattactcctccaacaccaatcatcccagacgatcatccactctggatgtcatccaaatggctttccatgaatgtcttaatgctagatgaaaaacgtgttatggtggatgccaatgaagttccaattcaaaagatgtttgaaaagctgggtatcactaccattaaagttaacattcgtaatgccaattccctgggaggaggcttccattgctggacctgcgatgtccggcgccgaggcaccttacagtcctacttggactgaacaggcctgatggagcttgtggctggcctcagatacacctaagaagcttaggggcaaggttcattctcctgctttaaaaagtgcatgaactgtagtgctttaaacaatcatctccttaacaggggtcgtaagcctggtttgcttctattacttttctttgacataaagaaaataacttctgctaggtattactctctactcctaaagttatttactatttggcttcaagtataaaattttggtgaatgtgtaccaagaaaaaattagtcacctgagtaacttggccactaataattaaccatctacctctgtttttaattttctttccaaaaggcagcttgaaatgttggtcctaatcttaattttttttcctcttctatagacttgagaatgtttttctctaaatgagagaaagacttagaatgtacacagatccaaaatagaatcagattatctctttttttctaaaggagagaaagacttagaacatacacagatcctaagtagaaccaggtaattgtctctttttctaataaggaatttgggtaatttttaattttttgttttttaaaaaataacctagactatgcaaaacatcaaagtgaattttccatgaatgtttttaatattctcatctcaacattgtgatatatgctactaaaaaccttttcatatacatcttacctcatttcaagtgaattattttaatctttttctctctttccaaaaatttaggaatgtttagtgtaattggatttcgctatcagttcccatccttaagttttgatattcaatatctgatagatacactgcatctttggtcatctaagatttgtttacaaatgtgcaaattatttagagcatagactttataagcattaaaaaaaactaatggaggtaaaacctaaatgcgatgtgaaataattttagtgttgataccgtatgtgtatttttattctaataaacttttgtgttccagattgaa

SEQ ID NO: 309 - DNA, 3801 bp, Homo sapiens
agaggtgccctcggtgatagaggaaacatggccgagtatacgcggctgcacaacgccttggcgctaatccgcctccgaaacccgccggtcaacgcgatcagtacgactttactccgtgacataaaagaaggactacagaaagctgtaatagaccatacaataaaagccattgtgatttgtggagcagagggcaaattttctgcaggtgctgatattcgtggcttcagtgctcctaggacatttggccttacactgggacatgtagtagatgaaatacagagaaatgagaagcccgtggtggcagcaatccaaggcatggctttcggagggggactagagctggccctgggctgtcactataggattgcccacgcagaggctcaagttggcttaccagaagttacactgggacttctccctggtgcaagaggaacccagcttctccccagactcactggagttcctgctgcacttgacttaattacctcaggaagacgtattttagcagatgaagcactcaagctgggcattctagataaagttgtaaactcagacccggttgaagaagcaatcagatttgctcagagagtttcagatcaacctctagaatcccgtagactctgcaacaagccaattcagagcttgcccaacatggacagcatttttagtgaggccctcttgaagatgcggaggcagcaccctgggtgtcttgcacaggaggcttgtgtccgtgcagtccaggctgctgtgcagtatccctatgaagtgggcatcaagaaggaggaggagctgtttctatatcttttgcaatcagggcaggctagagccctgcaatatgctttcttcgctgaaaggaaagcaaataagtggtcaactccctccggagcatcgtggaaaacagcatcagcgcggcctgtctcctcagttggtgttgttggcttgggaacaatgggccgaggcattgtcatttcttttgcaagggccaggattcctgtgattgctgtagactcggacaaaaaccagctagcaactgcaaacaagatgataacctctgtcttggaaaaagaagcctccaaaatgcaacagagcggccacccttggtcaggaccaaaacccaggttaacttcatctgtgaaggagcttggtggtgtagatttagtcattgaagcagtatttgaggaaatgagcctgaagaagcaggtctttgctgaactctcagctgtgtgcaaaccagaagcatttttgtgcactaatacttcagccctggatgttgatgagattgcttcttccactgatcgtcctcacttggtcattggcacccacttcttttcgccagctcatgtcatgaagttgttagaggttattcccagccaatactcttcccccactaccattgccactgttatgaacttatcaaaaaagattaaaaagattggagtcgttgtaggcaactgttttggatttgtggggaatcgaatgttgaatccttactacaatcaggcatatttcttgttagaagaaggcagcaaaccagaggaggtagatcaggtgctggaagagtttggttttaaaatgggaccttttagagtgtctgatcttgctgggttggatgtgggctggaaatctagaaaggggcaaggtcttactggacctacattgcttccaggaactcctgcccgaaaaaggggtaataggaggtactgcccaattcctgatgtgctctgtgaattaggacgatttggccagaagacaggtaagggttggtatcaatatgacaagccattgggtaggattcacaaacctgatccctggctttccaaattcctatcacggtatagaaaaacccatcacattgaaccacgtaccattagccaggatgagatccttgaacgctgcttatattcacttatcaatgaagcattccgtatcttgggagaagggatagctgctagcccagagcacattgatgttgtctatttacatggatatggatggccaaggcacaagggcgggcccatgttctatgcttccacagttgggttgcccacagttctagagaaattgcagaaatattacaggcagaaccctgatattccccaactggagccaagtgactatctaaaaaaactggcttctcagggaaaccctcccctgaaagaatggcaaagcttggcaggctcccctagcagtaaattgtgattcagtcttccagattatgcctcacatgctagcatcaggtaatgctgactgaatttcagtgaaattaaatcaaaaatccaaagtaagattgttctgaaatacaaagcaaaataaataatcattagaatcttctgtgtaacgactctaatggtcaaatctttaggaatgtgcttcctatgcctctgaatctgtccttatcagataaattcaatgcatgaacttgtgtgaatataataccataatagctaatgaaagaggctcaggcataagttgagattctcaaatgcttttatcattggataaatgtgtcatcaattaataaatgataaatgcagctaagtcatacattcattttgactcctttcaatgtcacacacatagtattgatcagaaatcttatgaatcatacatacactcaacaaacattaaagttgtaggaaaaagacagttggaaattggtaagggaactgagtacttcaaaccagcacagggaacttaggttagtgtggcaagcctttcctcttctggtctttcctcttctgtttatggagaaataatagaaagtagtaagtcgttaacttagtgtaagaagggtcttagagaacatctaaccttctaggatttcccaattctgtgatagagtaatgacaccagttttcctgtcatgacaagcctctgtgatgttacatatggaaatggttgaatcttgaaaaatctaaaattgttgcaaaacatattttgtatgattttgttgtaagagttcttctctttttactttttgccttgtgtagttaaaaattaaggggctggtcaatacaaaaacttgtacacaaatatttatagcagaattattcataatggccaaaagctgaatacaacccaaatgtctatgaactaatgaatagataaaccaaatctggtatatccatacaatggactatattattcagccataaaaagaaataaagggccaggcacagtggctcacacctgtaatcccagcactttgggaggctgaggcaggaggattgtttgaggccagaaatttgagaccagcctgggcaacatagcaaaaccctgtctctacaaaaaatactttccgtacattagtggttgcctaaggctagaattgggggtgatgaatggggagtacaggattcatctaatgggtacaggatttctttatggttcatgaaaatggtctaaacttattgtggtaatggtcacataacaatatattaaaaaccattgagttgtatattttaagtgggtgaattatatggtatgtgaattatatctcaataaagttgttagtaaataaatggggctgaagatgttatccttcattgtggtgtaaatgaactttcacaatattttcacctgtgaacccaaataaaatgattaaagttctgatggaaaaatcttgaatggagtataagttttccgttgttaaaaagcaaacaaaaaaccaacaaaaaatccaagtgtgccttgaattgtacagagcacaattattatgtttgaaatgtgtactacttaattttatataatttggtttgtgaaattaaagacatcaataaaaatgattcctgaaagtagtaa

SEQ ID NO: 310 - DNA, 7939 bp, Homo sapiens
ggtcgccgcggtgctgctgctcagtgggagcgggtcttcgcaactgtctccgcgtggcgcgcgcctctagccgcccttcccctggcggctacggccggagggagcggaggcgagcgggagtcgggctccatggagagcggcggacaactgggcagaggcggagctttcatctcggcaccctggttccagtgacccgcgctagcgtcccgtcccgcccgcgtcggagcggccgccggccccgggactgaccggcctcgccgcacctcccgcaccgactagcgctcccgggcgctcctgcgcccgactcgccctcgcccccactccccggcggggtggcggcggccgggcccccacggcggcggccggagcagcagcagcagcagcaggagcccgcctctatgatgaagttcaagcccaaccagacgcggacctacgaccgcgagggcttcaagaagcgggcggcgtgcctgtgcttccggagcgagcaggaggacgagagacttcccaggacagtctagaaaaccagcttgagcccacctctctagttaatagctacgtggcgctcccatctggctgttcctgtactgaagttctcagtgctgctggtgagtagcagccggtacccagaccagtggattgtcccaggaggaggaatggaacccgaggaggaacctggcggtgctgccgtgagggaagtttatgaggaggctggagtcaaaggaaaactaggcagacttctgggcatatttgagcagaaccaagaccgaaagcacagaacatatgtttatgttctaacagtcactgaaatattagaagattgggaagattctgttaatattggaaggaagagagagtggttcaaagtagaagatgctatcaaagttctccagtgtcataaacctgtacatgcagagtatctggaaaagctaaagctgggttgttccccagccaatggaaattctacagtcccttcccttccggataataatgccttgtttgtaaccgctgcacagacctctgggttgccatctagtgtaagatagagagaactgggtaggcctctcccaccatgtgcagtctcatggggagaggcttctttcgtttcctcgtcaaacatctgattgacgcttgcaaactgtctgaatttgccatgcaaggttttcaaacaatttgcatgtttttcagatgctttcaaatctttttttaaaaaaatagtgtaaaatattttaataagccaaagccatgtggaatttttgtttagatgccttaactgtgccacaccccacaaccccctatattattttggttgtctatttctcacagcatattttcagttttttgtccatttgacatcagtctgtggtttattttgtcatcagattacttgtgggtatacctaccccaaaattgttttctcattcacagcattagcatattcagcaaatccatctgtggtgggaattaaaaatattattggtattaaagaaatccattcaccccaaaacttgttttacaggattacaattttaattcaaaatttccagatttgggctatttctgtatgatccaataacttattttgtcacagggcttaatttgccatttttggggatttgtcgactcattttgtctgaattttcacaactggtattatgtcactagctacctgatacggctatttcccttataactcaatagtaccttaacacaaagtataactctgtagagttggtgaatattttagggaaatattagcaaaatgcatgtagtaaagacatcttatgaaaactgtattcatggaatttgatttagcatgctcagttgccagttcccattatcgatactctttctttgcagaataccttagaaccgttatttccctcagtgtagattgctcttaaaatgtattcagttatttagtggcccccacaggagtggagtcttgaaatctaattctaaatgccagtcagtgatgatcgcatcacagttgagtgaaatggccttcctgttcagctgttagagactgaagattgttagggcaccttagaatgtctcatcttttctaggttgtcaacaggtactatttgtcacataactaactttcgaggcactggaacatacctgaactaagaattaaatcttttactttatactcacttaaaatcaagaatcccatctaaaacacataggtaccttatctgaaactcttgcacttccccaaccagggcagaaatgaggtgggagaagtttgactaaaatgagggatgggggaaagtaaaagatgtttttttttttttgagactcgctttgtcacccaggctggagtgcaatggcacaatctcaactcaccgcaacctccgcctcccgggttcaagcgattctcctgcctcagcctcccgagtagttgggattacaggcgcctgcctccatgcctggctaattttgtatttttagtagagacagggtttcttcatgttggtcaggctggtctcaaactcctaacctcgtgatccgcctgcctcgacctcccaaagtgctgggattacaggcatgagccaccatgcccagccaaagatcatttttttatatagacttcagccctttgtaaatattgtaactggggagtatagagtagaaaaaaagtatagttaaaacatttgttctacaaattaacctttaaaaatataattactgctaaaaatagagtgctgttacacttaaggaaaattagtgccattttggaaatgagatcttgtgccataaatacagctgaactgaatataaatgttcacaaattaatgctgtcaaaggaatgagtaaagcagaaaaacttttaaccagcaacatttcaagtacgtagtgtgatcaaacatgatcatccagaatttttatatttttttctttgtacagaggttacatattctgggtgttcttttataaaggaaacattttaaatcccacaaattgacactttctatcttcaatggactaagatttttttggtcagtaatctctgaaatttccttaaattatatacttaacatagcagagaaactggattgtttttgtatataagactgcttccacctgaaatgctgtcataagtactgggggggtgggggagtgcccatcttgtacatgatattcttagaggtaataaggtaatgatgcatgaatttattttataaactcttggactatgtatttgacatgtaaaatatgtacagtattaacgtcaaccatctctttaaagttagcctataaatattgttgtataattttctttggtcagaaacacttggactgaatagtgacactcggtaaggattttcagtgccatttagcaaaacgtctttagtctatgcaactagcaaaaatctgcataatgcaacaacacagttttcacacttcaaattttacatgaggggttcttcacgattctcctggaacccagtctagcaaaatgagaggaaaggccctagggagatttatttctgttaaatagttaactctgctgagtatgacaaatagtgtctactatctcaaccctccaaaatttgcagagtgttgggactgtcatttgtgattttttttttttttttttggtggggtagttgaataaaattgggcagctaaatttttcagttccatgtgcctcccaaataaaaaacagaaaataagtagtttttgtgaattgacttgcagacaaagtagaaactgtgctgcatgatgttattttgtaaacagatgacattttctgaccaggcacatgccatccaattttctgtcaatcacactgttgtataaagcagcagaactgaaggggaaaaatgattgttgtatacactgaattgctttgcatggtctcatttgagataattgatgtaagaatcctgacttttttatatttggaaacatcaaataaaaatggaaaaaatgatcatggctttaaaaaaaaaacaaaaacacacacacatgaactcagatttgcaaaccaggtttctgaaactttgggtaaggtgtatgcttttaactttgaaatgtataaacacccagcggaaacgtatacctttcagtgcatagtgcattgtgtgcttaccctgggttgtttaaacttgtgttcaaatattccccctccaagtgaaagcctgtcgggaattccacagtaacacctttactgttctcccattgatgatcatatacgttacctcttcctagcggtacatttgtatgatccttactactggaattaccgggttaaaaggaaatgcttaccactaagatgtcagtattctcctcatggatattttcagtctcaatgttgccagtctaatagtatagtatgtggttgctttactgctgttctccccacccccgtggagttgtgtcattattttaatgaatgtgagctcttgacttactctagaattctaatacagatactttctgcactagtatcacttttattattgcagttccatttaaaagcataactggctaagtcaccgccccacccgccgcattacatttcctaaaacatactgctgccaaagaccaactgtagaatccttaagtcctgttcaagtgtcacttcattttttattaggggtttcttagttggagggcatgagaaacttggccctttccaatgttgtcttcacattggagtataagaattctctataggactctttaatttttttttttttttggtagagatggggtcttgctgtgttgcccaggctggtctcaaactcctaggcttaagcagtcctccagcctcagccttctcaaagtgctaggatgattggcatgagccacctcgtctggcctgcaggtctttttaagcatttgctgttcaataataagcatcttctttatgcctagtatttgtgataagagcacaaaacaattttctaatctcaaagagcttatattctagtggggtagagataagtgatttatcttggtgtagttttggcttttttgtttgtttttttgagacagcatctcacactgtcgcccaggctggagtgcagtggtgcaatctcagcttactgtaacctccgcctgccaggttcaagcgattctcctgcctcatcctcccgaggagctgggatcacaggcgcctgccaccacgcccggctaatttttttgtatttttagtagagacggggtttcaccatattggccaggctggtctcaaactcctgacctcgtgatccgcctgcctcggcctccctaagtgctgggattatgggcgtgaaccaccgcacctggcctatcttggtgtttttacatccttcagtatttttcaaggttttacagcttttttatctatagacttataccatcttcaaaagcaatacaattttatttgtagacgtgatttcccccaccaaatgcacattttatggagctctaggacaaaagtcaggatgaaaagtaatctatcgctggtgctactttaataccttcctgactggtgccactggctaaattctagcagtacgatgagagggccattaaggcctatcttagcaagcaagacattatagcaaagacctaaacactcaaaggttcaacgtcttctagccagggaactattctctaattcttccaccttgatatgatttcagcaaattctgataacccggtattactcttaatgcatttttgtaacatttgacaaacatctcccaatatgtagactcccactctcctgatgctaatcagtatcagacaatggaagtaaattttcctgcttttctcaacttttcctcaaattcatgttagtgaagtactttcatttggccatcattatttatcaaccttaagaaacatgcctattgacgaagtaaatatactaggaattcaacgtatctacgggaatgtggacaaagacatataccaagacaaggcactagagtgaaaagccattaaaataaaatgctcagcagcaaaggatttgtaatggttaacttgcaatatatccatatggtgtaatattacagtcattagaaatgacatttgcgtaaggatctgagtggaaactgatacagcctgtcggagagctactgagtagtattttatcacagctgcatacataccctttcacccaacagttccactcctgggagtctagtcaacaaatggacaagttgcacaaccaagctatggtcaaatatgtgtgttgtaggatttatgaaactggtaccaatttaatattcaaatgtgattaagtcatggcaatctatttactggatactttgtggttaccaaagagctatgtgctgccacagggagtcctttcaatagtgattgaaaaaggcagaacactactagacagaactacctgttttatgcatgtattggcatacactgaaaaagcttagtcacttaaaatgaggttgtacagattgtagattttgtttttaaacgcctgtatggtttaaaaaatgttttgggaaatagacatgagcagggcagagaactacaacctacaggccaaaccccaccccactgcctgtttgtacggccaacaagtttaaaatttttttaatgttttaggtttttttttttttaaaaaaaatactatgcccatttgtttacaaatcgtctgtgggtgctttctcactacaatggcagaattcagtagttgagacagacctatggtccacaaaggccgaaatatttactgttttaggagaaaaaaacaacatgaattgtaataacttggacttacttggttgctcagtcctgatgtgtcctgttaaaacctaagagaaacagcaccaagttcaatctagtgcaatcagcctatcacatctaagctgcttttgccagatctgatatctactcccgaccttaagccaggagactttgtaaacttactaggttataataaaacttaagaactatcgatatttactaatctacatcatggaactatttcaaaagcagtcatatggtaagatggatcaggagtctttaaaaataaaactgagaaagaaaaatcatgtgatcaattcagtagtagagacagaggttggtatcaagtctatgttcatacacttaccagtgccacccagcagggccatacaagacacatgaaatgagatcagctcaagggtgacaagatgaaactgggagagggccggggagacccgaactcttaatattggattccacacaagaggaaaaattttagtccagctcccagcatggcagctaatggcaagttagtaccataaagccaactcttggaatatacctgacttccacgataaaatggagatgagtgcaggggtgagtgtatagttaagaaaacaaacaatatattactagtccaggtggtagatgacagatttttattatttacacttctctcaaattattacattcagcatgttttgctttttatgttatttaaagtataaaccctcatataattccctaagatgggtggcatgccaagtagctaaatgaaatatcatcccagcccaaaagtacttattcgaatgaaatattacatttttcttaaataaagcaataaattaggtaccctattatcatggtattttcttttttggccagcttttctagataaggttgtattgctactgcaactaacaaaaaagatgtggcagggctgggcacggtggctcacgcctgtaatcccagcactttgggaggccgaggcgggcagatcacgaggtcaggagatggagaccatcctggcccaacatggtgaaaccccgtctctactaaaaatacaaaaaattagccaggtgtggtggcaggtgtctgtagtcccagctcctcaggaggctgaggcaggagaatcgcttgaacgcgggaggcagaacctgcagtgagccaagatcatgccacagcactccagcctaaactacagagctagaaagtggctagagcagcc

SEQ ID NO: 311 - DNA, 760 bp, Homo sapiens
gggctccctgcctcgggctctcaccctcctctcctgcagctccagctttgtgctctgcctctgaggagaccatggcccagtatctgagtaccctgctgctcctgctggccaccctagctgtggccctggcctggagccccaaggaggaggataggataatcccgggtggcatctataacgcagacctcaatgatgagtgggtacagcgtgcccttcacttcgccatcagcgagtataacaaggccaccaaagatgactactacagacgtccgctgcgggtactaagagccaggcaacagaccgttgggggggtgaattacttcttcgacgtagaggtgggccgcaccatatgtaccaagtcccagcccaacttggacacctgtgccttccatgaacagccagaactgcagaagaaacagttgtgctctttcgagatctacgaagttccctgggagaacagaaggtccctggtgaaatccaggtgtcaagaatcctagggatctgtgccaggccattcgcaccagccaccacccactcccaccccctgtagtgctcccacccctggactggtggcccccaccctgcgggaggcctccccatgtgcctgcgccaagagacagacagagaaggctgcaggagtcctttgttgctcagcagggcgctctgccctccctccttccttcttgcttctaatagccctggtacatggtacacacccccccacctcctgcaattaaacagtagcatcgcctccctctga

SEQ ID NO: 312 - DNA, 2493 bp, Homo sapiens
gggcaacccgcgccggacccttccttcctagtcgcggggagtctgagaaagcgcacctgttccgcgaccgtcacgcacccctcctccgcctgccgcgatgtaccgctacctggccaaagcgctgctgccgtcccgggccgggcccgctgccctgggctccgcggccaaccactcggccgcgttgctgggccggggccgcggacagcccgccgccgcctcgcagccggggctcgcattggccgcccggcgccactacagcgagttggtggccgaccgcgaggacgaccccaacttcttcaagatggtggagggcttcttcgatcgcggcgccagcatcgtggaggacaagttggtgaaggacctgaggacccaggaaagcgaggagcagaagcggaaccgggtgcgcggcatcctgcggatcatcaagccctgcaaccatgtgctgagtctctccttccccatccggcgcgacgacggctcctgggaggtcatcgaaggctaccgggcccagcacagccagcaccgcacgccctgcaagggaggtatccgttacagcactgatgtgagtgtagatgaagtaaaagctttggcttctctgatgacatacaagtgtgcagtggttgatgtgccgtttgggggtgctaaagctggtgttaagatcaatcccaagaactataccgaaaatgaattggaaaagatcacaaggaggttcaccatggagctagcaaagaagggctttattggtcctggcgttgatgtgcctgctccagacatgaacacaggtgagcgggagatgtcctggattgctgatacctatgccagcaccatagggcactatgatattaatgcacacgcctgtgttactggtaaacccatcagccaagggggaatccatggacgcatctctgctactggccgtggtgtcttccatgggattgaaaacttcatcaatgaagcttcttacatgagcattttaggaatgacaccagggtttagagataaaacatttgttgttcagggatttggtaatgtgggcctacactctatgagatatttacatcgttttggtgctaaatgtattgctgttggtgagtctgatgggagtatatggaatccagatggtattgacccaaaggaactggaagacttcaaattgcaacatgggtccattctgggcttccccaaggcaaagccctatgaaggaagcatcttggaggtcgactgtgacatactgatcccagctgccactgagaagcagttgaccaaatccaacgcacccagagtcaaagccaagatcattgctgaaggtgccaatgggccaacaactccagaagctgataagatcttcctggagagaaacattttggttattccagatctctacttgaatgctggaggagtgacagtatcttactttgagtggctgaagaatctaaatcatgtcagctatggccgtttgaccttcaaatatgaaagggattctaactaccacttgctcctgtctgttcaagagagtttagaaagaaaatttggaaagcatggtggaactattcccattgtacccacggcagagttccaagacagtatatcgggtgcatctgagaaagacattgtgcactctgccttggcatacacaatggagcgttctgccaggcaaattatgcacacagccatgaagtataacctgggattggacctgagaacagctgcctatgtcaatgccattgaaaaagtcttcaaagtgtacagtgaagctggtgtgaccttcacatagatggatcatggctgacttcctcactaacctcttcacgtgtaacttctgcagacctaccacaagtttacatgtaaccacagaaatccctttctctcctgactcattactaatggataccattctcaacaagtcaatccaaatcagcccgttaaggagaaagaaattaatatacaagctgagtgtgaaagtagaaatcacctacaccagagagctattttggtattttgcctttaaataaaaagcctcctccatatggctgtgcagccttgctctgtggcttttcccagcacaatcagtgctagtgctggggaagggacagtcaagagcagtcagttgcttacttattttgctctggatgagtctgggacacgctgtaactttaacacatttaagaagaaggtgtgtggccttttcagaaggtggcatggtcctcaagtgagttcttagtattttatatcagcaaaataactcaattttgcagattgcaaacaaatataaaagctgtttctgtttatgaattttattcttttagaatagaataagtacatgctgctgtaataaaattgcctttaatcacttaacaagcctaaccttgactcagtgaatgcctataaaaataataaatgaaaaaaaacagtatttttatatcataaaagtttcatttgtagcttatcattcacgtattgttgtccagcaaacattaaaagccctgtggataa

SEQ ID NO: 313 - DNA, 4623 bp, Homo sapiens
gcagacgaggcagggggaggtttgcactcggcgtggcgcgggtgagccgcgtgctctcgggcacccggccgccagttcggatgcttccgatcctcggggagccggggcgctgcgccggagtcacttcagcccatgttgttcaggtgacacccggggaagagcagactccagtgtgcaaaacgtttcggggtttccgggccagcggttccgggcgcgcctcgcgggcggcggcgcagaactacaacccccaggctccctggcgtggcggcacgtgggcccgagccgggcggccgcggatataaagcgcggcggcggctgccgggcggagcggctgcacggacaagagcggaggcctggaaggggaaactgaagcagaaagaggttacttaatgggctcaaggtcacctacctgttccagacctaccagcagctcaatggccttcccaaagaagaaacttcagggtcttgtggctgcaaccatcacgccaatgactgagaatggagaaatcaacttttcagtaattggtcagtatgtggattatcttgtgaaagaacagggagtgaagaacatttttgtgaatggcacaacaggagaaggcctgtccctgagcgtctcagagcgtcgccaggttgcagaggagtgggtgacaaaagggaaggacaagtgagtggctgcatgaggataaaaatgccctttggcaacagctgtattcagtgagcctcttccccagaggatacgccctccctgcttcctggtcagagccggggcttgaggtcagctggtgggaagatgagcagggcccccgggatcctggcttcttggagaagagccccctccctttctgtgcagaagggcagccaaactgctagacacacctgccacccagaggttccgctgggaaactgcttcttacctgtctacaaggccagtcccctcacagttacccgtctttgggctgaaaggtcaaaccatcataagttggggaccatccgcacaacccaaagtagacggagtagctttagaagacagctgaaggcctggcacagtggctcacacctgtaatcccagcactttgggaggccaagtggtagctgtgcctagcagcccaggagaaagaggaagagcaaatggatgattggcttcacctaaaccaagagaaaggggtagtgaagggaggggtcgtgcaataaaactgctggtgagagttcaacaggctggatcaggtgataattcacgtaggagcactgagcttgaaggagtcacaggaactggcccaacatgcagcagaaataggagctgatggcatcgctgtcattgcaccgttcttcctcaagccatggaccaaagatatcctgattaatttcctaaaggaagtggctgctgccgcccctgccctgccattttattactatcacattcctgccttgacaggggtaaagattcgtgctgaggagttgttggatgggattctggataagatccccaccttccaagggctgaaattcagtgatacagatctcttagacttcgggcaatgtgttgatcagaatcgccagcaacagtttgctttcctttttggggtggatgagcaactgttgagtgctctggtgatgggagcaactggagcagtgggcagtacctataactacctgggaaaaaagacaaaccagatgttggaggcttttgaacaaaaggacttctctttagccctgaactatcagttttgtatccagagatttatcaactttgttgtcaaactaggtaagtgccacccatcttctgctttgtctgctgctggagactgtaaagaaaatggaataccatcactttctctgagggttcaacaagaacactttttaatggtctgttgcaagcagagttctgtttcccttattaaccctcggggccaaccatataaaactgtgaagtaaacctagttggaaaatctttggcaaccttctccattttagcacatgcctaccccattttccattctttctctcctaaaccatcagcactccctccctttacttgcttcagctcattaaaattctactactgcattgaggttgatttcagcctaagtgcttggaggaaggcagtctaaatacagattttactaaattgtgaatgactgacagctctcccaagagtatttacaatttaaacagagtttattaacacaagtaagcctaaatggatggaggtttggataatatgacaaagtaaaattggggagcagtcgtggggagaaatacagtgaatttgagtagagaaaccgctccagagtctcttaaatcttctataacaaatgacaaatgccactatccactcttctgcaagagattggcccttgggccaattgaatctgcgttaatgcaggaaaatttttaagtttatttttggtagacctccctgctccctgtcagagtcctgcataattctgacaactcctccctctcccccaagcacctcttctgtgttatgcccctcattcttgcagggttctcaacccactctcttactccttcaaggacgtttctgtttgtttttccactttcgtgatttttgcacatttgtgtgctgccagtgctatgaactacctattattgttccatttttctaagcaatggtttcacaaaattgtgggtttggtgtgataattattatgttcctaaaatacattaaaataggtattgaactgttaaaattttagacaaactaaaagcttgatgtgtgtagtagtccccccttatctcagggggatatgttccaagatgaccagtggatgcctgaaattgcagataatacgaaaccctatatatactatgttttttcctgtacatgcatacctatggtaaagtttaatttataaattaggcatagtaagagataaacagtaactaataataaaatagaacaattataacaatatactgcaataaaagttatataactatggttttggagtgtcacagaccaaagccatcatgactctggtctctgggattccaatgggcccaccccggcttccactgcagaaagcctccagggagtttactgatagtgctgaagctaaactgaagagcctggatttcctttctttcactgatttaaaggatggaaacttggaagctggtagctagtgcctctctatcaaatcagggtttgcaccttgagacataatctaccttaaatagtgcatttttttctcagggaattttagatgaacttgaataaactctcctagcaaatgaaatctcacaataagcattgaggtaccttttgtgagccttaaaaagtcttattttgtgaaggggcaaaaactctaggagtcacaactctcagtcattcatttcacagatttttttgtggagaaatttctgtttatatggatgaaatggaatcaagaggaaaattgtaattgattaattccatctgtctttaggagctctcattatctcggtctctggttcctaatcctattttaaagttgtctaattttaaaccactataatatgtcttcattttaataaatattcatttggaatctaggaaaactctgagctactgcatttaggcaggcactttaataccaaactgtaacatgtctcaactgtatacaactcaaaatacaccagctcatttggctgctcagtctaactctagaatggatgcttttgaattcatttcgatgtcaccacttttcgctctttaaaaacactgggtcaggtgaggacttgtttcagttcctataactaagtaaagggcggctttctcataacaaaggaaaaagtcttccccaaagatgaatttaagtctccacttttttctatacagaaaactcaaaactcaaagtttcaaagaaccaaaggactcttcctctgggcaccacaaacttccccttcctccactgagaagactgtctctcccgcaggaccctgaattattgaaatcgaaggctgacttcctttctgcagtgagcccaggggctaatgttattatcctgtcacacttgcaactagtgacttttgtttagtgatagaagatttggggaggacccaaaggactcagaactttctctccatacctccttttactcttttctttctgtgtaatgtatcaacaactgtttaatctcccttctaacaaaccttgatataagctttctgatatcaaagtatattgacagttaacccttactgattttaaacttgactatccagtctgttaattacctaagattttgttttcatttcatctctaattgttttgatcattggcagagaaagagtatttgaaattcatatcagttttgctccttattttaatctctttgaattaaaaataaaactttttcaaaatggaaatttgaaattataagtagacttcaattatctttgctaatcctctctttaattagtcagctagttaaaagttgttatattcatatatcctcaaccctctttttgcctttgtagcttttaatttcctgaaagaagaaaatgagttgttcgtttttggttctgaggatgtgatatccgtacttactgatactaaagccaaatttaaattctaaaattaattcttgggtatccaataaacaaagaactatttttcta

SEQ ID NO: 314 - DNA, 4230 bp, Homo sapiens
agtttagcgtaaaccgggaagcggatcgcgtggagtgaaagtcaccgcagcggagatggacaaaccatgtgggtgccctccaggtgtgtgcgaccatgaaatgggagactagcaggacccacgttggccaaccgtggacctggtccctccagtaggagtcgtgagccagctgaatttgaatgcaaagatggagcaagggccgactggagtcacactgacatccacccccataacatggggacagatcaagaaaacaaagcaggaagctgagaaaatgctggagcatccatgtgcttggccatgttagcagtagtgtcctgtgaggattgatttccaaaaactcctgttacatgaggaagacaccaagaagagcaaagaaaaggagccagggtggctcttcctcagctatctcttccaaatgcatgacaaggaagttctcatcaagaaggcaaggcaatacagaagtgttccacacagggacattgcaaagacaagcaagtcatcacactggagatttttccttccaggaaattgagaaagattttcaggactttgagtttcagtggcaagaagatgaaagaaatggccatgaagcactcatgacagagataaaaaagttgacaggtaatacagactgatatgatcaaaggcatgctggaaacaaacctattaaagatcagcttggatcaagctttcattcacatctgcctgaactgcatatattgcagagcaaagggaaaattgatagtcaagatgagaagtctgtcaatgatgcttcctcagtttcagcatcccaaagaatttcttgtattcctaaaacccatatttctaataagtatgggaataatttcctccaggaagcacacatgagagaaaaatctttccaatgtaatgagagtggcaaagcctttaattgtagctcactgttaaaaaaatgtcagataatccatttaggagagaaaaaatataaatgtgatatatgtggcaaggtctttaatcagaagcgataccttgcataccatcatagatgtcacactggtgagaaaccttacaagtgtaatcagtgtggcaagaccttcagttacaagtcatcccttgtaattcacaaggcaattcatactggagagaaacctcacaagtgtaatgaatgtggcaaggtttttaatcaaaaagcatatcttgcaagtcatcatagacttcatactggagagaaaccttacaaatgtgaagaatgtgacaaagtttttagtcgctaatcacaccttgaaagacataggagaattcatactggagagaaaccgtacaaatgtaaggtttgtgacaaggctttcagacgtgattcacacctggcacaacatattgtaattcacactggagagaaaccttacaagtgtaatgagtgtggcaagacctttgttcaaaattcatctcttgtaatgcataaggtcattcatactggagagaaatgttacaagtgtaatgaatgtggcaaggtttttaatcacaaatcaaaccttgcatgtcatcatagacttcatactggagagaaaccttacaagtgtaatgaatgtggcaaggtttttaattgaaaatcaaaccttgaacatcatcatagagttcatatcggagaaaaaccttacaaatgtgaagaatgtgacaaagttttcaatttcaattcacgccttgaaatacataggagagttcatactggagagaaaccatagaaatgtaaggtttgtgacaaggcattcgggtgtgattcacacctggcacaacatactagaattcacactggagagaaaccgtgcaagtgtgatgagtgtgacagagccttcagtggtcagtcaacacttattcaccatcaagcaatccatgtcatagggaaactttactaatgtaatgattgtcacaaagtcctcagtaatgctacaaccattgcaaattattggagaatgcataatgaagtgagaacttacaagtgttataaatgtggcaaatttttcagacttcgttcataccttgcagtttatcagcgaactcatactggagagaaaccttacaaatgtgatgattgtggcaaggtcttcagtcaagcttcatcttatgcaaaacacaggtgaattcatacaagaaagaaacctcacaagggtgatgattgtgtcaaagcctttatttcaggttcatgcctcattacacatcagagaatccatactagacagagatcttacaaaagtcatatgtgtggcaagatctttagtctgaggtcactccttgcaggacatcaggaaattcatttttgaggtaataatttcaaatgcaatgagtatagcaaaccatcaagcacaattgatgttagattcaaatcagcattgagttcagtttgagttgacttaacattgagttcaagtatttgttgagattaaagtgtttatgttaagaggattaggccaggtgcggtggctcacacctgtaatcccagcactttgggaggccaagacaggtagatcacttgagatcaggagtttgagagcagcctggccaacagaggtgagcacctttcccagtctgttttttgtttcttcaacaaaaactgatagagatttttatgggtattgtgttgaatcaaaatcacattgggttatgtaatcatttaacagtattaatttttccaaaacatcaatatgggttatatctttatatatgtttttaatcattttgatcaatgtttgtagatttcaatgtatgaatttctcacttctttccatttattcctatttcttactttaagttctctagcaaatggaagtgtttttaaattttcatttaaaattgtttattgttaatgtatgaaaattcaacgaatttttggtgctgatattgtattgtgcaaatctactgatgtgtttattagtcacagtagtattttggttgactctttgtgattttctacacagaagatcatgtcatctacaaaaaatataattttactttttctgattttgaggcatttcatttcttttgctagttcattgctctggctaggacttccagtatttattgaatagaaaaagtgagaacgttcttgcatcatgtgagatcctacgggaaaaggattctattttccctgcttggttatctccacattggtcatttcatcaatggtctttctattggtgaggtaaatttccttctccatctattttgtttaagatttctatgatgatcagatgctgaattttgtgaaatgatttttctccatctgttgagatgatgtggttttcatctttcattctgttcaagtggtatatcacattgatttgcttgaatatgttgaaccatccttgcatgccagaagtaaatggcacttgcatatctacaatccttttatatatcctcttgaatacagttttctagtacaagtggtcttcaagaagctcatggaaaaatacatattatggaaaaattgtgcatgaatttcacagtttttgcaccaaaataaactgatacaaatctgttataacatgtctgaacaggctctagtttgaggcactgagaaggataagacatgagtttgaaaagagactgtatcaaaggaatacaaattctgctaaaattgaaacaagaagaaacataaaatttatgatgagaacagttgcagtgtctcaggtctgtaattccagtaatttcagaggccaagacaggtgggtcacgtgagcccaggcattcaggaccagcctgggcaacatggtgaaaaccccttctatacaaaaaatacagaaattcactgggcagggtggcacctgactgcagggccagctactgtggagtctgtagcatgaggatggcatgagcctgggaggtcgaggctgcagtgagctgtgatcttgccactgcactccagcatgtctcaaaaaaagaatacttatggtaaagtttgggtagatgaattatgatatcattgatgctttatgaaaaggttatggggacgatgcccaaaagaaatcaacagtttgtaaatggataactaattttgagttgggagaagacaatgttgaaggttacacgtggagcagcaggcagaccatccacatcagtttcagagaaaaacaataatcttgtttgtgccgtgatgaagaggactgacagctaacagcagaaacaatagtcaggaggttgagaacaggctggttaacatggtgaaatgccatctctattaaaaaaaaaaaaaaa

SEQ ID NO: 315 - DNA, 744 bp, Homo sapiens
atgaatccactcctgatccttgcctttgtgggagctgctgttgctgtcccctttgatgatgatgacaagattgttgggggctacacctgtgaggagaattctgtcccctaccaggtgtccttgaattctggctcccacttctgtggtggctccctcatcagcgaacagtgggtggtgtcagcaggtcactgctacaagccccacatccaggtgagactgggagagcacaatatcgaagtcctggaggggaatgagcagttcatcaatgcagccaagatcatccgccaccccaaatacaacaggattactctgaacaatgacatcatgctgatcaagctctccacacctgccgtcatcaatgcccatgtgtccacgatctctctgcccactgcccctccagctgctggcaccgagtgccttatctccggctggggcaataccctgagctcaggggccgactacccagatgagctgcagtgcctggacgctcctgtgctgacccaggctaagtgtaaagcctcctaccctttaaagattaccagcaagatgttctgtgtgggcttccttgagggaggcaaggattcctgccagggtgactctggtggccctgtggtctgcaatggacagcttcaaggaattgtctcctggggctatggctgtgcccagaagagaaggcctggagtctacaccaaggtctacaactatgtggactggattaaggacaccatagctgccaacagctaa

SEQ ID NO: 316 - DNA, 4831 bp, Homo sapiens
agcacatcgctgcgggctcacaaagcggccagacgctcggcggcggcgtgtggcaggagcgcaggggcgcgagccggcgatcagccttcccggcgaccgtgccgcgggagctcgagcaactcggactaggggacccgggccggcccccaagagatgccggcgatcgcggtgttggcggcggccgccgcggcgtggtgcttcctccaagtcgagagccggcacctggacgcgctcgccggaggcgcgggccccaaccacggcaatttcctagacaatgaccagtggctgagcaccgtctcccagtacgaccgggacaagtactggaaccgctttcgagacgatgattatttcagaaactggaatcccaacaagccctttgaccaagagccctggacccatccaaggacccctgcctgaaggtaaaatgcagccctcacaaagtgtgtgtgacccaggactaccagaccgccctgtgtgtcagccgcaagcacctgctccccaggcaaaagaaggggaacgtggcccagaaacactgggttggaccttcgaatttggtcaagtgcaagccctgtcccgtggcacagtcagccatggtctgcggctcagatggccactcctacacatccaagtgcaaattggagttccatgcttgttctactggcaaaagcctcgccaccctctgtgatgggccctgtccctgtctcccagagcctgagccaccaaagcacaaggcagaaaggagtgcctgcacagacaaggagttgcggaaccttgcctcccggctgaaggattggtttggagctctccacgaggatgcgaacagagtcatcaagcccaccagctccaacacagcccaaggcaggtttgacactagcatcctgcccatctgcaaggactccctgggctggatgttcaacaagttggacatgaactatgacctcctgcttgacccttcagagatcaatgccatctacctggataagtacgagccctgtatcaagcctcttttcaactcgtgtgactccttcaaggatggcaagctttctaacaatgagtggtgctactgcttccagaagcctggaggtctcccttgccagaatgaaatgaacagaattcagaagctgagtaaggggaaaagcctgttgggggccttcatacctcggtgtaatgaggagggctattacaaagccacacagtgccacggcagcacggggcagtgctggtgtgtggacaaatatgggaatgagttggctggctccaggaaacagggtgctgtgagctgtgaagaggagcaggaaacctcaggggattttggcagtggtgggtccgtggtcctgctggatgacctagaatatgaacgggagctgggaccaaaggacaaagaggggaagctgagggtgcacacccgagccgtgacagaggatgatgaggatgaggatgatgacaaagaggatgaggtcgggtacatatggtagtgcccacaagaaagaggacacaagttttgcacaaaattgcaagtcacttcctattcctgcatttgtatctaagactccaaggcaccaaggtctcttctccattgttgctctctatacccgacctaaggtttggaagacaactgcttgttcccagaggattctgattttgcatatgtttgtatgggagaaagggtgttgtgttttttttttgttgttgtttattttttggatagggaagtcattggcttaattagagcctccttcctttctgtgagatttttccaacaagcatgtgatttacgtggaattctgacagtgcagggagccccaaccctcttaaatgtcaaagaccctttttgattacccacactggtggttattacagcatggttcccagccttacagtgtctaagtgcttctcttgtgtcctgtagatgttgtgaaaaagaaaaaaacaaaaaatacaccacactgtactttttccccctgcccccgttactgccggtgattattattaaaaattagtttttttcacatcattatatctggcttcctataaacaacagccttaattcagtcaagactccctttggggaattcattttattaaaaattggtgtctggatacttccctgtacatgcataaatatgcatgcatgtacagaaagactgtatgtgtgtgccttgcacacacacccatacctctcagaaaaagtgtttgggtatcttaaaaactcgaaaaacaatgataaatttctcagcttgtccagacctggaacaaaatttctggaataagaaatttgtattaaagtccttttttgcactaacagttggctcttgtagcctgcaggctgaggaagtctcttctctgtgcatcagcagagttactgaaagcctctgattgagaaaaaacctccgtctgcctaaatcacttttctcgcagaagccatgcgactcccacacgacacgggcagcttcacaagccatctctttcatttctgcttgaagccccttggctgcagcaatcctgtctgccataggtttcttccttccttacctactcaagggctttttctaaggcatgcacacatatctcctgttctctgagagtaccatggtgttccttaaaagaagaaaatttctaattctgaactcaatgttttgcttttactccctttctactgacaaatcatgataagggcacaaaagctgtacagatttttttttttaaccactcaatcccaaatggaggcctacaaagaacatcgtaataacacatggaagcaaaccctgggtttttaagagcaaattctgtccccccctcactcccccaagtgacaagatactaatgaagaaagttcttcaccatagtgtttgttttaactaaactcattggagtctagttccaaatttggtagggtcatcatctctacattccttaggatttctctccctatcaagctggcccagatacaagtaccaaacagtagtctctgaagttcccccatttccttcagtaccagtctataagctactgtccgccactgattttcatttatcagggtgtcctaatcagaatcagccacccaagcaagcctctctggcccacatatctatctcttgccttcccccatgaacttcagcctgtccacacaaaagccacataaactcaagcaagaaatatgttcagccaaaacatgattatagtggcagctgaccaatcccccatcccaaattgaccatttagatgtaccaactcaccttaaattagcatgttccaatccagtcggcattgcctgaatacagtagcatcatacctatagttggtcttagataagaaatgaactacttgatatagcaaagtcctttggcttcgtaaataaccctgaggttttgtacttactttccccataggaagacagaccataggcaaactctgttttgggatctcaactccatcacctttgtttcaatattttttttctctcttgaacaaaactgagataatttagaaaacaggtgcttaattgcaataaaattactatgaagtatattaaaaatcacgacattgtaaaatctcactttagatcatcaaagaaaaccattgttactatctcctttgagcttaggaaaatgtacaagagaacaaattaaaattgaaaaattgatttcacttagaaaaacttctaggaacagggtgaaccactgattttaatttgcctaattatcttatgacaagtatcaaattaagatgacacttaaagatccttagcattaacttaatgatggagaagagtgctcaatagacagttcccagtaaggtaatgagatgccattttcagagacattctaagaagatattttgattcattaaaacattaaataaaaagccctcctcagattggaacccccaaatcgatggagccacattaataatacttttcatgcctcactttgacatgacagcattcgatttttttaaagatctttaatactttccatgagtactaaagattgtaatgagttaccttatccttagaagtagaatgtttgctttcttcttcttggaaatagtcctccaaaaagtccacttgtaccagtgacaagaagtcacttgtatagtgaccaagtacacataaaatactgattataaaaatattgtaataaaccacttcctcatttgatacaggtattaagctgaatcctcactaattcacttttgaaaagttcttaatgaacagttttattcttattccatgaacagctcttttaatacaatttccttggtatccaacttaaatcccagaattttgttccaccatggttagttatttgccatatgaatgtattcttgtttctaccaatattctaggcatgagaataccttaatactgagttggagattttgtatctgtttctcctcctttacgcccattttcctacccacagcagcaaatgacaacgtgtctgtccaggtctgtccccctgctcatcccaggatgccactcacatttttttcttcttgttaccttgaccacgctgtacagtaacatccaagagcccattctacagtgggtggttttggtctttttataactttttctcaaagtcactgatgtttgttcctgttaaatgtatagcattgtaatgagagcccatcaaatcctgagtgtcagtttgttgtccctattgtagatgaaatagtgatgtagcaaaaacctagtaaattctgaatgcttttccacgtagacttatctggaatgtgaacacaactctttggttaatagtaaatgcttaactgtagtcctgagtaggtgcatttctgtctgtctcaataaattttactttgtctgcaa

SEQ ID NO: 317 - DNA, 8231 bp, Homo sapiens
cccggaagtgggccagaggtacggtccgctcccacctggggcgagtgcgcgcacggccaggttgggtaccgggtgcgcccaggaacccgcgcgaggcgaagtcgctgagactctgcctgcttctcacccagctgcctcggcgctgccccggtcgctcgccgcccctccctttgcccttcacggcgcccggccctccttgggctgcggcttctgtgcgaggctgggcagccagcccttccccttctgtttctccccgtcccctccccccgaccgtagcaccagagtcgcgggtcctgcagtgccccagaagccgcacgtataactccctcggcctgtctacggcagctattccagaggcaacaactgcttccctctgttctcatctccccattggtggctggcgacccgaatttgggaatggggagattgcccacctgttatctttgagcagactaatctcttgtaagcagaagtgccattcggagtctccagagccctgtggcttggggctgggaatgtccccctgacttcaggctttcctaagtgtattgcttttctctgagaatggtctaggtttttaattttttaattgtaagaatctgtaatacagcatttttatttcggtcttattcgttgtgctcaaaggcaggaaacaactattaatttgccttctcgaatcttaatagttataagattcattctctttcattgctctgctaggcataaaacacacttcgaacatgggtaactcattcgactgtggagttcttttaattcttatgaaagatttcaaatcctctagaagccaaaatgggacacagtaaacagattcgaattttacttctgaacgaaatggagaaactggaaaagaccctcttcagacttgaacaagaaactgggtctcactatgttgcccaggttgatattgaactcctggactcaagcaaccctccctctttggcctctgaaagtactgggattacaagcataagccaccgggcatggccccaattctgagcattaatttatttattgtgtataagaatttgcacatcccaagttgctatgtgaataggaatgcgtttccaggggaaggagaaagagacattacagagcagacagctctatgatgtttactatacttgctaaaatgtgaaattcagctaaattggaatacaaagtagtgccaaaacagcattaggtttgcggagttattttaaacataattgaaaaatcaaggttttttaatactttaaataaaacatctgtttttcaatgtggtaatttaagtcctacgatgagtttattaacatgtgctttttatttagggtatgagctacagttccgattaggcccaactttacagggaaaagcagttaccgtgtatacaaattacccatttcctggagaaacatttaatagagaaaaattccgttctctggattgggaaaatccaacagaaagagaagatgattctgataaatactgtaaacttaatctgcaacaatctggttcatttcagtattatttccttcaaggaaatgagaaaagtggtggaggttacatagttgtggaccccattttacgtgttggtgctgataatcatgtgctacccttggactgtgttactcttcagacatttttagctaagtgtttgggaccttttgatgaatgggaaagcagacttagggttgcaaaagaatcaggctacaacatgattcattttaccccattgcagactcttggactatctaggtcatgctactcccttgccaatcagttagaattaaatcctgacttttcaagacctaatagaaagtatacctggaatgatgttggacagctagtggaaaaattaaaaaaggaatggaatgttatttgtattactgatgttgtctacaatcatactgctgctaatagtaaatggatccaggaacatccagaatgtgcctataatcttgtgaattctccacacttaaaacctgcctgggtcttagacagagcactttggcgtttctcctgtgatgttgcagaagggaaatacaaagaaaagggaatacctgctttgattgaaaatgatcaccatatgaattccatccgaaaaataatttgggaggatatttttccaaagcttaaactctgggaatttttccaagtagatgtcaacaaagcggttgagcaatttagaagacttcttacacaagaaaataggcgagtaaccaagtctgatccaaaccaacaccttacgattattcaagatcctgaatacagacggtttggctgtactgtagatatgaacattgcactaacgactttcataccacatgacaaggggccagcagcaattgaagaatgctgtaattggtttcataaaagaatggaggaattaaattcagagaagcatcgactcattaactatcatcaggaacaggcagttaattgccttttgggaaatgtgttttatgaacgactggctggccatggtccaaaactaggacctgtcactagaaagcatcctttagttaccaggtattttactttcccatttgaagagatagacttctccatggaagaatctatgattcatctgccaaataaagcttgttttctgatggcacacaatggatgggtaatgggagatgatcctcttcgaaactttgctgaaccgggttcagaagtttacctaaggagagaacttatttgctggggagacagtgttaaattacgctatgggaataaaccagaggactgtccttatctctgggcacacatgaaaaaatacactgaaataactgcaacttatttccagggagtacgtcttgataactgccactcaacacctcttcacgtagctgagtacatgttggatgctgctaggaatttgcaacccaatttatatgtagtagctgaactgttcacaggaagtgaagatctggacaatgtctttgttactagactgggcattagttccttaataagagaggcaatgagtgcatataatagtcatgaagagggcagattagtttaccgatatggaggagaacctgttggatcctttgttcagccctgtttgaggcctttaatgccagctattgcacatgccctgtttatggatattacgcatgataatgagtgtcctattgtgcatagatcagcgtatgatgctcttccaagtactacaattgtttctatggcatgttgtgctagtggaagtacaagaggctatgatgaattagtgcctcatcagatttcagtggtttctgaagaacggttttacactaagtggaatcctgaagcattgccttcaaacacaggtgaagttaatttccaaagcggcattattgcagccaggtgtgctatcagtaaacttcatcaggagcttggagccaagggttttattcagaaataattaaatttgtgtatgtggatcaagttgatgaagacatagtggcagtaacaagacactcacctagcatccatcagtctgttgtggctgtatctagaactgctttcaggaatcccaagacttcattttacagcaaggaagtgcctcaaatgtgcatccctggcaaaattgaagaagtagttcttgaagctagaactattgagagaaacacgaaaccttataggaaggatgagaattcaatcaatggaacaccagatatcacagtagaaattagagaacatattcagcttaatgaaagtaaaattgttaaacaagctggagttgccacaaaagggcccaatgaatatattcaagaaatagaatttgaaaacttgtctccaggaagtgttattatattcagagttagtcttgatccacatgcacaagtcgctgttggaattcttcgaaatcatctgacacaattcagtcctcactttaaatctggcagcctagctgttgacaatgcagatcctatattaaaaattccttttgcttctcttgcctccagattaactttggctgagctaaatcagatcctttaccgatgtgaatcagaagaaaaggaagatggtggagggtgctatgacataccaaactggtcagcccttaaatatgcaggtcttcaaggtttaatgtctgtattggcagaaataagaccaaagaatgacttggggcatcctttttgtaataatttgagatctggagattggatgattgactatgtcagtaaccggcttatttcacgatcaggaactattgctgaagttggtaaatggttgcaggctatgttcttctacctgaagcagatcccacgttaccttatcccatgttactttgatgctatattaattggtgcatataccactcttctggatacagcatggaagcagatgtcaagctttgttcagaatggttcaacctttgtgaaacacctttcattgggttcagttcaactgtgtggagtaggaaaattcccttccctgccaattctttcacctgccctaatggatgtaccttataggttaaatgagatcacaaaagaaaaggagcaatgttgtgtttctctagctgcaggcttacctcatttttcttctggtattttccgctgctggggaagggatacttttattgcacttagaggtatactgctgattactggacgctatgtagaagccaggaatattattttagcatttgcgggtaccctgaggcatggtctcattcctaatctactgggtgaaggaatttatgccagatacaattgtcgggatgctgtgtggtggtggctgcagtgtatccaggattactgtaaaatggttccaaatggtctagacattctcaagtgcccagtttccagaatgtatcctacagatgattctgctcctttgcctgctggcacactggatcagccattgtttgaagtcatacaggaagcaatgcaaaaacacatgcagggcatacagttccgagaaaggaatgctggtccccagatagatcgaaacatgaaggacgaaggttttaatataactgcaggagttgatgaagaaacaggatttgtttatggaggaaatcgtttcaattgtggcacatggatggataaaatgggagaaagtgacagagctagaaacagaggaatcccagccacaccaagagatgggtctgctgtggaaattgtgggcctgagtaaatctgctgttcgctggttgctggaattatccaaaaaaaatattttcccttatcatgaagtcacagtaaaaagacatggaaaggctataaaggtctcatatgatgagtggaacagaaaaatacaagacaactttgaaaagctatttcatgtttccgaagacccttcagatttaaatgaaaagcatccaaatctggttcacaaacgtggcatatacaaagatagttatggagcttcaagtccttggtgtgactatcagctcaggcctaattttaccatagcaatggttgtggcccctgagctctttactacagaaaaagcatggaaagctttggagattgcagaaaaaaaattgcttggtccccttggcatgaaaactttagatccagatgatatggtttactgtggaatttatgacaatgcattagacaatgacaactacaatcttgctaaaggtttcaattatcaccaaggacctgagtggctgtggcctattgggtattttcttcgtgcaaaattatatttttccagattgatgggcccggagactactgcaaagactatagttttggttaaaaatgttctttcccgacattatgttcatcttgagagatccccttggaaaggacttccagaactgaccaatgagaatgcccagtactgtcctttcagctgtgaaacacaagcctggtcaattgctactattcttgagacactttatgatttatagtttattacagatattaagtatgcaattacttgtattataggatgcaaggtcatcatatgtaaatgccttatatgcacaggctcaagttgttttaaaaatctcatttattataatattgatgctcaattaggtaagattgtaaaagcattgattttttttaatgtacagaggtagatttcaatttgaatcagaaagaaatatcattaccaatgaaatgtgtttgagttcagtaagaattattcaaatgcctagaaatccatagtttggaaaagaaaaatcatgtcatcttctatttgtacagaaatgaaaataaaatatgaaaataatgaaagaaatgaaaagatagcttttaattgtggtatatataatcttcagtaacaatacatactgaatacgctgtggttcattaatattaacaccacgtactatagtattcttaatacagtgctcactgcatttaataaatatttaataaatgatgaatgatagaagtttccatctacaatatatgttcctaaatggagcacagatgttcaaactatgctttcattttttcactgatatattaatttttgtgtaatgaatgccaacagtatattttatatgatttacttatgtgaggaaacatgcaaagcattaggaaatttatttcctaaaaacagttttgtaaaattagtattgagttctattgagtattataagatagcttacattttcaaaatggaaattgtcggtcatatttctagaactttaaagaaaaaagaatgttatattagttttctaaaactcaactatctttagtcatgttcaaaaatctattgctagatcatagtagatactggttttctattaactcaaaacctacattgacaagtttaacattgagaagaatcttaacaaaaatatggatatgaattcagtagatatcttaaattcaataaaatcactggaagtttttcatgataacttattttaagatgccttaaaaatcttaaagtcacaaaaggaaaaaggtttttaacatttacatgagttaacattttttcatagaacttatttcctagatagaattttttactgttttttactgttttcttaagaaaacagttaaatcattatgcattcagttggaagaaagtagtggcaagaattctttcattgctatataatattcagtggctcatttatacctaataaaataatggtattttaaaataatgctactttcaaagtagcatttttttagttagtttacaggttacatacccaaaaccttaactatgactaagaaattaaagaagaaaaccagcaaactaaaacttctgggcagcaaaaatatataaatgcttcagatgtcaaatacccatgcttgaaagctcgtgtaatttactttaagattatctgcctgctcttcttcaaagctgaccttgctttagaaatagttttaactagcttagttttctggtttccaaaactaaaatagattaaatcctacaaatttaaggacagttgtgacagtaatctgaccactatctataaatacattggacattggtttccaaatctccctttcttcttcagttccttccttgttcaatatatacccttctctaaactgtgcgggtaaaaggaatgactgtccttgagagaaccattagtttatcaaaggtttatgtagttttgttgctgtaccctaactttgatattcagggaggtaggaaaggtaacagaaaaccagcatatttaatcaaagcaagaagtaatcgctgacagttaaatgtgaccaaaaaaattaaaagttcacaatttttttaatgtagccatttggggttatctctagtaaggcagatacccacgttggtaaatttttaggatattgtgttgcactagaaaactaagtggttcatatttctaatgaggaagattaatgaaagaacattgttatattctgcgtggtatattttaaagtttaagaaggcatgttaaacattatttcctctatggtagttaaaatacagaattagatttttaacaggtgtcatttgactaaacgtttcggtagaatgcttcatacttgagtgatgctggataaggtattgtatttcaacaatggactatgccttggtttttcactaatcaaaatcaaaattactctttaacatgataaatgaatttaccagtttagtatgctgtggtattttaataagttttcaaagataattgggaaaacatgagactggtcatattgatgaatattgtaacatgtgaattgtgatccatttctgatatgtcttgaactactgtgtctagtgggcaaatgtcattgttacctctgtgtgttaagaaaataaaaatattttctaaaggtctgt

SEQ ID NO: 318 - DNA, 492 bp, Homo sapiens
atccctgactcggggtcgcctttggagcagagaggaggcaatggccaccatggagaacaaggtgatctgcgccctggtcctggtgtccatgctggccctcggcaccctggccgaggcccagacagagacgtgtacagtggccccccgtgaaagacagaattgtggttttcctggtgtcacgccctcccagtgtgcaaataagggctgctgtttcgacgacaccgttcgtggggtcccctggtgcttctatcctaataccatcgacgtccctccagaagaggagtgtgaattttagacacttctgcagggatctgcctgcatcctgacgcggtgccgtccccagcacggtgattagtcccagagctcggctgccacctccaccggacacctcagacacgcttctgcagctgtgcctcggctcacaacacagattgactgctctgactttgactactcaaaattggcctaaaaattaaaagagatcgatattaa

SEQ ID NO: 319 - DNA, 3917 bp, Homo sapiens
gtactttagccttccaggcttagggactcaggctgcccagacctgaagcggtgtgcggccatggaccgcggagctgccgcagcccagggcactgccccgcctcaggatggagagcagcccgctgagtctccagagcctccgccgccttggccgccgccgccaccaccaccggctccgccgccggctccgccgctgctctccgaggcttcgccagaacccataccagagccctgtccagagcttgctccaggtccctgtccagaggcgacctcagaatcagccacagaactgtacacagaaccgaccccagaaccagccacagagccggcctcagaaccggccccagaacctgccacagagccggccccagaacctgccacagagccggccccagaaccggccccagaacctgccacagagtctgccccagagccgactccagaacctgccctagagtcggtcccagagccggccccagagctgactccagaagttgccccagagctggccccagagccgaccccagaacctgtgacagagctggccccagagttctgccctgaggcggctccagagttccgtccaagtccagcaccatgtctattgcaatgtccggtggacactcgagagagaggtctaaagacctcgccatcgccatcgccatcgccatcgcccagaacgccaatgtcgtggtccagaataaagaaaatattgaaggaaggacctatgctgaagaactgtaactctttcaagagatggaagcttagatattttctggttcaaggacagaagctctactttgcacaccatcccgcgtttgcacactttgaaacgattgatctgtctcaagccactgtggcagaaagcagctgtagaaacctttgccacagtttttgtgttattacaccacaacgaaaaatcactctggctgcacccaaccggaaagacatggaagaatggattaacatcataaaaaccatccaacagggagaaatttataagatacctgcagcagaaaacaacccttttcttgttggaatgcattgttggtactccagttacagccaccggacccagcactgcaatgtttgtcgagagagcattcctgccttatctagagatgccatcatctgtgaagtgtgcaaagtgaaatctcacagattgtgtgctttgagagcaagcaaagactgcaagtggaatacattgtctatcactgatgacctccttctgcctgcagatgaagtaaacatgccccatcaatgggtagaaggaaacatgcctgtcagctctcagtgtgcagtgtgtcatgagagctgtggcagttatcaaagacttcaagacttccgctgcctgtggtgtaattctacggtgcatgatgactgtaggagacggttttccaaggaatgttgcttcagaagccatcgctcatcagtcattcctcccactgctctaagcgaccccaaaggcgatggccaattagtagtatcttcagacttctggaatcttgattggtcatcagcctgttcatgtcccttgctcatcttcatcaactccaaaagtggcgatcatcaggggatcgtcttcctccgaaaattcaagcaataccttaacccatctcaagtgttcgacttattgaagggtggacctgaagcagggctgtctatgttcaagaactttgctcgctttcgcattctggtttgtggtggagatggcagcgtgagctgggtcttatctctgattgatgcctttggattacatgaaaagtgtcagttggcagtcatcccacttggaaccggcaatgatctggctcgtgttctgggctggggtgcattctggaacaaaagcaagtcacctctggacatcctcaacagagtggagcaggctagtgtgaggatcctagacagatggagtgtgatgattcgtgagactcccagacaaaccccgctgctaaaaggacaggttgaaatggatgtaccacgatttgaggctgctgccatccaacacttagaatctgcagccaccgagttgaacaaaatcctgaaggccaagtaccccacagagatgatcatcgcaaccagattcttgtgttcagctgtggaagattttgtggttgatattgtaaaggcctggggtcagataaaacagaacaacactgcaatagtgtctgtgattttgaaaagtgacttaatgtatgataggctcagtgtcctgatcgatgtcctggctgaggaggcagcagctacttctgctgaaaaaagtgctacagaatatgcagacagcagcaaggcagataggaagcccttcattcctcaaatagaccacatagccaagtgcaagttggagctggctacaaaggcccagagtctccagaaatccttgaaactcatcatatttcaagttgaacaagctctggatgaggaaagcagacagacaatatctgttaagaactttagttcaactttcttcctggaagatgacccagaagatattaaccagacaagcccacgacgccgttctcgtcgtggcactttgtcttctatatcttctctcaaaagtgaggacctggacaaccttaacttggatcacttacattttacacctgaatctatacgcttcaaagaaaaatgtgtcatgaacaactacttcggaattggactggatgctaaaatttctctggacttcaacaccagaagagatgaacacccagggcaatacaatagccgccttaagaacaagatgtggtatggccttctgggaaccaaagaacttttgcagcgctcttacaggaaactggaagaacgagtgcatttggagtgtgatggagaaaccatctccttgccaaacctgcaaggcattgtagtgctcaacattaccagctatgctggaggtatcaacttctggggaagcaacacagcaaccacggaatatgaggctcctgcaatcgatgatgggaaactggaggtggtggcaatctttggttctgtgcagatggcaatgtcccgtatcatcaacctgcatcatcatcgcattgcccagtgccatgaggtgatgataaccattgatggtgaagaaggtatcccagtgcaggtggatggggaggcctggattcagagaccaggcttatcaaaattagatacaagaacgctgcccagatgctgacaagagatcgggactttgagaactcaatgaaaatgtgggaatacaagcatactgaaattcaagctgcccctcaaccccagctggacttccaggactctcaagagagcctctctgacgaggagtatgcccagatgcagcacttagctcggcttgcagaaaacctcatcagcaaacttaatgacctgagcaagatccaccagcatgtgtctgtcctcatgggttctgtgaatgccagcgctaacatcctgaatgatatattttacggccaagacagtggcaatgagatgggtgcagcttcctgtattcccattgaaactctaagcagaaatgatgccgtagatgttacatttagtcttaaaggtctctacgatgacaccacagctttcctggatgaaaagctgctgagaagtgctgaggatgagactgcactacaaagcgccctggatgccatgaataaggagttcaaaaagctatctgagattgactggatgaatccaatctttgttccagaggaaaaatcttcggacactgacagtagaagcctcaggctgaaaattaagttccccaaattgggaaagaaaaaggtagaagaggaacgcaagcctaaatcaggccagagtgtccagagttttattggcaatttatggcaccgcagacatcgtgaagatgaagcagagggtgatgatcctctaacaccatcgagatctcaactgtagcccttgaaagctggaagaactcacaacattgagaattctact

SEQ ID NO: 320 - DNA, 4673 bp, Homo sapiens
atgtcgcggaggaagcaagcgaagcctcaacatttccaatccgaccccgaagtggcctcgctcccccggcgagatggagacacagaaaagggtcaaccgagtcgccctactaagagcaaggatgcccacgtctgtggccggtgctgtgccgagttctttgaattatcagatcttctgctccacaagaagaactgtactaaaaatcaattagttttaatcgtaaatgaaaatccagcctccccacccgaaaccttctcccccagcccccctcctgataatcctgatgaacaaatgaatgacacagttaacaaaacagatcaagtggactgcagcgacctttcagaacacaacggacttgacagggaagagtccatggaggtggaggccccggttgctaacaaaagcggcagcggcacttccagcggcagccacagcagtaccgccccaagcagcagcagcagcagcagcagcagcagcggcggcggcggcagctcctccacaggtacctcagcgatcacaacctctctacctcaactcggggacctgacaacactgggcaacttctccgtaatcaacagcaacgtcatcatcgagaacctccagagcaccaaggtggcggtggcccagttctcccaggaagcgaggtgcggcggggcctctgggggcaagctggccgtcccagccctcatggaacaactcctagctctgcagcagcagcagatccaccagctgcaattgatcgaacagattcgtcaccaaatattgctgttggcttctcagaatgcagacttgccaacatcttctagtccttctcaaggtactttacgaacatctgccaaccccttgtccacgctaagttcccatttatctcagcagctggcagcagcagctggattggcacagagcctcgccagccaatctgccagcattagtggtgtgaaacagctacccccaatccagctacctcagagcagttctggcaacaccatcattccatccaacagcggctcttctcccaatatgaacatattggcagcggcagttaccaccccgtcctctgaaaaagtggcttcaagtgctggggcctcccatgtcagcaacccagcggtctcatcatcgtcctcaccagcttttgcaataagcagtttattaagtcctgcgtctaatccacttctacctcagcaagcctccgctaactcggttttccccagccctttgcccaacatcggaacaactgcagaggatttaaactccttgtctgccttggcccagcaaagaaaaagcaagccaccaaatgtcactgcctttgaagcgaaaagtacttccgatgaggcattcttcaaacacaagtgcaggttctgcgcgaaggtctttgggagtgacagtgccttgcagatccacttgcgttcccataccggagagaggccattcaagtgcaacatctgcgggaacaggttctccaccaaggggaatctgaaagtccactttcagcgccacaaagagaaataccctcatatccagatgaacccctatcctgtgcctgagcatttggacaatatccccacgagtactggcatcccatatggcatgtccatccctccagagaagccagtcaccagctggctagacaccaaaccagtcctgcctactctgaccacttcagtcggcctgccgttgcccccaaccctcccaagcctcatacccttcatcaagacggaagagccagcccccatccccatcagccattctgccaccagccccccaggctcagtcaaaagtgactccgggggccctgagtcagccacaagaaacctaggtgggctcccagaggaagccgaagggtccactctgccaccctctggtggcaaaagcgaagagagtggcatggtcaccaactcagtcccgacggcgagcagtagcgtcctgagctccccagcggcagactgcggccccgcgggcagtgccaccaccttcaccaaccctttgttgccgctcatgtccgagcagttcaaggccaagtttccttttgggggactcctggactcagctcaggcatcagagacgtccaagcttcagcaactggtagaaaacattgacaagaaggccactgaccccaatgagtgcatcatctgccaccgggttctcagctgccagagcgccttgaaaatgcactacaggacacacactggggagaggccctttaagtgtaagatctgtggccgggctttcaccacgaaagggaatcttaaaacccactacagtgtccatcgtgctatgcccccgctcagagtccagcattcctgccccatctgccagaagaagttcacgaacgctgtggtcctgcagcagcacatccgaatgcatatgggaggccagatccccaacaccccagtccccgacagctactctgagtccatggagtctgacacaggttcctttgatgagaaaaattttgatgacctagacaacttctctgatgaaaacatggaagactgtcctgagggcagcatccctgatacacctaagtctgcagacgcctcccaagacagcttatcctcttcgcctttgcccctcgagatgtcgagcatcgctgctttggaaaatcagatgaagatgatcaatgctggcctggcagagcagctacaggccagcctgaagtcagtggagaatgggtccatcgagggggatgtcctgaccaatgattcatcctcagtgggtggtgacatggaaagccaaagtgctggcagcccagccatctcagagtctacctcttccatgcaggctctgtccccgtccaacagcacgcaggagttccacaagtcacccagcattgaggagaaaccacagagagcggtcccaagcgagtttgccaatggtttgtctcccaccccagtgaatggtggggctttggatttgacatctagtcacgcagagaaaatcatcaaagaagattctttggggatcctcttcccttttagagaccggggtaaatttaaaaacactgcttgtgacatttgtggcaaaacatttgcttgtcagagtgccttggacattcactatagaagtcataccaaagagagaccatttatttgcacagtttgcaatcgtggcttttccacaaagggtaatttgaagcagcacatgttgacacatcagatgcgagatctgccatcccagctctttgagcccagttccaaccttggccccaatcagaactcagcggtgattcccgccaactcgttgtcatctctcatcaagacagaggtcaacggcttcgtgcatgtttctcctcaggacagtaaggacacccccaccagtcacgtcccgtctgggcctctgtcttcctctgccacatccccagttctgctccctgctctgcccaggagaactcccaagcagcactactgcaacacatgtggcaaaaccttctcctcatcgagtgccctgcagattcacgagagaactcacactggagagaaaccctttgcttgcactatttgtggaagagctttcacgactaaaggcaatcttaaggtacgtacacatgggcactcacatgtggaatagcacccctgcacgacggggtcggcggctctctgtggatggccccatgacatttctaggaggcaatcccgtcaagttcccagaaatgttccagaaggatttggcggcaagatcaggaagtggggatccttccagcttctggaatcagtatgcagcagcgctctccaacgggctggcgatgaaggccaacgagatctccgtcattcagaacggtggcatccctccaattcctggaagcctcggcagtgggaacagctcacctgttagtgggctgacgggaaacctggagaggctccagaactcagagcccaatgctcccctggccggcctggagaaaatggcaagcagtgagaacggaaccaacttccgcttcacccgcttcgtggaggacagcaaggagatcgtcacgagttaaagcagctcgggctggagacatagcattcattcctgttcagaatgcgacctatggtggcctcctactccttgccccccaccccgccccgccccttccttctgttccccagatctatgaactacaacattatgaagacattcttttgtaccttgttcaactttagagttctaagaaagcttatttattagcgatataaccttgctttgcaaacagaatgcaagcgttaactttggtcttctgtattttggactaaatactaattgactagagtgctgtaaacttgctgtaacatttatggcaattgcaagttgccctgctaggcagttgtaatctggcattaacttattttctatatccagtttaatatgaatctggtgttgatgcaatgcctcagtgatgcattagatctctaataaagtctgtatatacatgtacactttgatcctgctggaaaattttatcagcaaacacattgtctaatctttcaaaacagatttaaggaaaggactgaaagtacagactgaacagtgtggttctttgaaaggtttggttttttaatttttattctaaaattcaacctttttttttgtcgatttaaccatttccattttgaactgctatttgtattgtgctttttacttgagtcgtcttcaatgttaataagtttctgtacagtaataagcacgcagaattc

SEQ ID NO: 321 - DNA, 4979 bp, Homo sapiens
ggggctgtctgggctcggggcgcggcggcagtcagctctatgttcgcggtcttaacctctcctctggccgagtccttgcaagaagtgaattacccgaccctgcaaaacacttactattttggagtttaaagtatgtcatcatggcaaagtttcggagaaggacttgcatcattttggcactttttattctatttattttctctctgatgatgggtttaaaaatgctgagaccaaatacagctacttttggagctccttttggacttgaccttcttccagaacttcatcaacgaactattcatttggggaaaaattttgatttccaaaagagtgacagaatcaacagtgaaacaaataccaagaatttaaaaagtgttgaaatcactatgaaaccttccaaagcctctgaacttaacttggatgaactaccacctctgaacaattatctacatgtattttattacagttggtatggaaatccacaatttgatggtaaatatatacattggaatcatccagtgttagagcattgggaccctagaatagccaagaattatccacaagggagacacaaccctccagatgacattggctccagcttttatcctgaattgggaagttacagttctcgggatccttctgtcatagaaactcacatgagacaaatgcgctcagcttcaattggtaattattgtatatatatatatgtgtgtttgtgtctgtatatatgcatataaatgattttttgtgtaactttactagttaattttctcattattattaattatattgttaagctcatacctccaaattaaactgtatgtatgatcttaaacatccaggcaaccacattttaacactgcccttagtgtatattgtttaatttttacattttggagcatttctggatatattgttgatttctaatttaattcactttctcaattttattaaattatgatttacataaaatacaatgaatttcccactttaagtttatagctcattgatgttactcaaaagtatatacctgtttgaataccaccccaatcaagaagtaaaatatttctatagcccaaaaagtgtactagccctctcttggtacccacctgatgtaaatgatgaaaatggagaacctactgataacttggtacccactattttggataaagctcataaatataacctaaaggttacttttcacatagaaccatatagcaatcgagatgatcaaaacatgtacaaaaatgtcaagtatattatagacaaatatggaaatcatccggccttttacaggtacaagacgaagactggcaatgctcttcctatgttttatgtctatgattcctatattaccaagcctgaaaaatgggccaatctgttaaccacctcagggtctcggagtattcgcaattctccttatgatggactgtttattgcccttctggtagaagaaaaacataagtatgatattcttcaaagtggttttgatggaatttacacatattttgccacaaatggctttacttatggctcatcacatcagaattgggctagcctaaaattattttgtgataaatacaacttaatatttatcccaagtgtgggcccaggatacatagataccagcatccgtccatggaacacgcaaaacactcggaaccgaatcaatgggaagtattatgaaattggtctgagtgccgcacttcagacacgccccagcttaatttctatcacctcttttaatgagtggcatgaaggaactcagattgaaaaagctgttcccaaaagaaccagtaatacagtgtacctagattaccgtcctcataaaccaggtctttacctagaactgactcgcaagtggtctgaaaaatacagtaaggaaagagcaacttatgcattagatcgccagctgcctgtttcttaatgcattgattaaagtttaatagttatcaaaatcacctaatttttaaaaatagctttcgttttgagttctggaaagaaaactgtcaaaatcagtatatactattagttatatttaaaaatatttttttaaattctttacagataatattatacttgttacccttcacaataccacatgagaaaatatctgagacaaaatgtatacaaatatattccttatggcataatttattgcatttctgactgaaatcaaaattctgatttgatggcaattgaattttcattttacaatagataaatgcttgtgctacctaaagcacttagcacacagttaaattatatttacatcctagacccaaataaataggattgtgtgtatatttgggatatctattgaagaaaaaaagaaaaccccttaaagataatgtacatgcttcatgtcatgtctttaaaataatttaatcaactttattgtcttagtatttagactctggataactctacaataatgaggaaattcttaagaataacaaaatcactgtaccttcctctcaattttgctgtgaacctgaaatggctttaaattaatactcttattttttatttaatttaattacataaattaaaccttaccatgaccaaattgtgttaggacggcctgctatctacagcacagtgtgtcatttgcagatttgtggttacctataccacgctaggtgttttgacatgtttagtgtttctgctttacagtgctgaattccatattttagaagctatgaaagtccttttatgaaaaagttactgattgcttctcagttattaggaaaacagttgtttcacaattattatgtagatatgatgcccaaatatcatttttagtatatcttgtcgatctttaagttgttactattgtgttattcatgtctttaaatcagataccaaatattttttaggaaagaaaaatgttattactgtcattaggttgtcttttaatactttaagttattttgacgaaaagtaatagagaaaatttacttagcattttagattctagagacatggaaatgaaaattattttatgtctagagtaggtcctgaagtttggctttacattaagtttagcactgtatcagaatgaagaaactaatattttacataaaaactaatactttcaattttttatatagtaatatccccattttgtaaatgttagacttttatcatacctgtaagttaaaatacttgttatcaataacttgtcatgttgtgacaaattgatcacttgtgtacgaaaaataaatctccttaaaaactaaataaaatgcactgtattcttacagttaatgtttataactatagtaaaaaattaatatatatcctattacataaatgttatttcttaggtgttccattaagaagagcaatagaataatgctaaaaaataatgcctataaatcttcagagtataaagacatccattcagaaacaaaaattagcactaaattttttataaaatagaccagatgacaaaatttattttatttttaaacagtggttttgacacaaattatgttattgaaaagcattattaatgtttaatttatttaaaattttggaatttgccatttctcagagaatgatcaggccttaggaaattaatacagtagtagtaatcattttctaggggaaaataaaagaataaatcactatactgatattttgatacaagcaagcacttacatggtaatcactatatagatccaacctgtggattttcttcttatgtccatttaactagaatatattattttaggtataatttacaaatgtcacacctaataatcttttataatataccatatttcattaaagttttgttagagaagtatctaccacagaggagtttttgtcattgtgtacgttgtgtatttgaacccaccatgacagaaagtaaattttaggaaatagttatgagattaagggaaaatctataaaaacaaggttagcatattctcaacacagataccaccactttctttttcccattatagacatggtgaatccacacagcatacttcatctctgagctttgttgtgattcctcaacacattaccctaaccagccagcagtaacagatttcagagtaagataaagcagattctgtcttcattgcaaaaagttattctcaatggaagaatggcatctgatctcataattactagtttatattaatatagtttttttctccctttttaataaaataattacagtcatccctcagtgtctgtgggggattggttccagttacccctatagataccaaaatctgcagatgctcaagtccctgatataaactggcatagtagttgcatataatctatgcacatcctcctgtatacattaagtcatctctagattatttataacacttaatacaatgtaaatgctatgtagttgttataccatactggttagtgaataattacatgaaaaaaaagagtctgtacatcttcagagtttcagtcggcaatttcttggccatggatgtagaacctacagataaggtgagccaactgcattaggaaataactctaataattctgttaattcttagagaggaaaactttcaaaatcttcctcaggtatttattacaactgcctttaccattttagttgtaacacagtttaaattgttatgataacaagtaaataagagcaaagaatgtatttcttaattcaaaactatacgtttgaattcaatatggtataacttaaagtggtataatacatacaatgcatgaatcataatggattcttttataagttattaatttttatggtttaatcagtctaattgttttgactgttatagaaaccaaatattttactgtttcttttaaggactaatattgtcaaaaactgctgttattaacttcacttgagttgtttaacttccttctgttttaagattgtaattaaaaattactattttgttatatggaatggttaatttttacctaataaaaacatagatgaaatacattgtatttta

SEQ ID NO: 322 - DNA, 5186 bp, Homo sapiens
cgctcgcggctctgggggctcggctttgccgcgctcgctgcacttgggcgagagctggaacgtggaccagagctcggatcccatcgcagctaccgcgatgagaggcgctcgcggcgcctgggattttctctgcgttctgctcctactgcttcgcgtccagacaggctcttctcaaccatctgtgagtccaggggaaccgtctccaccatccatccatccaggaaaatcagacttaatagtccgcgtgggcgacgagattaggctgttatgcactgatccgggctttgtcaaatggacttttgagatcctggatgaaacgaatgagaataagcagaatgaatggatcacggaaaaggcagaagccaccaacaccggcaaatacacgtgcaccaacaaacacggcttaagcaattccatttatgtgtttgttagagatcctgccaagcttttccttgttgaccgctccttgtatgggaaagaagacaacgacacgctggtccgctgtcctctcacagacccagaagtgaccaattattccctcaaggggtgccaggggaagcctcttcccaaggacttgaggtttattcctgaccccaaggcgggcatcatgatcaaaagtgtgaaacgcgcctaccatcggctctgtctgcattgttctgtggaccaggagggcaagtcagtgctgtcggaaaaattcatcctgaaagtgaggccagccttcaaagctgtgcctgttgtgtctgtgtccaaagcaagctatcttcttagggaaggggaagaattcacagtgacgtgcacaataaaagatgtgtctagttctgtgtactcaacgtggaaaagagaaaacagtcagactaaactacaggagaaatataatagctggcatcacggtgacttcaattatgaacgtcaggcaacgttgactatcagttcagcgagagttaatgattctggagtgttcatgtgttatgccaataatacttttggatcagcaaatgtcacaacaaccttggaagtagtagataaaggattcattaatatcttccccatgataaacactacagtatttgtaaacgatggagaaaatgtagatttgattgttgaatatgaagcattccccaaacctgaacaccagcagtggatctatatgaacagaaccttcactgataaatgggaagattatcccaagtctgagaatgaaagtaatatcagatacgtaagtgaacttcatctaacgagattaaaaggcaccgaaggaggcacttacacattcctagtgtccaattctgacgtcaatgctgccatagcatttaatgtttatgtgaatacaaaaccagaaatcctgacttacgacaggctcgtgaatggcatgctccaatgtgtggcagcaggattcccagagcccacaatagattggtatttttgtccaggaactgagcagagatgctctgcttctgtactgccagtggatgtgcagacactaaactcatctgggccaccgtttggaaagctagtggttcagagttctatagattctagtgcattcaagcacaatggcacggttgaatgtaaggcttacaacgatgtgggcaagacttctgcctattttaactttgcatttaaaggtaacaacaaagagcaaatccatccccacaccctgttcactcctttgctgattggtttcgtaatcgtagctggcatgatgtgcattattgtgatgattctgacctacaaatatttacagaaacccatgtatgaagtacagtggaaggttgttgaggagataaatggaaacaattatgtttacatagacccaacacaacttccttatgatcacaaatgggagtttcccagaaacaggctgagttttgggaaaaccctgggtgctggagctttcgggaaggttgttgaggcaactgcttatggcttaattaagtcagatgcggccatgactgtcgctgtaaagatgctcaagccgagtgcccatttgacagaacgggaagccctcatgtctgaactcaaagtcctgagttaccttggtaatcacatgaatattgtgaatctacttggagcctgcaccattggagggcccaccctggtcattacagaatattgttgctatggtgatcttttgaattttttgagaagaaaacgtgattcatttatttgttcaaagcaggaagatcatgcagaagctgcactttataagaatcttctgcattcaaaggagtcttcctgcagcgatagtactaatgagtacatggacatgaaacctggagtttcttatgttgtcccaaccaaggccgacaaaaggagatctgtgagaataggctcatacatagaaagagatgtgactcccgccatcatggaggatgacgagttggccctagacttagaagacttgctgagcttttcttaccaggtggcaaagggcatggctttcctcgcctccaagaattgtattcacagagacttggcagccagaaatatcctccttactcatggtcggatcacaaagatttgtgattttggtctagccagagacatcaagaatgattctaattatgtggttaaaggaaacgctcgactacctgtgaagtggatggcacctgaaagcattttcaactgtgtatacacgtttgaaagtgacgtctggtcctatgggatttttctttgggagctgttctctttaggaagcagcccctatcctggaatgccggtcgattctaagttctacaagatgatcaaggaaggcttccggatgctcagccctgaacacgcacctgctgaaatgtatgacataatgaagacttgctgggatgcagatcccctaaaaagaccaacattcaagcaaattgttcagctaattgagaagcagatttcagagagcaccaatcatatttactccaacttagcaaactgcagccccaaccgacagaagcccgtggtagaccattctgtgcggatcaattctgtcggcagcaccgcttcctcctcccagcctctgcttgtgcacgacgatgtctgagcagaatcagtgtttgggtcacccctccaggaatgatctcttcttttggcttccatgatggttattttcttttctttcaacttgcatccaactccaggatagtgggcaccccactgcaatcctgtctttctgagcacactttagtggccgatgatttttgtcatcagccaccatcctattgcaaaggttccaactgtatatattcccaatagcaacgtagcttctaccatgaacagaaaacattctgatttggaaaaagagagggaggtatggactgggggccagagtcctttccaaggcttctccaattctgcccaaaaatatggttgatagtttacctgaataaatggtagtaatcacagttggccttcagaaccatccatagtagtatgatgatacaagattagaagctgaaaacctaagtcctttatgtggaaaacagaacatcattagaacaaaggacagagtatgaacacctgggcttaagaaatctagtatttcatgctgggaatgagacataggccatgaaaaaaatgatccccaagtgtgaacaaaagatgctcttctgtggaccactgcatgagcttttatactaccgacctggtttttaaatagagtttgctattagagcattgaattggagagaaggcctccctagccagcacttgtatatacgcatctataaattgtccgtgttcatacatttgaggggaaaacaccataaggtttcgtttctgtatacaaccctggcattatgtccactgtgtatagaagtagattaagagccatataagtttgaaggaaacagttaataccattttttaaggaaacaatataaccacaaagcacagtttgaacaaaatctcctcttttagctgatgaacttattctgtagattctgtggaacaagcctatcagcttcagaatggcattgtactcaatggatttgatgctgtttgacaaagttactgattcactgcatggctcccacaggagtgggaaaacactgccatcttagtttggattcttatgtagcaggaaataaagtataggtttagcctccttcgcaggcatgtcctggacaccgggccagtatctatatatgtgtatgtacgtttgtatgtgtgtagacaaatatttggaggggtatttttgccctgagtccaagagggtcctttagtacctgaaaagtaacttggctttcattattagtactgctcttgtttcttttcacatagctgtctagagtagcttaccagaagcttccatagtggtgcagaggaagtggaaggcatcagtccctatgtatttgcagttcacctgcacttaaggcactctgttatttagactcatcttactgtacctgttccttagaccttccataatgctactgtctcactgaaacatttaaattttaccctttagactgtagcctggatattattcttgtagtttacctctttaaaaacaaaacaaaacaaaacaaaaaactccccttcctcactgcccaatataaaaggcaaatgtgtacatggcagagtttgtgtgttgtcttgaaagattcaggtatgttgcctttatggtttcccccttctacatttcttagactacatttagagaactgtggccgttatctggaagtaaccatttgcactggagttctatgctctcgcacctttccaaagttaacagattttggggttgtgttgtcacccaagagattgttgtttgccatactttgtctgaaaaattcctttgtgtttctattgacttcaatgatagtaagaaaagtggttgttagttatagatgtctaggtacttcaggggcacttcattgagagttttgtcttggatattcttgaaagtttatatttttataattttttcttacatcagatgtttctttgcagtggcttaatgtttgaaattattttgtggctttttttgtaaatattgaaatgtagcaataatgtcttttgaatattcccaagcccatgagtccttgaaaatattttttatatatacagtaactttatgtgtaaatacataagcggcgtaagtttaaaggatgttggtgttccacgtgttttattcctgtatgttgtccaattgttgacagttctgaagaattctaataaaatgtacatatataaatcaa

SEQ ID NO: 323 - DNA, 1464 bp, Homo sapiens
cgcccctgacaccattcctcccttcccccctccaccggccgcgggcataaaaggcgccaggtgagggcctcgccgctcctcccgcgaatcgcagcttctgagaccagggttgctccgtccgtgctccgcctcgccatgacttcctacagctatcgccagtcgtcggccacgtcgtccttcggaggcctgggcggcggctccgtgcgttttgggccgggggtcgcctttcgcgcgcccagcattcacgggggctccggcggccgcggcgtatccgtgtcctccgcccgctttgtgtcctcgtcctcctcgggggcctacggcggcggctacggcggcgtcctgaccgcgtccgacgggctgctggcgggcaacgagaagctaaccatgcagaacctcaacgaccgcctggcctcctacctggacaaggtgcgcgccctggaggcggccaacggcgagctagaggtgaagatccgcgactggtaccagaagcaggggcctgggccctcccgcgactacagccactactacacgaccatccaggacctgcgggacaagattcttggtgccaccattgagaactccaggattgtcctgcagatcgacaatgcccgtctggctgcagatgacttccgaaccaagtttgagacggaacaggctctgcgcatgagcgtggaggccgacatcaacggcctgcgcagggtgctggatgagctgaccctggccaggaccgacctggagatgcagatcgaaggcctgaaggaagagctggcctacctgaagaagaaccatgaggaggaaatcagtacgctgaggggccaagtgggaggccaggtcagtgtggaggtggattccgctccgggcaccgatctcgccaagatcctgagtgacatgcgaagccaatatgaggtcatggccgagcagaaccggaaggatgctgaagcctggttcaccagccggactgaagaattgaaccgggaggtcgctggccacacggagcagctccagatgagcaggtccgaggttactgacctgcggcgcacccttcagggtcttgagattgagctgcagtcacagctgagcatgaaagctgccttggaagacacactggcagaaacggaggcgcgctttggagcccagctggcgcatatccaggcgctgatcagcggtattgaagcccagctgggcgatgtgcgagctgatagtgagcggcagaatcaggagtaccagcggctcatggacatcaagtcgcggctggagcaggagattgccacctaccgcagcctgctcgagggacaggaagatcactacaacaatttgtctgcctccaaggtcctctgaggcagcaggctctggggcttctgctgtcctttggagggtgtcttctgggtagagggatgggaaggaagggacccttacccccggctcttctcctgacctgccaataaaaatttatggtccaaggga

SEQ ID NO: 324 - DNA, 688 bp, Homo sapiens
cagcaagctgtcctgtgagccgccagcatggatgacatctacaaggctgcggtagagcagctgacagaagagcagaaaaatgagttcaaggcagccttcgacatcttcgtgctgggcgctgaggatggctgcatcagcaccaaggagctgggcaaggtgatgaggatgctgggccagaaccccacccctgaggagctgcaggagatgatcgatgaggtggacgaggacggcagcggcacggtggactttgatgagttcctggtcatgatggttcggtgcatgaaggacgacagcaaagggaaatctgaggaggagctgtctgacctcttccgcatgtttgacaaaaatgctgatggctacatcgacctggatgagctgaagataatgctgcaggctacaggcgagaccatcacggaggacgacatcgaggagctcatgaaggacggagacaagaacaacgacggccgcatcgactatgatgagttcctggagttcatgaagggtgtggagtagatgctgaccttcacccagagctgcctatgcccagcctccaactccagctgagtcctggggttggggagggggtcggggtcccaggacctgagcctggccatgtcctcaaccccaaatcccccgactccctccccagatctgtcctgggggatgcaaataaagcctgctctcccaa

SEQ ID NO: 325 - DNA, 2086 bp, Homo sapiens
ataaatatcagagtgtgctgctgtggctttgtggagctgccagagtaaagcaaagagaaaggaagcaggcccgttggaagtggttgtgacaaccccagcaatgtggagaagcctggggcttgccctggctctctgtctcctcccatcgggaggaacagagagccaggaccaaagctccttatgtaagcaacccccagcctggagcataagagatcaagatccaatgctaaactccaatggttcagtgactgtggttgctcttcttcaagccagctgatacctgtgcatactgcaggcatctaaattagaagacctgcgagtaaaactgaagaaagaaggatattctaatatttcttatattgttgttaatcatcaaggaatctcttctcgattaaaatacacacatcttaagaataaggtttcagagcatattcctgtttatcaacaagaagaaaaccaaacagatgtctggactcttttaaatggaagcaaagatgacttcctcatatatgatagatgtggccgtcttgtatatcatcttggtttgcctttttccttcctaactttcccatatgtagaagaagccattaagattgcttactgtgaaaagaaatgtggaaactgctctctcacgactctcaaagatgaagacttttgtaaacgtgtatctttggctactgtggataaaacagttgaaactccatcgcctcattaccatcatgagcatcatcacaatcatggacatcagcaccttggcagcagtgagctttcagagaatcagcaaccaggagcaccaaatgctcctactcatcctgctcctccaggccttcatcaccaccataagcacaagggtcagcataggcagggtcacccagagaaccgagatatgccagcaagtgaagatttacaagatttacaaaagaagctctgtcgaaagagatgtataaatcaattactctgtaaattgcccacagattcagagttggctcctaggagctgatgctgccattgtcgacatctgatatttgaaaaaacagggtctgcaatcacctgacagtgtaaagaaaacctcccatctttatgtagctgacagggacttcgggcagaggagaacataactgaatcttgtcagtgacgtttgcctccagctgcctgacaaataagtcagcagcttatacccacagaagccagtgccagttgacgctgaaagaatcaggcaaaaaagtgagaatgaccttcaaactaaatatttaaaataggacatactccccaatttagtctagacacaatttcatttccagcatttttataaactaccaaattagtgaaccaaaaatagaaattagatttgtgcaaacatggagaaatctactgaattggcttccagattttaaattttatgtcatagaaatattgactcaaaccatattttttatgatggagcaactgaaaggtgattgcagcttttggttaatatgtctttttttttctttttccagtgttctatttgctttaatgagaatagaaacgtaaactatgacctaggggtttctgttggataattagcagtttagaatggaggaagaacaacaaagacatgctttccatttttttctttacttatctctcaaaacaatattactttgtcttttcaatcttctacttttaactaataaaataagtggattttgtattttaagatccagaaatacttaacacgtgaatattttgctaaaaaagcatatataactattttaaatatccatttatcttttgtatatctaagactcatcctgatttttactatcacacatgaataaagcctttgtatctttctttctctaatgttgtatcatactcttctaaaacttgagtggctgtcttaaaagatataaggggaaagataatattgtctgtctctatattgcttagtaagtatttccatagtcaatgatggtttaataggtaaaccaaaccctataaacctgacctcctttatggttaatactattaagcaagaatgcagtacagaattggatacagtacggatttgtccaaataaattcaataaaaaccttaaagctga

SEQ ID NO: 326 - DNA, 7087 bp, Homo sapiens
tgacgcccccgaacccagctgcagaagctgccgccacctccaatgcacaaggtgtctcatctgaaaagaaacctgagccccagggaggcggcgcggagcgaccctggcagagctggcgcaaacagggcgagaggtcgctgggcagcgttcgaggaccagagggagctcggccacagaagaccccagtgatctgatcccgggatcccggctccaagctctcctcgcattttacagatttcacccccgcgactatctccccaaaacggagcctttatatcaagagaaggtgcgggagctggggcaaccaggactttctcgggcacccaagatgcgctccattaggaagaggtggacgatctgcacaataagtctgctcctgatcttttataagacaaaagaaatagcaagaactgaggagcaccaggagacgcaactcatcggagatggtgaattgtctttgagtcggtcacttgtcaatagctctgataaaatcattcgaaaggctggctcttcaatcttccagcacaatgtagaaggttggaaaatcaattcctctttggtcctagagataaggaagaacatacttcgtttcttagatgcagaacgagatgtgtcagtggtcaagagcagttttaagcctggtgatgtcatacactatgtgcttgacaggcgccggacactaaacatttctcatgatctacatagcctcctacctgaagtttcaccaatgaagaatcgcaggtttaagacctgtgcagttgttggaaattctggcattctgttagacagtgaatgtggaaaggagattgacagtcacaattttgtaataaggtgagctttcttctgctttttgagattgtaagtttttcaaagatattttacttgggggtggaaaactgttagaaaattttaaagtattactaaaacctcaaacaaatatttgtctatgatatccttttctgtgcaacatttaaattacatttaccctggaatagaatattataattattgcgtagttgaaagaaaaagtgatcctgtcatagcaacaagattcacacagctttttttggtgaggtgaggggggaggcaaatggcaattttattaaatttaatattccacacaaacttttttcttagtatctcttcttcatactcattagttttgtgtgattttatttgttgtataaagattatgaatattactatggaatgatgtaatagatttatgttaatgttactttttattaataattatctaggagatagtaagaacatagtttagcaagtttatatttgatatcctgagccatatttctttaatttctctttatatgtggtatttgtgtatgttagtatatttgaattttatgtttttttaacataattaagcgtgcatgtttgtttttcattaacggttaaaagatatttgatgaattgtgtgtttgattaacctattaactgaaaaaaactcaacagtagaaatggaattataatcacatcataaatataagcagtttttaatgatcaatttttatatctgtacagtttttttggattgttttagttccttagaaaaattagctaaatgacagaaacatggatattgaaatatgaaatagtacaatataaagatagatagaaaagtatgctgagttgacatgttgaaaaacacagtctcttgaagatatactggaatacattatttttgaatattttgaatattttttgaatatttttaaataaagtcttaaaagcataaataggtaactacttttaaaaaaaaagtcatgagaaatcacactcaagcattatcaagtgaagaaaattcataatagcaaataaaactgcaaacattttaccttagtgtaatctagctcctgtggtggagtttgctgcagatgtgggaactaaatcagattttattaccatgaatccatcagttgtacaaagagcatttggaggctttcgaaatgagagtgacagagaaaaatttgtgcatagactttccatgctgaatgacagtgtcctttggattcctgctttcatggtcaaaggaggagagaagcacgtggagtgggttaatgcattaatccttaagaataaactgaaagtgcgaactgcctatccgtcattgagacttattcatgctgtcagaggttactggctgaccaacaaagttcctatcaaaagacccagcacaggtcttctcatgtatacacttgccacaagattctgtgatgaaattcacctgtatggattctggcccttccctaaggatttaaatggaaaagcggtcaaatatcattattatgatgacttaaaatataggtacttttccaatgcaagccctcacagaatgccattagaattcaaaacattaaatgtgctacataatagaggagctctaaaactgacaacaggaaagtgtgtaaagcaataaagcacattttgaaacaaacaatatgcacttcttttctgaagatgcttccgaagatttgaaaataggatccaaaacacggctgggtttcagcatccaccaatgaactgaaaggtgaataaaggacgttcatgagaaatcgactaccagctgatgaaatacctgcaaagtgctctaaaaattaaatattttgactttaagggtcctagtaagtgccacttccactaagaatacagtttgaatgtataatcagtagtgtttacaagatccaacagtgcactcatcattagttaacaaagcaaatatgttcatcactgtcaggctgcccacagcaacaccaagcatattagaagaggaaccccaggaacgcaactcagaccttgggaaattaaaccatccttgtcagcagaagccaagatggaagcagtttgagcaatgaaatccgtaagattaaacaactcaagtaaatgcttcagtcaggactctgagtctgatcatgaattttatgttttaatttatgttttttttttgtcttctggaatctcttttggtttggatattgggatgcttagaaatcctttctgagatgcatatgagtgaggaaataaactttaagtaattatttttaaagttcttatactttttaaaagctatcacacaaagacttttttttttttttttgtctcgctctgttgcccaggctggagtacagtggcgcgatctcagctcactgcaagctccgcctcccaagttcactccattctcctgcctcagcctccggagtagctgggactgcaggcgcctgccaccacgcctggctaattttttgtatttttagtggagacggattttcaccgtgttagccaggatggtctcaatctcctgacctcgtgatccacccgccttggcctcccaaagtgctgggattacaggcgtgagccaccgtgcctggccgacatttttaaaaaagttttattttgcacggctctaaacctccatgttattttccagtggtgtagaaggtaccagctaaagtgaaccactatgtaatattaggccattctaaaggaaagatgttccatgtcatcagagatggtaaaataggccgggaaaaaaaaatctttggtaccaaagattacacttgtgtttctacacagcaaaccatttttctttcatgaaaataatatattattaacatgaatatattattttgctattaatgtgaaagttgtctctaaatattttttaattttcaaactcatactttattttcatttgaaatgtttttcacaccttttgcattacataataattttgtggaagcattttgccctttagaataaatattagattgatatagctgaaatgtgacttccagttctttgatattccccttgttattcaaatagaaatatggaaatgctttatatattactgttaaatttcttagtgcagaaataacattattaatagagtattgttttcaaaacagagatgattaatttcaagaggtttaacagtgaaattgtgtcaatattttgcatttaaaatgaatttaattgaccgatattttctgtagttaaatttagtcacaatatcacatatgttcttcaagaaacacatgaaattattaataaagtaattaaaaaatttttaatgtataacagaattgaccaataggccagttttctggtaacttatgatagtagattgtttctttagaaactgggcagaagctctgcattctcacttgtactttgatttcttatttcttgggcaggcaatttgaggaaagaagaaatggcatggggaatatatatgttttgtttcttagggaaaacagtctgagaaatgaataaaaagcatgaagtacgtgtgtgtgtgtgtgtgttaccatggaaaaggatattcacagtagtacagttctcaatatttttaattagatgtcatatttttttaatatagtaaaaccttgggatatagaatattacatcttttgagaatgtatgtgtctctaagtaagtaaaatctaatgcgtataggagactgatagctaaaaatgaatggaacattaatgtacttttataattaaacctcttatctatcagaaattgtaagagaatagatacatgttttgaatgtaaagttgaaaagtctggtttacttaataaattgaaagtgatttataaaatctaaatttggactacttgcaaatgataagctattctagtagcctttagtttaaatccaacagaaatctagaagtcacaagcaaatatcttaaaggtaaaatccatctgggcactcatttaaagtatatcttaaaaaagcagcagcaaggtaccttgccatttttagcatattttcttcctttttcttttttcttttttttttttttttgagatggagtctcactctgtcacacaggctggaatgcagtgatgccatctcagctcactgcaacctccacctcctgggttcaagtgattctcgtgcctcagcctcccaagtagctggggttacaggcgcccaccaccacactcggctaattttgtgtttttagtagagacaaagtttcaccatgttggccaggctggtcttgaacttcctgacctcaggttatccacccacctcagcctcccaaagtgctgggattacaggtgtgagccaccgcagccggaccatttttagtatattttcagtaaatacatttaaacaatgttaaggccacagcacacatatctcagccattcattgttctgtgcattgatgtttatctcatagatgcattgagtagtgcctttttagctttttcacattactttgtcaccatatcctttgtgttctctaaatacattgcccacttccaaaaatgttcagcatgaaaaaaagggcttcagtgtcgattgagattgcttttgttcatctcagggatttcaatagtcaagaatgaattcagttaaaggtatttagggttcaaagaagacaaactgtacaagcccatttcattccttgttgtatacctttccatctgccctcccattttaactatctactgtggcctttttatggaaacagagcaagatcaatgaaggctaatggcaagaataagaaaaagagttgagatttaaccaatagcggagcataaaggatcatgacaaaatcaaattataaaagcatacttgaaataggtggagctttttcttttgaaaatatatattcacaattttaatattttaatttattttttactatttaaccctgtacttggcaatgctcaggcagctgattgtgaaatattcttgtcctttacagaacatggttgttattgtgctgttgacatgaatagaccatggaaacattttcatcattattattcagcctgtgctgtagttaatgttaagttgctgaaataaaaagtgagcaagtaatagattttcttggcaaatctaatgattcagcccacaggactgttgaaactactgcggaagtttttctatctgaaagaaggtgctgggcattcaaatgtgttcatgtattgtatatcatatgaattgtatatcaattactaatgggaatttctacatatatgcttacaaaagcaatttatttaagtaatgctaggggtagtgtacataccaattagttattcagctactatacagaaaaaggatgaacaaattaatttatttctaattgagccagttagacataatgcatataacgtgatatttggttcatgaaagagttgttttcatgtggttattgtagggagtatatataattgtggaaggggtatgggaagagttgtgtatagttagttgttatctctacaagtttgaaagttttcccatcaaacattatcaatataccaatgttttaaaaattgagtgagggttattatttgtatttgatgaaagaaaatccaaataaagcccacctagaaatagatattttattatatatgtgctatagatatacctatatagtacaaatagacatgtgtgatgcatatatacaatgttatatatgtgtatatgtctgtatacacactgagtctgtaatatgtatacactaaatttgtgttatgctaacatcttcagggtctgcactgtgaactcccctggagataagtaagtccactttagaataaagaagttcttttgagacttcagttactaacgtgctttaagaggtatctactttataactgaattctatgtcgttcatacgtagagttacagtaagggtctagtatgtccaaatcttaataataaagaagaaaagtaaaggcttcaagctagcaatgtattcgaattacagttttcagattgtggctccaggccttgtgtttctcatttaagtagcaccttttaataaaaaccgtttctttgtgtaggcaaaagcacaagtgtttcaaatgtaaatagcaggaaaaaaaaagagtttacagagatagcattgctgcacagaataattgctactgagtatttcttatagaatttgtggaactgaaagatgaggtttattctgtcaagttcaagttcattctgttcaacactgttttcttattgtttgtgtatagcaaccgggtattattgttttatcatttgtaaaattgtaaaataaattaatccctttttttcactg

SEQ ID NO: 327 - DNA, 5232 bp, Homo sapiens
gccgcggcggtggcggagactgtggctttaagagcgtgccgggagcccgagccccagccgggccgcgcttcgccgctgcgcaccccagcggagccaagccccacgctggccggacagggccgcctgtcgccgggctgctgagaactagccctagacctctgcgtgagggttcttctgccgaagacatcaccagtgtgtggagcctgccacacccacccgctgccaaaccacggcctttacctgtgtcttccggtgtttcccgtgcgacccatcctgtgggagtgcctcgtgggctgccccagagttcaccccacactcagcagcaccaatggtgaagatgacaagatcgaagactttccaggcatatctgccctcctgccaccggacctacagctgcattcactgcagagctcacttggccaatcatgatgaactaatttccaagtcattccaaggaagtcaaggacgagcatacctctttaactcagtagttaatgtgggctgtgggcctgcagaagagcgagtgttgctaacaggactgcatgcagtcgcagacatttactgtgaaaactgcaaaaccactctgggctggaaatacgaacatgcttttgaaagcagccagaaatataaagaaggcaaatacatcattgaactagcacacatgatcaaggacaatggctgggactgattggacagcatctacccaacccagtgtccacgtgaacgccattcaaccgaacattcttcccaagcgtgagagagtgactgacacttggttccatccatttaggggccttgccatccggggcatcctcccaccctgacgccatctttctggtgaccggcctctaaatcgctgtctctctgtctctttgctttgtatctgtttgtgagttgatcctggcttctctctctgttctagttttggctgaaaacaaaacaacaaaaggaacagatccttgaccgcatggcggcagcccaccttggtaagggccccagggcccatgcgagagctgcctgatggcctcttgtcaggagagcagtggcacgggggcgtgaggaagagggaaaggggaaactctaagggtcctggcgcggggaaggggtggaagggtggaggtaggaacaaaattgcgccgctcctggagacctgataacttaggcttgaaataattgacttgtctaaaaggacaaagagaaaaaaaaaatacctcatgactgcattctctctgactagaagcttctgttcctgacaccaaatgtgccaggttagcaaatgagcacaagatgtggccctgattctagttggtggggcaagggcctggttctcctgggctgagtgggggagtgtcctggcagcagcgagtgacctgggcagtggccaggtgggtgcgatgactctgatgcctcactcagtctctgggcaatcatcatctttgcctctagccaccgtagataaggtgtgaagggactgctgtttgcaatgggcttaccatccaaatatcccaaaggctttgaccagcaaccaagtaaaatcagtaattgaggagagcagggcacaaaggggctgcagtttgggagctcctgaagaaatggctcagatattgagtcagagaaataaaaagtaggatcagttagcaattctaactgcccttccttctgacccctcataagaggagtgtggtgagggaggggactgggtaggggtcatcccaggaggaggggtttacattggaaccagttcaggttcggtgcatctttcctcttcggttttacagtggcttccgtgggatcgtcaatttcttgttcttagagtttcgggtgtttttctccagtcttgttactgtagactgtagaaagcacgggccccaggctctgagcttagtaataacctggctggtagattcctcatgcccctaattgtcccacttaggcctgaatgtcttgcatggagagaaatctcctgtcagtgtggtccagcagcagggaggagttctgcccaaattccgatatcaccccttcccccatccaagcatccttcgattagggaagtggagagcacatccctgtaaggcccataagagaaagaggagtttgttacatttaatcaacactgtgaagtctgttctacagcaattcagccattacacagtatatgactgaaactcatttaactgggttaatttcatttcttagactgaatatattattgttaagatacgtgtgcgtgttaggtaattctcagcatctcctccaagtaggccgaccttctcggaaaattcaccctaaaagtctcacaaaagaatgagttcatggggagattctgtaaagtgatgaactgagatgaaagcagccaacagcccaggagcttttcagaatagcgtctgcagcagaaccagtttccattcagagcgcgtccttggtggaaatgcttttttgtgtgtctccacgcgctgatggtggaatgggagccccaagacgtgtgggcttagaaatcaacttttgttccccaaggcttcttgtccagatctttccagtgctttcatagccctgggagatcaagttgttctccccactttactgcaaggtagactgaagttcagaagaaatactgaatttctgctcccagaagaatagtttctctggctcacaggcccaagttctcaatgaaatcgttttttaactttcacattcctaagctggcttcccggcacagaagccatggatttcccctctctcccttccccctcctcaaggaaatagtcttcctttatggattttcattggactctttcctcagcgattgtcctggctgtttattgatagtccttcccataagaaaatggggttaaacatggggtaggtattttgtctttcaaactacaaatggaatgtggtgacataaactagacatggggtgccctcaagtttccaaggggaccaatgtgccactgttcttccttggggatgaggcctttgactgttggatggatcagagcaggctccagtcagaccctggttctgaatgttttttttttcggtgactatccagtgagccttcagtgggtgcaaggcgccatacttgctgtgagagagctgagtagagtgttggtttttccataactacagggggaaaaaaagtcattaggctttccctttgtgtcagtgaaaccaaaagtgcttcttacaacgttcgctctgttcatgggttgtctatctaacattgagcagcattggagaggccacagctgagctatggagatgctaaattaactcatggcctcagtcagttcattctttaatttcctcaccaaattattgacttagagcataaccaaagacctcattcattcaccccaggtgggttggggtaattggagtttgttggtgaagtttgggggcggggtgttgggagtagagacagggtaaggggacgtgagaaaggaaaaggcatgaagttctatacctcagccagcagctgccttcgtttggaactgaagtccagccagcagactctctagctccatctcccctgtgccaccctaggtcatatgaccttggccaccttggagtagacccagacccctcgggacccgggacattagtctcaggctgctgatggattgatttgacatgaaccaaacacagccaaactcgatacccacaagctgtcagctgaacctgactgagtgttcttcctgagttcacgaggataggctagagtgcatttttactggtggatcagtgtgtgcgaaagagatgaccctttataaagagattttcaagtggatatatataaaagaaacagttgcttgtaaaatatacttttgtaaataatatttaattttttaaataatatatttggtgctgttttctcagatcccctgagagcactttttattttccttttaaattctatggtttcctttgcatttcttgaagtatattttaagggaaacagtgatcaccaatacatgttttcagttttttttttttttaaggtctctatcactttaatctggatcaaggctttgaagcaatgcctctctgcattttttccccagtggaacagactctgcagtacattaatcaggttgagaattgaaatattttcttgcatcagtattggctagaaaagaaaataaataaaaccaagttaatttagtagtaacaacttacagtgattcttcctgttggaagaatttccaacaaatcagaatcacgtttttagttgtgcgtgtgcgcgcacacgtgtgtaaaaagcactttcgattgtgcctcctgttttctcgagtggggacactttaactacagtttacacctcgggcgcataaagtttttcttctctttctctctggttgtttctgtttctgagtggaccaacagcagaacccacgaggatttgttttgagtatggagctgttgcgggtttgctcctttttcttgctttgcgtgctcagtttttacagactgtaaaggagatgtgttgtttgtgaagatggagcagagtcaaatctgtgcttctaactgagatgagagtgtattaatcacgtatcgcagggctccagctgttttagaagccacatcatgttaaacattaactggtttggattaaaagaacattaatattataatacacatatcttagtggtaaacagctttttttttttaaggtcagattgcctcaggtttagaaagaggctgagaaatcaaatcttgaacacaatcaacttacatattttaaaggaatctgcctcaaatgagaaaatatgctagttatctagatagaggaaagagatatttacttttttaaaaattaaaatagttatgaaatctggcagaaaaggtaaagcctagaagaaactatgaaagctattctcatgttaccaaattctatctgcgcatatgtttttgtataacatttcggtgacagtgggagtcggttccctttcccaacctgcagagactatcttccaatacagaatctgtctatttatgcttgtgtttacaaactgtatttgttgggtttgggtttttgttttctttggtggcatttttcaggtcactttgcttctataacaaaggtaattgttttcaaataatttgtcttcaccttttcctgtatttgtacatagtgattcagtattagagaaaagtgcattgtttctgtcatatttccaatctgtgttggtgctcatttgagaaaataaaagttttcaaatattaactctt

SEQ ID NO: 328 - DNA, 2525 bp, Homo sapiens
agggcctgcggagaccgtccgcctggctcgcccgagctcgcccgctgtccgccagcccgcgggagggaggagagaagcgaagcgtttccgcggttggctactcagtgtcttggtctcaagttgcctcattgcggctggcgttcccaatacagacgcatcgtttcttttttaatactccctaagaaagggaataaccttcaagctggcgggagcaatggttcacataaagaaaggcgagctgacccaggaggagaaggagctactggaagtcatcgggaaaggtactgtccaagaagctggaacattattatccagcaagaatgttcgtgtcaactgtttggacgagaatggaatgactcctctaatgcatgcagcatataaaggaaaactcgatatgtgcaaattactactgcgacatggagccgatgtaaattgtcatcagcatgaacatggatacacagccctcatgtttgctgcactttctggtaataaagacatcacatgggtaatgttagaagctggtgctgagacagatgttgtcaactctgtgggaagaacagcagctcagatggcagcctttgtgggtcaacatgattgtgtgaccataatcaacaatttctttcctcgagagagactggattattacactaagccccagggactggataaagagccaaaactgcccccaaagttggcaggcccgctgcacaaaattatcaccacaacgaatcttcatcctgtcaagatcgtgatgcttgtaaatgagaatcctctgctgacagaagaagcagccctgaataaatgctacagagtgatggatttgatttgtgagaaatgtatgaagcaaagagacatgaatgaagtattggctatgaagatgcattacataagctgtatctttcagaaatgcattaacttcttaaaagatggagagaataaactggacaccttgatcaaaagcttgttaaaaggccgagcttctgatggctttccagtgtatcaagaaaagatcattagagaaagtatcagaaaatttccttactgtgaagctacactcctccagcagctggttcgaagcattgctcctgttgaaattggttctgatcccactgcattctccgtccttacccaagccatcactggccaggtgggttttgtggatgtggaattttgcactacctgtggagaaaagggagcaagtaaaagatgttcagtttgcaaaatggtaatatattgtgatcaaacctgccagaaaacacactggtttactcataagaaaatctgtaagaatctgaaggacatttacgaaaagcaacagttggaggctgccaaagaaaagagacaagaggaaaaccacggcaaacttgatgtcaattctaactgtgttaatgaagagcaaccagaggctgaagtaggtatctctcaaaaggattccaatcctgaagattccggggaaggaaagaaagaatctcttgaaagcgaagctgagttggaaggcttacaggatgctcctgcagggccacaggtgtctgaggagtaaaagccagagcaagtgccagtgtggatgatcctcaccctgcaagaagctggaaaactcctaggaatgcattgtcctcaccttgttatacctgcgtggcaccatggcaggattccacatttcatagaatacaggttttcaagcaaacccctgttgaccatgccctaatttcctattgatttctgttctataattgaatggatattcctatggaaaattttttgtttcaaaatacaggaaaaacattcctattacctttctgaggctggctttccagcaattgtttcaaaggaaaatagatccccttaaagaaaaaatacaggctttagggaacaaagggacaagcagaacaggtgtggaagagagattttcaggaagggaaaaatttatagctacagagggtagttagaaaaatcataacttatatgtgaataaaatacatataagcagcatttacggtagtggcattctacttattaagatgcaatgaaatgaagaaaggctttatgttcaaggacctttgccatagttcagctaattgtagttttatatagaaatgatcctgaacactctgaacttgacgtagtcctgcggtgatattctatctgcagtatttgtacctccagaatggcagatccctcagcaggaacaaaggcatattgacggttctctcagcgtatgcattaaaaaaggtacttcctgaaacttttgattcaataatgactaaacatactatgtacacaattactgtaaggctaattcacgtgccatactccacctgaaagcctgagttatcttgctataagcttttcatggagcacttcctttccagaaactgatttgtaactcatttagagaatgtcctggcgtcggtttttagcatatgtggtatttaaacagagctagaatgtgatgtctgaagataatgctgcatttctgggtttcttgtgtggattttaaaataaattgtgcctacaaatataaacaa

SEQ ID NO: 329 - DNA, 2995 bp, Homo sapiens
ggtcaggaaagctcaggcaagcccaccctcaggcactacagctagactccgagcttactgggcagtcatctgattcgaccaacatcagttcgcagggcttaagcccagtcccttacggcggcctggggagggaccaggcccaagtatataaagctccctgagggtccgcgttggctttgcgcctgtgagtgtgattcaagaacgtcccagtgcccttggctcctttcggagtgtgaccccgtgcttgcacgggacacgttacccagctcgggtgagaagggtatcttccgggaacctcgcctttaatagcacaacgagcgcagagtccactggatctgcgagaagaaaccgcgctaactagtttgtccctacggccgcctcgtagtcactgccgcggcgccttgagtctccgggccgccttgccatggctgcccgtggtgtcatcgctccagttggcgagagtttgcgctacgctgagtacttgcagccctcggccaaacggccagacgccgacgtcgaccagcagagactggggactggtaagaagtttgatagctgtaggactgggtgttgcagctcttgcatttgcaggtcgctacgcatttcggatctggaaacctctagaacaagttatcacagaaactgcaaagaagatttcaactcctagcttttcatcctactataaaggaggatttgaacagaaaatgagtaggcgagaagctggtcttattttaggtgtaaggtaggtgtgcagcataagtattgttttgttgtgtggccaagcttgtctttaaaaaagagaaaacgttacaataaggttatacttagacttaaaattatgagtaggtggcagaggagaaaatatcaaatttttatattttaaagcctcaaatctaaaagtatcccactcccctaaaaaaacaaaacaaaacccatctgctggcaaggctaagattagaacagctcataggagagtcatgattttgaatcacccagataaaggtggatctccttacgtagcagccaaaataaatgaagcaaaagacttgctagaaacaaccaccaaacattgatgcttaaggaccacactgaaggaaaaaaaaagaggggacttcgaaaaaaaaaaaagccctgcaaaatattctaaaacatggtcttcttaattttctatatggattgaccacagtcttatcttccaccattaagctgtataacaataaaatgttaatagtcttgctttttattatcttttaaagatctccttaaattctataactgatcttttttcttattttgtttgtgacattcatacatttttaagatttttgttatgttctgaattcccccctacacacacacacacacacacacacacacacacgtgcaaaaaatatgatcaagaatgcaattgggatttgtgagcaatgagtagacctcttattgtttatatttgtaccctcattgtcaatttttttttagggaatttgggactctgcctatataaggtgttttaaatgtcttgagaacaagcactggctgatacctcttggagatatgatctgaaatgtaatggaatttattaaatggtgtttagtaaagtaggggttaaggacttgttaaagaaccccactatctctgagaccctatagccaaagcatgaggacttggagagctactaaaatgattcaggtttacaaaatgagccctgtgaggaaaggttgagagaagtctgaggagtttgtatttaattatagtcttccagtactgtatattcattcattactcattctacaaatatttattgaccccttttgatgtgcaaggcactatcgtgcgtcccctgagagttgcaagtatgaagcagtcatggatcatgaaccaaaggaacttatatgtagaggaaggataaatcacaaatagtgaatactgttagatacagatgatatattttaaaagttcaaaggaagaaaagaatgtgttaaacactgcatgagaggaggaataagtggcatagagctaggctttagaaaagaaaaatattccgataccatatgattggtgaggtaagtgttattctgagatgagaattagcagaaatagatatatcaatcggagtgattagagtgcagggtttctggaaagcaaggtttggacagagtggtcatcaaaggccagccctgtgacttacactgcattaaattaatttcttagaacatagtccctgatcattatcactttactattccaaaggtgagagaacagattcagatagagtgccagcattgtttcccagtattcctttacaaatcttgggttcattccaggtaaactgaactactgcattgtttctatcttaaaatactttttagatatcctagatgcatctttcaacttctaacattctgtagtttaggagttctcaaccttggcattattgacatgttaggccaaataattttttttgtgggaggtctcttgtgcgttttagatgattagcaataatccctgacctgttatctactaaagactagtcgtttctcatcagttgtgacaacaaaaatggttccagatattgccaaatgccctttagaggacagtaatcgcccccagttgagaaccatttcagtaaaactttaattactattttttcttttggtttataaaataatgatcctgaattaaattgatggaaccttgaagtcgataaaatatatttcttgctttaaagtccccatacgtgtcctactaattttctcatgctttagtgttttcacttttctcctgttatccttgtacctaagaatgccatcccaatccccagatgtccacctgcccaaagtctaggcatagctgaaggccaagctaaaatgtatccctctttttctggtacatgcagcaaaagtaatatgaattatcagctttctgagagcaggcattgtatctgtcttgtttggtgttacattggcacccaataaatatttgttgagtgaatgaa

SEQ ID NO: 330 - DNA, 3411 bp, Homo sapiens
atagagctgatgtatccagaggttatgttgctagaggtgagatcagttacctacgtgcaactgaaatttcaaacttctgttcagcagggacgtgagtggacaatggtgactgatagttggaaatatcagcaaacatcttaaattttatactcaaatgaatgagcaatgaaccaggagaataggtccagttttttttggctccttgtaatttttacctttttacttaaaattacagcatctttttcaatgagtgcctatgtgactgtgacttattacaatgaaaccagcaactacactgcaatagagacatgtgaatgtggcgtttatggattagcttcaccagtggctaatgctatgggagtggtaggcatccctaagaacaataactaccaagcttgtgaccacaacactgagtttagtaatactaagaagccctggattgcgctgatagaaagaggtaattgtacattttcagaaaaaattcaaacagcgggcagaagaaatgctgatgctgttgtgatttacaatgctccagagactggcaatcagacgatacagatggcaaattttggcttcacgctaaagccccagagcccgacgcggcagccgcggtagcggagaagactggagctccgaggagctgcatctgcggcaacctgtgtgctgacgctacgtgcctcctggctccgacgtagctcgcagctccccagtctcactccattccttccccacctggcgcgcacctgctcaagaccagggtcctgccaagcgctaggagggcgcgtgccaggggcgctagggaactgcggagcgcgcgcgccatggggccgccgcctggggccggggtctcctgccgcggtggctgcggcttttccagattgctggcatggtgcttcctgctggccctgagtccgcaggcacccggttcccggggggctgaagcagtgtggaccgcgtacctcaacgtgtcctggcgggttccgcacacgggagtgaaccgtacggtgtgggagctgagcgaggagggcgtgtacggccaggactcgccgctggagcctgtggctggggtcctggtaccgcccgacgggcccggggcgcttaacgcctgtaacccgcacacgaatttcacggtgcccacggtttggggaagcaccgtgcaagtctcttggttggccctcatccaacgcggcgggggctgcaccttcgcagacaagatccatctggcttatgagagaggggcgtctggagccgtcatctttaacttccccgggacccgcaatgaggtcatccccatgtctcacccgggtgcagtagacattgttgcaatcatgatcggcaatctgaaaggcacaaaaattctgcaatctattcaaagaggcatacaagtgacaatggtcatagaagtagggaaaaaacatggcccttgggtgaatcactattcaatttttttcgtttctgtgtccttttttattattacggcggcaactgtgggctattttatcttttattctgctcgaaggctacggaatgcaagagctcaaagcaggaagcagaggcaattaaaggcagatgctaaaaaagctattggaaggcttcaactacgcacactgaaacaaggagacaaggaaattggccctgatggagatagttgtgctgtgtgcattgaattgtataaaccaaatgatttggtacgcatcttaacgtgcaaccatattttccataagacatgtgttgacccatggctgttagaacacaggacttgccccatgtgcaaatgtgacatactcaaagctttgggaattgaggtggatgttgaagatggatcagtgtctttacaagtccctgtatccaatgaaatatctaatagtgcctcctcccatgaagaggataatcgcagcgagaccgcatcatctggatatgcttcagtacagggaacagatgaaccgcctctggaggaacacgtgcagtcaacaaatgaaagtctacagctggtaaaccatgaagcaaattctgtggcagtggatgttattcctcatgttgacaacccaacctttgaagaagacgaaactcctaatcaagagactgctgttcgagaaattaaatcttaaaatctgtgtaaatagaaaacttgaaccattagtaataacagaactgccaatcagggcctagtttctattaataaattggataaatttaataaaataagagtgatactgaaagtgctcagatgactaatattatgctatagttaaatggcttaaaatatttaacctgttaacttttttccacaaactcattataatatttttcataggcaagtttcctctcagtagtgataacaacatttttagacattcaaaactgtcttcaagaagtcacgtttttcatttataacaattttcttataaaaacatgttgcttttaaaatgtggagtagctgtaatcactttattttatgatagtatcttaatgaaaaatactacttctttagcttgggctacatgtgtcagggtttttctccaggtgcttatattgatctggaattgtaatgtaaaaagcaatgcaaacttaggcgagtacttcttgaaatgtctatttaagctgctttaagttaatagaaaagattaaagcaaaatattcatttttactttttcttatttttaaaattaggctgaatgtacttcatgtgatttgtcaaccatagtttatcagagattatggacttaattgattggtatattagtgacatcaacttgacacaagattagacaaaaaattccttacaaaaatactgtgtaactatttctcaaacttgtgggatttttcaaaagctcagtatatgaatcatcatactgtttgaaattgctaatgacagagtaagtaacactaatattggtcattgatcttcgttcatgaattagtctacagaaaaaaaatgttctgtaaaattagtctgttgaaaatgttttccaaacaatgttactttgaaaattgagtttatgtttgacctaaatgggctaaaattacattagataaactaaaattctgtccgtgtaactataaattttgtgaatgcattttcctggtgtttgaaaaagaagggggggagaattccaggtgccttaatataaagtttgaagcttcatccaccaaagttaaatagagctatttaaaaatgcactttatttgtactctgtgtggcttttgttttagaattttgttcaaattatagcagaatttaggcaaaaataaaacagacatgtatttttgtttgctgaatggatgaaaccattgcattcttgtacactgatttgaaatgctgtaaatatgtcccaatttgtattgattctctttaaatataaaatgtaaataaaatattccaataaaagtttgtgtctggtgttagtttaa

SEQ ID NO: 331 - DNA, 8153 bp, Homo sapiens
cgtccctgcagccctcgcccggcgctccagtagcaggacccggtctcgggaccagccgggtaatatgcacgtgtcactagctgaggccctggaggttcggggtggaccacttcaggaggaagaaatatgggctgtattaaatcaaagtgctgaaagtctccaagaattattcagaaaagtaagcctagctgatcctgctgcccttggcttcatcatttctccatggtctctgctgttgctgccatctggtagtgtgtcatttacagatgaaaatatttccaatcaggatcttcgagcattcactgcaccagaggttcttcaaaatcagtcactaacttctctctcagatgttgaaaagatccacatttattctcttggaatgacactgtattggggggctgattatgaagtgcctcagagccaacctattaagcttggagatcatctcaacagcatactgcttggaatgtgtgaggatgttatttacgctcgagtttctgttcggactgtgctggatgcttgcagtgcccacattaggaatagcaattgtgcaccctcattttcctacgtgaaacacttggtaaaactggttctgggaaatctttctgggacagatcagctttcctgtaacagtgaacaaaagcctgatcgaagccaggctattcgagatcgattgcgaggaaaaggattaccaacaggaagaagctctacttctgatgtactagacatacaaaagcctccactctctcatcagacctttcttaacaaagggcttagtaaatctatgggatttctgtccatcaaagatacacaagatgagaattatttcaaggacattttatcagataattctggacgtgaagattctgaaaatacattctccccttaccagttcaaaactagtggcccagaaaaaaaacccatccctggcattgatgtgctttctaagaagaagatctgggcttcatccatggacttgctttgtacagctgacagagacttctcttcaggagagactgccacatatcgtcgttgtcaccctgaggcagtaacagtgcggacttcaactactcctagaaaaaaggaggcaagatactcagatggaagtatagccttggatatctttggccctcagaaaatggatccaatatatcacactcgagaattgcccacctcctcagcaatatcaagtgctttggaccgaatccgagagagacaaaagaaacttcaggttctgagggaagccatgaatgtagaagaaccagttcgaagatacaaaacttatcatggtgatgtctttagtacctccagtgaaagtccatctattatttcctctgaatcagatttcagacaagtgagaagaagtgaagcctcaaagaggtttgaatccagcagtggtctcccaggggtagatgaaaccttaagtcaaggccagtcacagagaccgagcagacaatatgaaacaccctttgaaggcaacttaattaatcaagagatcatgctaaaacggcaagaggaagaactgatgcagctacaagccaaaatggcccttagacagtctcggttgagcctatatccaggagacacaatcaaagcgtccatgcttgacatcaccagggatccgttaagagaaattgccctagaaacagccatgactcaaagaaaactgaggaatttctttggccctgagtttgtgaaaatgacaattgaaccatttatatctttggatttgccacggtctattcttactaagaaagggaagaatgaggataaccgaaggaaagtaaacataatgcttctgaacgggcaaagactggaactgacctgtgataccaaaactatatgtaaagatgtgtttgatatggttgtggcacatattggcttagtagagcatcatttgtttgctttagctaccctcaaagataatgaatatttctttgttgatcctgacttaaaattaaccaaagtggccccagagggatggaaagaagaaccaaagaaaaagaccaaagccactgttaattttactttgtttttcagaattaaattttttatggatgatgttagtctaatacaacatactctgacgtgtcatcagtattaccttcagcttcgaaaagatattttggaggaaaggatgcactgtgatgatgagacttccttattgctggcatccttggctctccaggctgagtatggagattatcaaccagaggttcatggtgtgtcttactttagaatggagcactatttgcccgccagagtgatggagaaacttgatttatcctatatcaaagaagagttacccaaattgcataatacctatgtgggagcttctgaaaaagagacagagttagaatttttaaaggtctgccaaagactgacagaatatggagttcattttcaccgagtgcaccctgagaagaagtcacaaacaggaatattgcttggagtctgttctaaaggtgtccttgtgtttgaagttcacaatggagtgcgcacattggtccttcgctttccatggagggaaaccaagaaaatatctttttctaaaaagaaaatcacattgcaaaatacatcagatggaataaaacatggcttccagacagacaacagtaagatatgccagtacctgctgcacctctgctcttaccagcataagttccagctacagatgagagcaagacagagcaaccaagatgcccaagatattgagagagcttcgtttaggagcctgaatctccaagcagagtctgttagaggatttaatatgggacgagcaatcagcactggcagtctggccagcagcaccctcaacaaacttgctgttcgacctttatcagttcaagctgagattctgaagaggctatcctgctcagagctgtcgctttaccagccattgcaaaacagttcaaaagagaagaatgacaaagcttcatgggaggaaaagcctagagagatgagtaaatcataccatgatctcagtcaggcctctctctatccacatcggaaaaatgtcattgttaacatggaacccccaccacaaaccgttgcagagttggtgggaaaaccttctcaccagatgtcaagatctgatgcagaatctttggcaggagtgacaaaacttaataattcaaagtctgttgcgagtttaaatagaagtcctgaaaggaggaaacatgaatcagactcctcatccattgaagaccctgggcaagcatatgttctaggaatgactatgcatagttctggaaactcttcatcccaagtacccttaaaagaaaatgatgtgctacacaaaagatggagcatagtatcttcaccagaaagggagatcaccttagtgaacctgaaaaaagatgcaaagtatggcttgggatttcaaattattggtggggagaagatgggaagactggacctaggcatatttatcagttcagttgcccctggaggaccagctgacttggatggatgcttgaagccaggagaccgtttgatatctgtgaatagtgtgagtctggagggagtcagccaccatgctgcaattgaaattttgcaaaatgcacctgaagatgtgacacttgttatctctcagccaaaagaaaagatatccaaagtgccttctactcctgtgcatctcaccaatgagatgaaaaactacatgaagaaatcttcctacatgcaagacagtgctatagattcttcttccaaggatcaccactggtcacgtggtaccctgaggcacatctcggagaactcctttgggccatctgggggcctgcgggaaggaagcctgagttctcaagattccaggactgagagtgccagcttgtctcaaagccaggtcaatggtttctttgccagccatttaggtgaccaaacctggcaggaatcacagcatggcagcccttccccatctgtaatatccaaagccaccgagaaagagactttcactgatagtaaccaaagcaaaactaaaaagccaggcatttctgatgtaactgattactcagaccgtggagattcagacatggatgaagccacttactccagcagtcaggatcatcaaacaccaaaacaggaatcttcctcttcagtgaatacatccaacaagatgaattttaaaactttttcttcatcacctcctaagcctggagatatctttgaggttgaactggctaaaaatgataacagcttggggataagtgtcacggtactgtttgacaagggaggtgtgaatacgagtgtcagacatggtggcatttatgtgaaagctgttattccccagggagcagcagagtctgatggtagaattcacaaaggtgatcgcgtcctagctgtcaatggagttagtctagaaggagccacccataagcaagctgtggaaacactgagaaatacaggacaggtggttcatctgttattagaaaagggacaatctccaacatctaaagaacatgtcccggtaaccccacagtgtaccctttcagatcagaatgcccaaggtcaaggcccagaaaaagtgaagaaaacaactcaggtcaaagactacagctttgtcactgaagaaaatacatttgaggtaaaattatttaaaaatagctcaggtctaggattcagtttttctcgagaagataatcttataccggagcaaattaatgccagcatagtaagggttaaaaagctctttcctggacagccagcagcagaaagtggaaaaattgatgtaggagatgttatcttgaaagtgaatggagcctctttgaaaggactatctcagcaggaagtcatatctgctctcaggggaactgctccagaagtattcttgcttctctgcagacctccacctggtgtgctaccggaaattgatactgcgcttttgaccccacttcagtctccagcacaagtacttccaaacagcagtaaagactcttctcagccatcatgtgtggagcaaagcaccagctcagatgaaaatgaaatgtcagacaaaagcaaaaaacagtgcaagtccccatccagaagagacagttacagtgacagcagtgggagtggagaagatgacttagtgacagctccagcaaacatatcaaattcgacctggagttcagctttgcatcagactctaagcaacatggtatcacaggcacagagtcatcatgaagcacccaagagtcaagaagataccatttgtaccatgttttactatcctcagaaaattcccaataaaccagagtttgaggacagtaatccttcccctctaccaccggatatggctcctgggcagagttatcaaccccaatcagaatctgcttcctctagttcgatggataagtatcatatacatcacatttctgaaccaactagacaagaaaactggacacctttgaaaaatgacttggaaaatcaccttgaagactttgaactggaagtagaactcctcattaccctaattaaatcagaaaaaggaagcctgggttttacagtaaccaaaggcaatcagagaattggttgttatgttcatgatgtcatacaggatccagccaaaagtgatggaaggctaaaacctggggaccggctcataaaggttaatgatacagatgttactaatatgactcatacagatgcagttaatctgctccgggctgcatccaaaacagtcagattagttattggacgagttctagaattacccagaataccaatgttgcctcatttgctaccggacataacactaacgtgcaacaaagaggagttgggtttttccttatgtggaggtcatgacagcctttatcaagtggtatatattagtgatattaatccaaggtccgtcgcagccattgagggtaatctccagctattagatgtcatccattatgtgaacggagtcagcacacaaggaatgaccttggaggaagttaacagagcattagacatgtcacttccttcattggtattgaaagcaacaagaaatgatcttccagtggtccccagctcaaagaggtctgctgtttcagctccaaagtcaaccaaaggcaatggttcctacagtgtggggtcttgcagccagcctgccctcactcctaatgattcattctccacggttgctggggaagaaataaatgaaatatcgtaccccaaaggaaaatgttctacttatcagataaagggatcaccaaacttgactctgcccaaagaatcttatatacaagaagatgacatttatgatgattcccaagaagctgaagttatccagtctctgctggatgttgtggatgaggaagcccagaatcttttaaacgaaaataatgcagcaggatactcctgtggtccaggtacattaaagatgaatgggaagttatcagaagagagaacagaagatacagactgcgatggttcacctttacctgagtattttactgaggccaccaaaatgaatggctgtgaagaatattgtgaagaaaaagtaaaaagtgaaagcttaattcagaagccacaagaaaagaagactgatgatgatgaaataacatggggaaatgatgagttgccaatagagagaacaaaccatgaagattctgataaaggcaagaattttaatgacaatcattcctttctgacaaacgatgagctcgctgtactccctgtcgtcaaagtgcttccctctggtaaatacacgggtgccaacttaaaatcagtcattcgagtcctgcggggtttgctagatcaaggaattccttctaaggagctggagaatcttcaagaattaaaacctttggatcagtgtctaattgggcaaactaaggaaaacagaaggaagaacagatataaaaatatacttccctatgatgctacaagagtgcctcttggagatgaaggtggctatatcaatgccagcttcattaagataccagttgggaaagaagagttcgtttacattgcctgccaaggaccactgcctacaactgttggagacttctggcagatgatttgggagcaaaaatccacagtgatagccatgatgactcaagaagtagaaggagaaaaaatcaaatgccagcgctattggcccaacatcctaggcaaaacaacaatggtcagcaacagacttcgactggctcttgtgagaatgcagcagctgaagggctttgtggtgagggcaatgacccttgaagatattcagaccagagaggtgcgccatatttctcatctgaatttcactgcctggccagaccatgatacaccttctcaaccagatgatctgcttacttttatctcctacatgagacacatccacagatcaggcccaatcattacgcactgcagtgctggcattggacgttcagggaccctgatttgcatagatgtggttctgggattaatcagtcaggatcttgattttgacatctctgatttggtgcgctgcatgagactacaaagacacggaatggttcagacagaggatcaatatattttctgctatcaagtcatcctttatgtcctgacacgtcttcaagcagaagaagagcaaaaacagcagcctcagcttctgaagtgacatgaaaagagcctctggatgcatttccatttctctccttaacctccagcagactcctgctctctatccaaaataaagatcacagagcagcaagttcatacaacatgcatgttctcctctatcttagaggggtattcttcttgaaaataaaaaatattgaaatgctgtatttttacagctactttaacctatgataattatttacaaaattttaacactaaccaaacaatgcagatcttagggatgattaaaggcagcatttgatgatagcagacattgttacaaggacatggtgagtctatttttaatgcaccaatcttgtttatagcaaaaatgttttccaatattttaataaagtagttattttataggggatacttgaaaccagtatttaagctttaaatgacagtaatattggcatagaaaaaagtagcaaatgtttactgtatcaatttctaatgtttactatatagaatttcctgtaatatatttatatactttttcatgaaaatggagttatcagttatctgtttgttactgcatcatctgtttgtaatcattatctcactttgtaaataaaaacacaccttaaaacatg

SEQ ID NO: 332 - DNA, 1536 bp, Homo sapiens
gactttgctccagcagcctgtcccagtgaggacagggacacagtactcggccacaccatggggcgcccactgcacctcgtcctgctcagtgcctccctggctggcctcctgctgctcggggaaagtctgttcatccgcagggagcaggccaacaacatcctggcgagggtcacgagggccaattcctttcttgaagagatgaagaaaggacacctcgaaagagagtgcatggaagagacctgctcatacgaagaggcccgcgaggtctttgaggacagcgacaagacgaatgaattctggaataaatacaaagatggcgaccagtgtgagaccagtccttgccagaaccagggcaaatgtaaagacggcctcggggaatacacctgcacctgtttagaaggattcgaaggcaaaaactgtgaattattcacacggaagctctgcagcctggacaacggggactgtgaccagttctgccacgaggaacagaactctgtggtgtgctcctgcgcccgcgggtacaccctggctgacaacggcaaggcctgcattcccacagggccctacccctgtgggaaacagaccctggaacgcaggaagaggtcagtggcccaggccaccagcagcagcggggaggcccctgacagcatcacatggaagccatatgatgcagccgacctggaccccaccgagaaccccttcgacctgcttgacttcaaccagacgcagcctgagaggggcgacaacaacctcaccaggatcgtgggaggccaggaatgcaaggacggggagtgtccctggcaggccctgctcatcaatgaggaaaacgagggtttctgtggtggaaccattctgagcgagttctacatcctaacggcagcccactgtctctaccaagccaagagattcaaggtgagggtaggggaccggaacacggagcaggaggagggcggtgaggcggtgcacgaggtggaggtggtcatcaagcacaaccggttcacaaaggagacctatgacttcgacatcgccgtgctccggctcaagacccccatcaccttccgcatgaacgtggcgcctgcctgcctccccgagcgtgactgggccgagtccacgctgatgacgcagaagacggggattgtgagcggcttcgggcgcacccacgagaagggccggcagtccaccaggctcaagatgctggaggtgccctacgtggaccgcaacagctgcaagctgtccagcagcttcatcatcacccagaacatgttctgtgccggctacgacaccaagcaggaggatgcctgccagggggacagcgggggcccgcacgtcacccgcttcaaggacacctacttcgtgacaggcatcgtcagctggggagagggctgtgcccgtaaggggaagtacgggatctacaccaaggtcaccgccttcctcaagtggatcgacaggtccatgaaaaccaggggcttgcccaaggccaagagccatgccccggaggtcataacgtcctctccattaaagtgagatcccactcaa

SEQ ID NO: 333 - DNA, 2918 bp, Homo sapiens
gtccacgcttcccgccggcccggcaaggggttccggagaacggcttgggggggcgagaaccatgggcgggggaaatggaagacagagggaactgaagcacgggggtcttcgatgagcagtgcggatgttcgactccaaacatcaaagccaacgagaggttcaggttactcctccttgaccccaaacatccagtgagtggagactggcctgttcacagagtaaaatatgtcgtctctaattcggcaaagacggtgatgactgtatatatgcaggccaattcccccagtcttgctgtctttcaatggggcagccactgctcagttgctgccattcagaaatatgaacccagtatcaccagaacttttgatttttcaagagaaaccaagattccagatttgtaggtgatatcttccatttttcagataaaacaaaggaaccagaaccacatccactgatcggatttgcctggggaggaggggtgctctctcctttgatcttctcttctggaagagatggaccaaaagcctctccagcaataatccgtccacttacatgcagattttcttctgcctctgccacccctgagacagcaagaccaactctcctcttcctcctcctcctcctcagcctactcactgcaagacgacgagtatgaagatctttatgatgatccacttccatgaaatgattcttgaagactatctttccagcttgtcacatatgcaaggtgtatttacaggagacagcaatggaaacctggtcagttgagcaggtctgcagttggttggtggagaaaaatttaggagagctagttcatagatttcaagaggaagaagtaagtggggccgctcttcttgcacttaatgatcggatggttcagcaactggtaaagaaaattgggcaccaggctgttctgatggatttaattaaaaaatacaagcagaacactcaaggactgaagtccccagaaaaccccaaaaaggcagccctggtcatgcaaacagaagcagctcgagattacagggatgaagagtcctccagtccagccaggcatggggagcagatgccatctttctatccagctgaaaaccttgataatggactaattgaccaaagagtattgaaacagagaagaaatgtgaaacaaattctagcaagaagcaaagcattacagtggacgaagtcctatgttttaccagagtttccctatgatgtcaaatgcatgttagcagagcagaagtgcccggatcacagcatgaggataaggatcattgagtttctccaggccgacatgactaagtatctggaaggctcactgtaccccagcacccagcagtacaatgacgtggttaatgccctgctgcaggcccaccctttcctggatgaggatggctgtggcttcgctggagtatagtggcgcgatctcagctcactgcaacctccgcctcctgggttcaagcaattctctggggcagcagttctaagctctggttgcacattaggattcctagagattcagattgaattaatttgaggatgggattattctaatgtacaaccacggctgagaaccactgccgctgacgtttcaacacaaagtttgctgtttgaacctgcctgtctcctggatttcaaagaccactgtcttcattgcacaacaatgtgaatataatcaacactattgaactgtacctaagaatagttaataaaaaactgagtgtttatttttatggaaacgagccctcaaagatcgctttaaatatgttcgaagacccatagaagatgatgagcaagtgattagaaataagtgtaaatttggacaccgaagaggccagacaaggaaatctcttgctgatataagatttgatgaaattaaacttgtccagataaaagtaagattgaattcctaaatgttctgatgacttgatagattgatatattgattaagggataataaataatagcatttaaaatagaagaagctgtttgttttgattctgagctagatgaacatattaagtggttccagcaagaatacgtgaaaacagaaaaggactggagagaaattgacaagagaatgagccaaactttggaaataagaagaaagatgattggcagccgaacacctctgaaggacattcttaaactgtttcctttcttgaagtgcccttatcagatgttcagagaattccaacttcttacaagaacagatatttataagaaaacaaggcacattttggaatcctattcagaaaatatactgacttctttttcagtggtggacaatccaatcaatattgtattgcaagaaaaaatgaaacattacacagatgaagacatgttgaaatacatgaagatgacagccacatgtttactcctcccagatgtttttggggatgatcccagcctttttgtcatcatgaatgaacaggtgcaagtgtccacacctgtgttggaagttaaaaaccctttcaacatggaggtctgcgaattttctttatatttagaaagggagaggctcacaaaggtggacgactgtgttacagccttggctgcgctagtagctgcctttcatgtatttaggattgagtgtccaagaagactgtcccaaactttcaacttcctagaaacgctgattttcgatatgcacagtccttattttccttctttgaaagaaaaggaaaacgaagtaggatttcagcacccactcacttaatagcatgccaaatattgtactggaatttacctctgggaaaactgaagcttcataagaaattgttttgatttagggttgtggtagaggtaggtatgagaaaatcatcttgtatttatagatgctaatgaatttcaatgctttctatctttacacttagatattaagttctttgtgaaattctgtaataaaattctacttcatt

SEQ ID NO: 334 - DNA, 5518 bp, Homo sapiens
gcgcggggcgggagcttggtggagcaggagcggctgggcatcctcctgagactccggggtcagacgcccactccagcgctttctgcgcagcacaggcaccctcgcctgtcacgcctccctctcctcttcccgtctcccagcgtggatgagggcgcctgcagatcccggctagggcacggaccgcctaggccgagatttctttaaagactcgtgcagcacatcattatcgctggatgcccggacatgtaatacacctgacagcatgtgaagtgctcagaatggggcaggatgtcacctggaatcagcactaagtgattcagactttccttacttttaaatgtgctgctcttcatttcaagatgccgttgcagctctgataaatgcaaactgacaaccttcaaggccacgacggagggaaaatcattggtgcttggagcatagaagactgcccttcacaaaggaaatccctgattattgtttgaaatgctgaggacgttgctgcgaaggagacttttttcttatcccaccaaatactactttatggttcttgttttatccctaatcaccttctccgttttaaggattcatcaaaagcctgaatttgtaagtgtcagacacttggagcttgctggggagaatcctagtagtgatattaattgcaccaaagttttacagggtgatgtaaatgaaatccaaaaggtaaagcttgagatcctaacagtgaaatttaaaaagcgccctcggtggacacctgacgactatataaacatgaccagtgactgttcttctttcatcaagagacgcaaatatattgtagaaccccttagtaaagaagaggcggagtttccaatagcatattctatagtggttcatcacaagattgaaatgcttgacaggctgctgagggccatctatatgcctcagaatttctattgcattcatgtggacacaaaatccgaggattcctatttagctgcagtgatgggcatcgcttcctgttttagtaatgtctttgtggccagccgattggagagtgtggtttatgcatcgtggagccgggttcaggctgacctcaactgcatgaaggatctctatgcaatgagtgcaaactggaagtacttgataaatctttgtggtatggattttcccattaaaaccaacctagaaattgtcaggaagctcaagttgttaatgggagaaaacaacctggaaacggagaggatgccatcccataaagaagaaaggtggaagaagcggtatgaggtcgttaatggaaagctgacaaacacagggactgtcaaaatgcttcctccactcgaaacacctctcttttctggcagtgcctacttcgtggtcagtagggagtatgtggggtatgtactacagaatgaaaaaatccaaaagttgatggagtgggcacaagacacatacagccctgatgagtatctctgggccaccatccaaaggattcctgaagtcccgggctcactccctgccagccataagtatgatctgtctgacatgcaagcagttgccaggtttgtcaagtggcagtactttgagggtgatgtttccaagggtgctccctacccgccctgcgatggagtccatgtgcgctcagtgtgcattttcggagctggtgacttgaactggatgctgcgcaaacaccacttgtttgccaataagtttgacgtggatgttgacctctttgccatccagtgtttggatgagcatttgagacacaaagctttggagacattaaaacactgaccattacgggcaattttatgaacaagaagaaggatacacaaaacgtacccttatctgtttccccttccttgtcagcatcgggaagatggtatgaagtcctctttggggcagggactctagtagatcttcttgtcagagaagctgcatggtttctgcagagcacagttagctagaaaggtgatagcattaaatgttcatctagagttaatagtgggaggagtaaaggtagccttgaggccagagcaggtagcaaggcattgtggaaagaggggaccagggtggctggggaagaggccgatgcataaagtcagcctgttcaaagtgctcagggacttagcaaaatgagaagatgtgacctgtgccaaaactattttgagaattttaaatgtgaccatttttctggtatgaataaacttacagcaacaaataatcaaagatacaattaatctgatattatatttgttgaaatagaaatttgattgtactataaatgatttttgtaaataatttatattctgctctaatactgtactgtgtagtgtgtctccgtatgtcatctcagggagcttaaaatgggcttgatttaacattgtttttgtgttatttttgcttgaaacaacgcacacattttcaacaaccaaaaaatgacaatttctagtttagttaatttctacaaatcatcttatgttattagcaaggttaagacatcttttttaaaaaaattatagcttctaccaagagaaacactcaatttttctagagatttgcctctatcttcctttcctcagtcttcccagactgctatcaagctgtgtaaaaatttactttcactggaccctaaattattgtctctgctatctgactgccagtaattagtgcagaaaactaagacaggatgatacaggtttgaggggctggggagtgggaggggggagaaaaggaatgtatttaaacaatttccgatgcccatgatgagtttaaaaaccagcattgacaccatccccaaaattaaggctgtcgcttattgaatccacttgtgtccaacctcccaggattgttttatcctaatgtcacctgtatattcatttgaaaggacttggccctgttcttgggtcttcccgttacctgccccctgggtggtaagtttcctcctttctcaaccttccacgaggaggaaagaagtgtgcagtcattccacatggcctgttggaaggcctggggagggaactttgggtttgggacagatttttttttttgtttttggtatcattcacagcatacgatttttactctctccatcttcaccataagacagataatttggggttgctataatgctgtcacacatctcaaagtacattcaaatcttaaaaagaaattctcgtacttttgccatgttgatactgttcagcaaacaagctaccaggaactgtgaggctttgtcatttagcattagactttaaacaagaattaaaatcatgtgctgtatttttaaaatctagccaaattaaatagtacatgagaaattcagagtattagacagttttaaggcattcaactgagaaaactttatttgtcaaagtcagaaaacattttcatcttattgagagatatgtttttaaacttttatcatcatttgtaaatgtggaagttggtggattgctgtgtttttgcatgattagcatgggagtctgttggagcaagaggaacatgcttgttttgaaaactcgagatgatgagggtggtacatgcagtgtgttctctctttattggcttctaaaccagttttgtcctttaatgcatgtcaaatatttctcccatgcttctcttagcagaaaagtttttacctataagacagggcaccttttaactctaaaactagtgatactcagtgacatagactttgtcttataaacattttttcattttttattttgaaaaattgcaaatctacagcaaaagtaaaacagtagagtgaacaccatgtaaccctcacctggtgttaacattgtaccctatttgctttaagttgtatgtatttctgaacttggcaaaattggaaattaaaatttttaaaaattacaaatatacaaagttatttatcttagcacatttattatgtgtgactgcatctgatttatatttaaattggcaggttttgagggatttttttcttcatcataaatgtaaacataggattttagagtctatttccccaagcgccacattataactgtaaacttaccatcttctatgtagctgtgatatctcatctttctaaaatggaacttgttaaaaagtgttcaaacactatccctaatgcctgcggcagaatttatatacgatccattcattggggctcaaagtatcttttagacttttaaggacaatttacagcaaatgaaatttatgatgctgtgacaagaaatttaaagaatcaaaacgatggtttgaaaaggaaacctatgatacatgcaggagaagcaaaacccaagtgattggtgagaaatatagaaattatttaaattactttatagtaattattaaacactaatttttgtactgtcattgaaggtgttttatagagaaatctgagaaatcacattcacaaattagaagtcaaacatggccaggcacagtggctcacacctgtaatcttcaggatttcaagaccagcctagccaacatgacgaaaccccatctctactgaaaatagaaaaaaaaaattagccaggcttgcacctgtaatcccagttacctgggaggctgaggcaggagaatctcttgagcccaggaggcggaggttgcagtgagctgagatgccaccaccacaccagcctgggtgacagagtgaaactcgtatctccaaacaaacaaacaaaaagtccttaaacatatgtgaacaaaaattttgtgatggaaggattctagttaatgagtattgcatcaagatttacatctttcttactaaggaaaagagttaataaaaattgttctttattttacaggcagttactgaggctcttcccagatctcagtaaacagccactcagccttgaaaatggagtgttgttgtttctaaacatatatttatgtcatttattaagtacagttcacttaaataacataagtagattttctcttgtagtgatttgggtaggaagaggccatgtttcagttcgttttctctgtagggtcgattgaattggaccttttcagttgttcagaaaaataaaaataatttctcatattaaatacagacgctcctcaacttatgatgtgggtaggtcccagtaaacccattataatttgaaaatatcacattgaaaatgcatttaatatctcttacctgaaatcataacttagccaagcctaccttaaatgttctcagaacatttagcctgcagttgggcaaaaccatttaacacaaagcctattttataatgaagtgttgaatagctcatgttatttactgaatactgttgtgaaagtgaaaaacaatgattgtatgggtactcaaagtataatttctactgaatgcatatcacttgtgcactgttgtaaagctgaaaaaccgttaagcctctacgatttttaagtaagttggggaccatcagtttaaaataaatgcaatactatttcatgataaacatggtcactgtaagttttactcttttgaatgagggtgcgacagaatgcagttagaatcagttcatatcaccattaaaatcatccattcagaaaccaa

SEQ ID NO: 335 - DNA, 3313 bp, Homo sapiens
cgcgactgcgcgcgcagggcctgagcgggcgccggagggaaggggaagcggcggggtagtaacagattatgggcaacagtccttttaattaatctaccgtcatcatggctaatgaggactgtcccaaggctgctgatagtcctttttcatcagataaacatgcccaactcatcttggcccaaatcaataagatgagaaatggacagcatttctgtgatgtgcagctgcaagttggacaggaaagttttaaagctcatcggctggttttggctgccagcagtccttactttgcagctttgttcactggaggaatgaaagagtcctcaaaagatgttgtaccgattctaggaattgaagcaggaatctttcagatacttctagatttcatttacacaggtatagtgaacataggtgtgaataatgtccaggagttgattattgcagcagacatgctacagttgactgaagttgttcatctttgctgtgaatttctgaaaggacaaattgatccactgaactgcattggaatttttcagttctctgagcaaattgcctgccatgatctcttggaattctcagaaaactacattcatgtccatttcttggaggttcatagtggagaagagttcctggcacttacgaaagatcagctgatcaaaattttgcgaagtgaagagcttagcattgaggatgaataccaggtcttcttagctgcaatgcaatggattctgaaagatttgggaaaaagaagaaaacatgtggtggaagtgctagacccaattcgattccctttattacctcctcagagacttttaaagtatatagaaggagtatccgattttaatcttcgtgttgcattgcaaacacttctgaaagagtactgtgaagtatgcaaatctcccaaagagaacaagttttgtagttttctgcagacatctaaggttcgacctcggaagaaagcaagaaagtacctgtatgcagtaggtggatatactcggttgcaggggggtcgctggagtgatagcagagccctcagctgtgtagaacgttttgacacctttagccagtactggaccactgtgtcttcacttcatcaggctcgaagtgggctgggagtaacagttctgggagggatggtctacgctattggaggtgaaaaggattcaatgatttttgattgtactgaatgctatgatccagttactaaacagtggacaactgtagcttcgatgaatcatccccgctgcggcttaggagtgtgtgtgtgttatggggctatctatgctttgggtggatgggttggagctgagatagggaacaccattgaacgatttgatcctgatgaaaataaatgggaagtagttggtaacatggctgtgtcacgctactactttgggtgctgtgaaatgcaaggtttaatttatgtaattgggggcatcagcaatgaaggaatagaacttcgttcttttgaagtctatgatccactttctaagcgttggtctccacttcctccaatgggaaccaggagagcatatcttggtgtggctgcactcaatgactgcatctattctgttggaggatggaatgagacccaagatgctcttcatactgtagaaaaatattcctttgaagaggaaaagtgggttgaagttgcctcaatgaaagtgcctagagcaggcatgtgtgttgtggcagtcaatggtcttctgtatgtttctggaggtcgatcttccagccatgattttttggctccaggtaccttggactcagttgaagtttataaccctcattcagatacatggacagaaattggtaacatgatcaccagtcgttgtgaagggggcgttgctgtgctatgaaatataaagcataacagagcacaaggaacattttgaaaatgcaggacctgaccttttgcaaagcaaacatagatttggtgataagaccctctgattctgtgagttttccatgtatttggtagataaatgactaacgaggctgggcgcagtggcctcatgcctataatcccagcactttggaaggctgaggcagaaggatcacttgagcccaggaatttgaggttgtagtaagctacgatcatgccactgcactccactctgggcaacagaatgagatcctgtctcttaaagaaaaaaaataaactcaagaatgatttttctaaaaatatgagtgagaatggatatggaatatatcccaattaataaagagctcacacagatttgccaggtttactaataatagaaatgccatttatgctgtagaattctccagtttaagtgtagacaactcctattttacaaatttgtagaaattatttactagaagcttcctggcaaatagtccctttagctacttctccagtgcagtataaattgtaacataaaactttatgtgatataggaatagtgtcaatgacacagtttaaagacctctatattcacaattatatccagagcataattttccatggccatagtttgagccacagagaaagccaatgaaatagattcctacttttatttaatgccaagagttttcactagccccaaactttttattggcagcagatatcctaggaggggtgtttgggaaatatctagctattttaatagatagatacctttttgcttgatgataagtttttgcttgctcatattttttgtcttgatcctgagaatgcaagtaaggaattaataggaggttcttagtgaccagatgttgtaatgggctatacagtccagcaggcagtatgcacctagaaatttctcccttttttaggctgggcatggtggctcacacctgtaatcccagcactttgagaggccgaggtgagacgggaagatggcttgaactcaggagttcgagactagcctgggcaacgtgatgagactccgtctctaccaaaaaatatataaaaattagccgggcgttgtggcttgtacctgtggtcccatctgcttgggaggctgaggttgcaggatcacttgagcccaggaggtcaaggctgcagtgagccaagattgtgccactgcacaccggcctgggtgacagcatgagaacctgtctcaaaaaaaaaaaaaaaaaaagaaaaaaaaaaaaaatactcacagatacgaggttttccgcttgaagtgggagaatatgtgcattcttttcaatgatcacaagactctaacaaaggggatttttaatctttaattttcaagatggttaaaatattgaaatgtttaagtggataactatattattcataaaatgactgagtgaaaactaatatactatgagatgaaaa

SEQ ID NO: 336 - DNA, 3511 bp, Homo sapiens
aaaagcagcaactagggagctggtgaagaaggatgtctcagcagtgtttactaggcctccaacactagagcccatcccccagctccgaaaagcttcctggaaatgtccttgttatcacttcccctctcgggctgggcgctgggagcgggcggtctcctccgcccccggctgttccgccgaggctcgctgggtcgctggcgccgccgcgcagcacggctcagaccgaggcgcacaggctcgcagctccgcggcgcctagcgctccggtccccgccgcgacgcgccaccgtccctgccggcgcctccgcgcgcttcgaaatgagggtcctgggtgggcgctgcggggcgctgctggcgtgtctcctcctagtgcttcccgtctcagaggcaaactccttcagttttgtcaaagcaacaggcttcacaagtcctggttaggaagcgtcgtgcaaattctttacttgaagaaaccaaacagggtaatcttgaaagagaatgcatcgaagaactgtgcaataaagaagaagccagggaggtctttgaaaatgacccggaaacggattatttttatccaaaatacttaggattatgtttgtttttattttcagtttgtcttcgctcttttcaaactgggttattcactgctgcacgtcagtcaactaatgcttatcctgacctaagaagctgtgtcaatgccattccagaccagtgtagtcctctgccatgcaatgaagatggatatatgagctgcaaagatggaaaagcttcttttacttgcacttgtaaaccaggttggcaaggagaaaagtgtgaatttgacataaatgaatgcaaagatccctcaaatataaatggaggttgcagtcaaatttgtgataatacacctggaagttaccactgttcctgtaaaaatggttttgttatgctttcaaataagaaagattgtaaagatgtggatgaatgctctttgaagccaagcatttgtggcacagctgtgtgcaagaacatcccaggagattttgaatgtgaatgccccgaaggctacagatataatctcaaatcaaagtcttgtgaagatatagatgaatgctctgagaacatgtgtgctcagctttgtgtcaattaccctggaggttacacttgctattgtgatgggaagaaaggattcaaacttgcccaagatcagaagagttgtgaggttgtttcagtgtgccttcccttgaaccttgacacaaagtatgaattactttacttggcggagcagtttgcaggggttgttttatatttaaaatttcgtttgccagaaatcagcagattttcagcagaatttgatttccggacatatgattcagaaggcgtgatactgtacgcagaatctatcgatcactcagcgtggctcctgattgcacttcgtggtggaaagattgaagttcagcttaagaatgaacatacatccaaaatcacaactggaggtgatgttattaataatggtctatggaatatggtgtctgtggaagaattagaacatagtattagcattaaaatagctaaagaagctgtgatggatataaataaacctggacccctttttaagccggaaaatggattgctggaaaccaaagtatactttgcaggattccctcggaaagtggaaagtgaactcattaaaccgattaaccctcgtctagatggatgtatacgaagctggaatttgatgaagcaaggagcttctggaataaaggaaattattcaagaaaaacaaaataagcattgcctggttactgtggagaagggctcctactatcctggttctggaattgctcaatttcacatagattataataatgtatccagtgctgagggttggcatgtaaatgtgaccttgaatattcgtccatccacgggcactggtgttatgcttgccttggtttctggtaacaacacagtgccctttgctgtgtccttggtggactccacctctgaaaaatcacaggatattctgttatctgttgaaaatactgtaatatatcggatacaggccctaagtctatgttccgatcaacaatctcatctggaatttagagtcaacagaaacaatctggagttgtcgacaccacttaaaatagaaaccatctcccatgaagaccttcaaagacaacttgccgtcttggacaaagcaatgaaagcaaaagtggccacatacctgggtggccttccagatgttccattcagtgccacaccagtgaatgccttttataatggctgcatggaagtgaatattaatggtgtacagttggatctggatgaagccatttctaaacataatgatattagagctcactcatgtccatcagtttggaaaaagacaaagaattcttaaggcatcttttctctgcttataataccttttccttgtgtgtaattatacttatgtttcaataacagctgaagggttttatttacaatgtgcagtctttgattattttgtggtcctttcctgggatttttaaaaggtcctttgtcaaggaaaaaaattctgttgtgatataaatcacagtaaagaaattcttacttctcttgctatctaagaatagtgaaaaataacaattttaaatttgaatttttttcctacaaatgacagtttcaatttttgtttgtaaaactaaattttaattttatcatcatgaactagtgtctaaatacctatgtttttttcagaaagcaaggaagtaaactcaaacaaaagtgcgtgtaattaaatactattaatcataggcagatactattttgtttatgtttttgtttttttcctgatgaaggcagaagagatggtggtctattaaatatgaattgaatggagggtcctaatgccttatttcaaaacaattcctcagggggaacagctttggcttcatctttctcttgtgtggcttcacatttaaaccagtatctttattgaattagaaaacaagtgggacatattttcctgagagcagcacaggaatcttcttcttggcagctgcagtctgtcaggatgagatatcagattaggttggataggtggggaaatctgaagtgggtacattttttaaattttgctgtgtgggtcacacaaggtctacattacaaaagacagaattcagggatggaaaggagaatgaacaaatgtgggagttcatagttttccttgaatccaacttttaattaccagagtaagttgccaaaatgtgattgttgaagtacaaaaggaactatgaaaaccagaacaaattttaacaaaaggacaaccacagagggatatagtgaatatcgtatcattgtaatcaaagaagtaaggaggtaagattgccacgtgcctgctggtactgtgatgcatttcaagtggcagttttatcacgtttgaatctaccattcatagccagatgtgtatcagatgtttcactgacagtttttaacaataaattcttttcactgtattttatatcacttataataaatcggtgtataatttt

SEQ ID NO: 337 - DNA, 5451 bp, Homo sapiens
gctgctctgcctgcatccggaggcggccgccagcggatttgccacccaggtcctaagactctcagtccagagagggccctgccccacacccagaaggaaggaatgctgcccagagatgaccagaggaatctagacagcagagcataaccttcggtggcaggacaaatcaggccagcacgcagtctgccaagtcctgctcgctccctgtcaagaaaaacagctggatccatttctaatcaacacttcccaacgcaacacttctgagtctctgaaggagaccagagcttgaaactttccagacttccaacagacatcgagtgcaaaaggatatttaggttgtctttgcacaaatctggttgatttgagagataaagggggggggaaccagtgtgactttcacctaagaagtcacatgaacatatttcacatttgaactacataatgaatgatggttattgaaatagcccaaacctctaccacagagcgagggatatagctcaaggggcaaccaggcagtcgcagaaccaaggaatggatgactacaagtatcaggacaattatgggggctatgctcccagtgatggctattaccgcggcaatgagtccaacccagaagaagatgcacagagtgatgtcaccgaaggccatgatgaggaagacgagatctatgagggcgagtaccagggtatccctcacccagatgatgtcaaggccaagcaggccaagatggcgccctccagaatggacagccttcggggccagacagacctgatggctgagaggctggaagatgaggagcagttggcccaccagtacgagaccatcatggatgagtgtggccatggccgcttccagtggatcctctttttcgtcttgggtttggccctgatggccgatggggtggaagtgttcgtggtgagttttgccctgcccagtgcagagaaggacatgtgtctgtccagttccaaaaaaggaatgctagggatgatagtctacttgggaatgatggcgggcgccttcatcctgggaggcctggctgataagctgggaaggaagcgagtcctcagcatgtctctggccgtcaatgcctccttcgcctccctctcttccttcgtgcagggatatggagccttcctcttctgccgactcatctcaggcatcggtattgggggtgctctaccgattgtttttgcctatttttctgaattcttgtctcgggagaagcgaggagaacacctcagttggctgggcatcttctggatgactgggggcctgtacgcatctgccatggcctggagcatcatcccacactatggctggggcttcagcatggggaccaattaccacttccatagctggagagtgtttgtcatcgtctgtgctctgccctgcaccgtgtccatggtggccctgaagttcatgccagagagcccaaggtttctgctagagatgggcaaacatgatgaagcctggatgattctcaagcaagtccatgacaccaacatgagagctaaggggaccccagagaaagtgttcacggtttccaacatcaaaactcccaagcaaatggatgaattcattgagatccaaagttcaacaggaacctggtaccagcgctggctggtcagattcaagaccattttcaagcaggtctgggataatgccctgtactgtgtgatggggccctacagaatgaatacactgattctggccgtggtttggtttgccatggcattcagttactatggactgacagtttggtttcctgatatgatccgctattttcaagatgaagaatacaagtctaaaatgaaggtgttttttggtgagcatgtgtacggcgccacaatcaacttcacgatggaaaatcagatccaccaacatgggaaacttgtgaatgataagttcacaagaatgtactttaaacatgtactctttgaggacacattctttgacgagtgctattttgaagacgtaacatcaacagatacctacttcaaaaattgtaccattgaatcaaccatcttttacaacacagacctctacgagcacaagttcatcaactgtcggtttatcaactccaccttcctggagcagaaggagggctgccacatggacttggagcaagataatgacttcctgatttacctcgtcagcttcctgggcagcctgtctgtcttacccgggaacatcatttctgccctgctcatggatagaattggaaggctcaagatgattggtggctccatgctaatctctgcagtctgctgcttcttcctgttttttggcaacagtgagtctgcaatgatcggctggcagtgcctgttctgtgggacaagcattgcagcctggaatgctctggatgtgatcacagtggagctgtatcccaccaaccagagagcaacagccttcggcattctcaatggattatgcaaatttggcgccatcctgggaaacaccatctttgcttcttttgttgggataaccaaagtggtccccatccttctggctgctgcttctctggttgggggtggcctgattgcccttcgactgccagagactcgagaacaggtcctgatgtgaacaacctatgggaaaaggaaaggtcgagagaatcttgtccaggacactgaaatgcatccacacttcctgcctatcacggtccggaggacaccttggatagcacgggaggagaagttgactttgtgacccctagtttaggacccacttcagctgtcaatatgtttgtaactcaggtgactgatttgggggtgccctgagccacccttagaatcacagagctgcgtgtttaacttcaagtcttcccagtccaaggcagggagaggattctccagtgagtgcacacactatgcgaggagcaagcatttctctaagtcaagtgcaaggacttaacttgcgtttgaaaaggaattagagggtcagaaacacccaggttcctccagaaagctccttggagcccaacaacttaacaaatcaacttggctggaagttagagtcattatatgaagattgggcttgaagtatatatttttgcatttaaaagtatcacctatcatattttccactcgaaaattgacatagtagcattgaggatactctgatctagaaagccaagtatttgagcaacatctatagagatctacttttctcctatgtctcctaggctttccatgataattaggtaatacatttaagaaggatatttatttctgttttgctctattcaaagaaacggaatgggatagttattctgtaaactaagtttgtatataactttatttgggtttaatttccacaactggtatctgcaaatattgccagcattttagccatattttgggagaacttggtgtttgaggtcccaggaaatgaggtctgatcaaatgaaatgcaagcacaatttcttacagccatttaactttctgttgggaggatgaattaacaaactcacattgtgcagtctgcttaatccaggcacttttctttgtgcaggtgtagtgagtagttacttctctcccttacacagatgacttgtgaaactcaagctcaccatcttcagtgctggcattttactttgccactacccaaaaacaatgtgagatgtgttcagtggcctctggtactctttgcaggcaagaatcaaacaacatggggactgagggaaggatggggaagtgtagccacagttcttccaaatgtaaatactttttgtttgttctagtggtaaaatgcaaatgcaatccatatttgttaggatggtcaggtctcatgagaaatctatgctatgtgtccagagcttttgaaacagagtccattggagtgggagttagggagtgtagtggatgccaaatatgtttttcttcagtgcttaagagaactgtttcctgaagtccagctttgaacataaacaggggtgtgggttgggggaggagcttaggacaaacctctctgatgaaggtcagcaatagactgaagtcttgactgcatggaagaggaaaaacatcagaactgtctgacaatggaggggacagtgagctacgcacaactgccagcggaggtgaacttgcacctgcccaggccggatgaacatcagcctgcaagaactagttgtttgagttgatttgcagtgctctcaatgggcaagtgccacattttccctggcagagatctccaaaaatttaaaacagaataataatggctatatcgagtgttttctcagtattggagaaatgcttaggtcctatgatagcttcgggacatctttctgtaattttcctcaattaacgggttggtaggggtaaatcttatgacacctttccaccgtcgatttgagatcagttttaatggttaaaatgtttactctccttctgtcaaccctcacctttttatttacacccctccctttttttctgtacagggagagaagacatattgactctgactggacaccctgattcctccaaatatatataccactgtgtattaatctttctctcagtgttttataggagtactaacatttattgctctgtcaataatgaaaggctcgatgtaatatagctgtaatttactttccatatgaatacagtggctaggttcataaaagagaattgtgtgagtctgggattaccacatctaaaacattattctttaatgggataatacaattcattgagcagctaccacttaaaaaacttgcaggacagttagagcctgcatttctagttaagatggatcttgtaaatttaaaattggattaacattggagtgctggggtggctgcaataatttgggggctaactccatttggtttccaagatctcacttctgcattatctttatggctctttaaaccagccacctagccaatcaagggcaattcccatctcatccatcactcaggtctttgtaaagggtgcagccaagctctgcagacttttgcaggattgtctagcctgagtaccgggctacttcttaaatgccgtcactcctgctgagataaatgcgtctttaaaaatagtctctgtggcaggtcactgggggacaatgtacagcattctggccatccacttctttttcacttcatgttctaccccaagagactcccgatgtcggctgtggagggttaaagggatgaggctttcctttgtttagcaaatctgttcacagttcttgatgatgtattttatgatgcccagcttggaaatagttgctttccatagtctcaactgtattgtgtcatctcctgatgctgatttttgatcttttgttttattaaaaataattagtgaaagaggtgtgcctatctgtgaagtttgtagtacatcatcctgaggtcatgtaacaagtaaaccccaacccagcgttccctcctacgttgtgttagttcattaaaactaaataataaaaataactgtaagaaaaccttaa

SEQ ID NO: 338 - DNA, 4060 bp, Homo sapiens
acaccgccctcccgccagactcccggcggctcctcctccctctcccaaacccactcccaaagctaagtgcaggcttccccgttccagccagaagcgctgcgtgagcctccacacgtagccgcaggcagctccttaaatagcgtccgcgctgagcaaacagtccagacgtggggcccaggagggcgagctgaggcgaccgcaccgggcgcgcagcggcggcgggtcagccggcggccaatagccagggcgcggcccgccccgtcgcctcccctcggggagcctataaggcctccgcagcgccccgggcgcctgctgctccgtgcctccaccgacgacctcactcagctgcgttacgcgccgctccggctgccggccgcgcgccttgcccgccggctcccgcccgcaatcggcggctcagggcggacccgggtctctgcgttctcgcgagaagcgcggcgctgcggggccgtgggcgcctgagcccgcgcggccctcgagggccgaatatggggggatgcacggtgaagcctcagctgctgctcctggcgctcgtcctccacccctggaatccctgtctgggtgcggactcggagaagccctcgagcatccccacagataaattattagtcataactgtagcaacaaaagaaagtgatggattccatcgatttatgcagtcagccaaatatttcaattatactgtgaaggtccttggtcaaggagaagaatggagaggtggtgatggaattaatagtattggagggggccagaaagtgagattaatgaaagaagtcatggaacactatgctgatcaagatgatctggttgtcatgtttactgaatgctttgatgtcatatttgctggtggtccagaagaagttctaaaaaaattccaaaaggcaaaccacaaagtggtctttgcagcagatggaattttgtggccagataaaagactagcagacaagtatcctgttgtgcacattgggaaacgctatctgaattcaggaggatttattggctatgctccatatgtcaaccgtatagttcaacaatggaatctccaggataatgatgatgatcagctcttttacactaaagtttacattgatccactgaaaagggaagctattaacatcacattggatcacaaatgcaaaattttccagaccttaaatggagctgtagatgaagttgttttaaaatttgaaaatggcaaagccagagctaagaatacattttatgaaacattaccagtggcaattaatggaaatggacccaccaagattctcctgaattattttggaaactatgtacccaattcatggacacaggataatggctgcactctttgtgaattcgatacagtcgacttgtctgcagtagatgtccatccaaacgtatcaataggtgtttttattgagcaaccaaccccttttctacctcggtttctggacatattgttgacactggattacccaaaagaagcacttaaactttttattcataacaaagaagtttatcatgaaaaggacatcaaggtattttttgataaagctaagcatgaaatcaaaactataaaaatagtaggaccagaagaaaatctaagtcaagcggaagccagaaacatgggaatggacttttgccgtcaggatgaaaagtgtgattattactttagtgtggatgcagatgttgttttgacaaatccaaggactttaaaaattttgattgaacaaaacagaaagatcattgctcctcttgtaactcgtcatggaaagctgtggtccaatttctggggagcattgagtcctgatggatactatgcacgatctgaagattatgtggatattgttcaagggaatagagtaggagtatggaatgtcccatatatggctaatgtgtacttaattaaaggaaagacactccgatcagagatgaatgaaaggaactattttgttcgtgataaactggatcctgatatggctctttgccgaaatgctagagaaatgactttacaaagggaaaaagactcccctactccggaaacattccaaatgctcagccccccaaagggtgtatttatgtacatttctaatagacatgaatttggaaggctattatccactgctaattacaatacttcccattataacaatgacctctggcagatttttgaaaatcctgtggactggaaggaaaagtatataaaccgtgattattcaaagattttcactgaaaatatagttgaacagccctgtccagatgtcttttggttccccatattttctgaaaaagcctgtgatgaattggtagaagaaatggaacattacggcaaatggtctgggggaaaacatcatgatagccgtatatctggtggttatgaaaatgtcccaactgatgatatccacatgaagcaagttgatctggagaatgtatggcttcattttatccgggagttcattgcaccagttacactgaaggtctttgcaggctattatacgaagggatttgcactactgaattttgtagtaaaatactcccctgaacgacagcgttctcttcgtcctcatcatgatgcttctacatttaccataaacattgcacttaataacgtgggagaagactttcagggaggtggttgcaaatttctaaggtacaattgctctattgagtcaccacgaaaaggctggagcttcatgcatcctgggagactcacacatttgcatgaaggacttcctgttaaaaatggaacaagatacattgcagtgtcatttatagatccctaagttatttacttttcattgaattgaaatttattttggatgaatgactggcatgaacacgtctttgaagttgtggctgagaagatgagaggaatatttaaataacatcaacagaacaacttcactttgggccaaacatttgaaaaactttttataaaaaattgtttgatatttcttaatgtctgctctgagccttaaaacacagattgaagaagaaaagaaagaaaaaacttaaatatttatttctatgctttgttgcctctgagaataatgacaatttatgaatttgtgtttcaaattgataaaatatttaggtacaaataacaagactaataatattttcttatttaaaaaaagcatgggaagatttttatttatcaaaatatagaggaaatgtagacaaaatggatataaatgaaaattaccatgttgtaaaaccttgaaaatcagattctaactggatttgtatgcaactaagtatttttctgaacacctatgcaggtcttatttacagtagttactaagggaacacacaaagaattacacaacgttttcctcaagaaaatggtacaaaacacaaccgaggagcgtatacagttgaaaacatttttgttttgattggaaggcagattattttatattagtattaaaaatcaaaccctatgtttctttcagatgaatcttccaaagtggattatattaagcaggtattagatttaggaaaacctttccatttcttaaagtattatcaagtgtcaagatcagcaagtgtccttaagtcaaacaggttttttttgttgttgtttttgctttgtttccttttttagaaagttctagaaaataggaaaacgaaaaatttcattgagatgagtagtgcatttaattattttttaaaaaactttttaagtacttgaattttatatcaggaaaacaaagttgttgagccttgcttcttccgttttgccctttgtctcgctccttattctttttttggggggagggttatttgcttttttatcttcctggcataatttccattttattcttctgagtgtctatgttaacttccctctatcccgcttataaaaaaattctccaacaaaaatacttgttgacttgatgttttatcacttctctaagtaaggttgaaatatccttattgtagctactgtttttaatgtaaaggttaaacttgaaaagaaattcttaatcacggtgccaaaattcattttctaacaccatgtgttagaaaattataaaaaataaaataattttagaaa

SEQ ID NO: 339 - DNA, 1462 bp, Homo sapiens
gcgtggcaggagaggcggggccaattttgctgagctttctcgcgggcttgcagctgcggcaagtgctggcggcggctgctcgcgcaagtcagctggcgtgggaactaccctttgtagctgagaacggcttgtttattgctacaaagactctattgacattggtagcttcagcggcagcagcttcttacggtataaagctgttgcttcctgaagaggctacaagcatccttccctaggactgctgtaagctttgagcctctagcaggagacatgcctcggggacgaaagagtcggcgccgccgtaatgcgagagccgcagaagagaaccgcaacaatcgcaaaatccaggcctcagaggcctccgagacccctatggccgcctctgtggtagcgagcacccccgaagacgacctgagcggccccgaggaagacccgagcactccagaggaggcctctaccacccctgaagaagcctcgagcactgcccaagcacaaaagccttcagtgccccggagcaattttcagggcaccaagaaaagtctcctgatgtctatattagcgctcatcttcatcatgggcaacagcgccaaggaagctctggtctggaaagtgctggggaagttaggaatgcagcctggacgtcagcacagcatctttggagatccgaagaagatcgtcacagaagagtttgtgcgcagagggtacctgatttataaaccggtgccccgtagcagtccggtggagtatgagttcttctgggggccccgagcacacgtggaatcgagcaaactgaaagtcatgcattttgtggcaagggttcgtaaccgatgctctaaagactggccttgtaattatgactgggattcggacgatgatgcagaggttgaggctatcctcaattcaggtgctaggggttattccgccccttaagtagatctgaggcagacccttgggggtgtaaaagagagtcacaggtaccccaaggagtagatgccagggtcctaagttgaaaatgatgtcgattgggggcgggggacactgtatttgatatttgtgatcagtgatcattgttcaactgcgaaatagagtgtttgcttttgataatggaaaattgtattcgttttaaaattccgtttgttgagaataacaatatgtttaaaaatataattgaacaaatttttttctttgtttcctgtcattgacatttagtataacagttttgctaacgttctaaaatgaagtcgttccatcataatctatgatcttgtacagcacttatagaaataagctgttcttttgaagttgaaatacccagtaaaatgttgaagaaggatggaggatttcttcatatctgacgtttctgaaaccctttgtgtctgctgttgtgtgaagattgacatttaccatgattttccttagttactgcagaacatagagaaaaataaaagcctaacgaatagta

SEQ ID NO: 340 - DNA, 2244 bp, Homo sapiens
gtcagggccagggtgagcgcccgactccgagctgtccccgctcccggcgcggcgctccgctctcagccacctcacggctgccaggagtgcgcgggagtttgccccggagcgcggggaagtttcctccgaagctgcgctcctggaacagcagcacctgcaagcgcccggcagcggcccgcgaggttactttatggaattgggctcttagagaacaagaaaagactgaagttttacgggaaaacaaatcatgtggtcttcagattctgaaataaggagaaatgcagccatctgaaatggtcatgaaccccaaacaagtcttcctctctgtgctgatatttggagtagctgggctactcctcttcatgtatttgcaagtctggattgaagaacaacatacaggggagagtggagaagagaagagaacaaaaagtaacttcaggatggggaccagtgaagtacttgcggcctgtacccagaatcatgagtacagaaaaaatccaggaacatatcaccaaccagaaccccaagtttcacatgcctgaggatgtacgagaaaaaaaggaaaatcttctactcaattctgagagatctactaggctcttaacaaagaccagtcattcacaaggaggggatcaagctttaagtaagtccacagggtcaccaacagagaagttgattgaaaaacgtcaaggagctaagactgtttttaacaagttcagcaacatgaattggccagtggacattcaccctttaaacaaaagtttagtcaaagataataaatggaagaaaactgaggagacccaagagaaacgaaggtctttccttcaggagttttgcaagaaatacggtggggtgagtcatcatcagtcacatctttttcatacagtatccagaatctatgtagaagataaacacaaaatcttatattgtgaggtacctaaggctggctgttccaattggaaaagaattctgatggtactaaatggattggcttcctctgcatacaacatctcccacaatgctgtccactacgggaagcatttgaagaagctagatagctttgacctaaaagggatatatacccgcttaaatacttacaccaaagctgtgtttgttcgtgatcccatggaaagattagtatcagcctttagggacaaatttgaacaccccaatagttattaccatccagtattcggaaaggcaattatcaagaaatatcgaccaaatgcctgtgaagaagcattaattaatggatctggagtcaagttcaaagagtttatccactacttgctggattcccaccgtccagtaggaatggacattcactgggaaaaggtcagcaaactctgctatccgtgtttgatcaactatgattttgtagggaaatttgagactttggaagaagatgccaattactttttacagatgatcggtgctccaaaggagctgaaatttcccaactttaaggataggcactcttccgatgaaagaaccaatgctcaagtcgtgagacagtatttaaaggatctgactagaactgagagacaattaatctatgacttttattacttggactatttaatgtttaattatacaactccatttttgtagtttgcattcattttctaaaaccctgtatatacttaatgatgataagttcaaatcagctgtaatttttctataattctctgtatgacagaaatttaaccaagtgcagttgtcttgatttaatgtagatttttaccaaatagtatgacaccaattggcacaaagttataggaaaatcacctacaggagatgtaaacaacttgagttgctctaaaatgtttggaaaagagctgcttttgcattatgaattatattgttgaagcaataacctagccagctgttgcattagctaaagcagcctcttgcaatggtaggaaaaaaggatctcaaatagcatgagtgtatgtctatatcctgaaatttattgtctaaaatgcatgaatatatttttagcagtctgtggcatattaatcaaactgttgaattgttttcttacaccctggaaatctttctatcaactataatgataaatccattttgaagtgatattttggacttaggcattttactttagattggaaggcattatgtgatttacaatatgagaatatagcagaaaaaccagatgaggctgtggctttttatattcaacagccaataaaaaatgcacaacatgctaagatcaaagcaacaaaa

SEQ ID NO: 341 - DNA, 6936 bp, Homo sapiens
agggacctacagcgggcgcggcgccggcggtctgcggccggcggtgtagacgccccttcgccgggacctggcacccgaatccggcctgccgggcctctttgtgcagcgccttgctgacgcccagggttctgatgtagaagcctacaccagggcctgaggttgtgaaactcatggcagtccacgcctgagaagagaaggcctgaaagagaaggaagagcccatgggacttgccacggttttgacttacatctgcaactccaaggctacaggcaggaatgttacctggaatgtcagagagctgaaagcagtcatattttgggatcatgcacctactgcggcagtatataaagaaagataattaagtatgcacccaagaagtagctgcgcccctacccatcacaaactgtatagaaggatatctcctaaggattttatcatgtgaaaactttctgaattttagttggctctttttagaaatgcagataagatgaaggatattggacagcagctatacactacacacttgaacggcggacataattccttgaccatgtcacccaaacagcctgatgctaatggagcacctcggccaaatagacaagaagcacaaacccttttgtatcaaggctcagaggcagaggctgccatgatgaccattgctacatgtgcaaagtgcaaaagtgttcacaagatctctcttcaagatttgcagaagggtacagggaaggacggtatgtatgtctgcttccagtgcagcctcggtgcagctcctcccaattttcattttgtgagcaataattccagtgcgactcatgttggaaataaaactgaaaacttctcaagttctgtcaatagcaaatttaaggtaaggaactttaagccaggcaaatactattgtgataaatgtcgattctctacaaaggacccgctgcagtacaaaaagcacacccttcaacacgaggagattaaattcatttgttctcactgcagctacatttcgtatacgaaaggagagtttcagaggcatttggtgaaacacacaggcatatttccttatcagtgtgagtattgtgactatggtgctattagaaatgattatattgtcaaacacacgaagagagtacatgaaagggcaggtgcgaaacggccagtcaaagctgttgccaagctggagccaaaaagaaccggaacttcaaaacaaaacccagagcttctaaaagcttccaatccacggactacatttcaaaataagtggtcagaccaactgtcaggtttctctctccatgcaaataaagacaaaatgcacaatatcatgttgttacctgaaccaaaggaataccaaaaagatgtagtttgtattccaaataaaatgaccctgtctgagccaaatgaagtcaacctatttgagaacaaaaatgttgaagtagaagtgttatcccctgcaaaagaacctgttcagccaggtatgccattgacagttgttgcaccagcagaactagttgtccctgcaaactgtttagcccagttgatagatgtgaaggttgtcaatggtacacagcagcttgttctgaaactgtttccgctggaagaaaataattgccttgaagctgggagggataatggaggtaattctgaacgtatggtgaaagagaagggttcaaatgaacaagaaaaagtactttctgcagaaaaaacaaagtcactgacagttgacgggaatgttggaaaactcgtaggcattgatagttttcaaccttcagttcagaaacagcttaaaaatgtgaaatgggtaaggtcttatgattttattatgccaaattctagtgtgcacaacaatggaaaatccttcattaattcggaaacaattgaggattttcagaaaaaaaataatttgtatccacatagaactgcttttccttccgttgccttaaaaggtcattctctagcatctgtatttaaaaacagtgttttacgtagtcttggagctgcatcaaacccttttccatataaagctgctgtttgttttgctgaaagtggaagaaatttacacagtagctcacagcagttactcccatttgctgcatcacctgcaacctgttccttctctggagaaaagggcttattgcctgtaagtgaaaatgacttggaatctacaagtaaagtcaatattcctgtaaaagtggtttcctctaataggaagcaggaagataaccagacagaggaacacaaggcagtttcaactgtaggccagatttcctctcaacataagagtgagtatttacatataaacataactggagaagatagatctcaacagcctggggataagcctttggaattaaagaattctgaaaggactaacaacactaatgatggcccagtcatctcatcagtattttctctgagctctggatctgaaaatgtccccgagggcattaagtggaatagctcaacgtctaaaataaagtcaattgaactgttgcgcagaaagatagctcagttaattgagtcctgtgggaagccgtcatctttggcttcaaatagtgcacatcgtcgctctgtagggcaggcatcaaagggaacttcaaaagctacctctgaaggtattcaagaaatcaacgtgtcactcactggtcttggccattccacaggtactcttcagaaacctccgaatgatggtggtattactggtaatagacagcttactcatcaacaaatatatccacactttgcagatggcagtaataggaaaaccaaaagcagagtggccaggaaggctcatgttgccacgccagtgttaatccccaaaggggctgtgttgagggttcttaattcctctgagaatgcccacatcatagaggctacatgtgaagcacctgtcagcataccttgcagtgaaagacagttaataaaaccagttccattttgccctgtgagacaggcggactcagacttacagcctttaagaagtgaaagggggccaatagatatgtccccaaatatcgagacacctctgcggcctaaactgagaaaagagagtgctgtctgtagcaccatccatagaaaaactggcctcttgtatggacagcaaggaagcagtgaattaaataagcaagggagactgctttccagaagtctttctataagtagaaataaaaccaaacaagtacacttatccaggaagaaaaacaaaattcaagctgaacctagccgctgtctcaaggatccttcaatttttcaggttgcaaggcaactaagactgatagcagctaagccagatcagttgattaagtgtccccgtcggaaccagccagtcattgtgttaaaccaccctgatgtggactcgccagaagtgaccaatgtgatgaaggtaataaataaatacaaaggcaatgtcctcaaagttgttttatcagagaggactaggtgtcagctaggcatcagacggcatcatgtacgcctgacctaccagaatgcggaagaagccagtcaaattaaaaggcaaatgatgttgaaaatgaaactcaaaaaagttcataaaaacaactaccaggtagtggattccttgcctgatgattcttcacagtgtgtatttaagtgctggttttgtgggcgactgtatgaagaccaggaagagtggatgagtcatggccaacggcatttgatagaagcaactagagattgggatgttctttcctccaagggcaaataagtaaacagttactctttaaagcaagttatcttttagtttattctggtttggagtccctccaccaagattcagtagaagaaatacagactgtagaaatgagaggactgctaattcttcagaactgtaggaatattgggagctaggagtctgaacctgaagtatgtgattggaccccagaatgtatttgaaggctctgaaattgtacatgcaaattggtacatatgcatttttctggagagagcctgtgaaactgaacagattttcagtgggatctgagacttttctttgtttagcaccccgttttctgagtacatactgatctttcataatccattcagaggggcagattgagaatgttttacacatgctcttcatataaatgctacagaaaaacctttgttttggtgtgcacatccattttgtttttgctttaatttgtgttctgagtatttggtgcacaatggaaattatattttctactttactgtcttcaatttggttatagagaaatggccattcttttactccctccctggttttgtaatactcccgagtgttccgtatagcacaaagagttttgcttttactggccattttaaagaatgttttcaactgcttgcctgaatttactcctttcacagcaagtgttagaagaaagataacattttcaaatacttagcttttgctttctttaaaatacattggtttatgacatatgggaagggaacgtacctttttgcaaagacaaaaagagattacaaaaggaaaatatctaaaactattttctctttgcccttaccactcccagaaacataagtgaccaatttaaaatgctagggaacaggcttacaacataggtaaaactcgcaaacacagttcaaggtaggctcataaagttgtgaaaagggtttcatatgccctttagttttcatttgggattcatccaaagaccatgggtggatgctgtcttctctcttcttgatccctttgattcatggacactagactccctttgccatttcttctgaaccggccctcctgtggactagcacaacttccttgcccactgtttcttcctttctgtgcctttgagaccccttaaggttttccctcatgcgattactagaaaatggcaggaatcaacaaaatggagacctcccactgtttttgctaaagttacaggaacacgatccctagttttcattgatagtaacgctgtttctaatttgtcttaaccacattcatgcttaccctgctgctcagctttctcagggaagcaactccaggaacactccttccactcccctctctaccaacagatgtcaggactgtcatttatctacacatttgtgttctttagaaaaaggcccaccccctgcacaagcacagcctcttgggcagataggtggctgggtcagtgcttaagacaggattctagtcttcacttgcctgtgcagctgggcgctgaccttccaggtagagcacagatggcacaaccccgaggcagccccaacttgcatttccctccctccaggggctattcctgtcttaggcgatttgtggggtgcagtgaatgaaactaaagagttgttgcacctgaaaaagacaccagtgattgtttattgggtagtcgattggagactttgatttttttttttttttttcacatgggaaagtcttagattccagtagatggaattgcaatcctttgcagtttgttctcattacagataatcaacatttcttttgtataattcaatacatgatcatcaagttaattggtaaatttttattgaaatttaaaacttgcatttttatatatgtgtatgtgtacacataaaaatattttttaccatatgaaaattgcagtagctaattttctgatttcctattttataatgatacatgggctggaaaaatgtagaacgtttttatattctagaaatttattttggaagtacatttttataagggtctaatctcacttttggaaaatgaaagcacaggaatgatggggtctggtttatgtgaacaagtgagtagaaacccctttggatcattttattactgcatttttatttggtgctttttaggaagtagatctttggtaccacttcactacgtagagcattcgaagttttatccatgttatatattgtactcctgtggcatgaaaaatagctcccaagatatagagaggagaggagtgaagaaaaggctgtggtttttttttgttttgttttgtttgccacttttttatctcctattcctcaccacatagtgctttttcctgaaaagctggactgagaattggccttgaatcaggtcagagtgttaactgtcaacatgaagtattttcacttcgcagcatcaactttcaagcataagtaaaaacacaacttgcatactttgatggagcttaattgtgtgagtagaatatgtagcaaagctttttaggattttcagaactagaatactttttaaggaattaaaagtgtttctggaagtcaaaaatgggaaagcaaaaagtagctgtcctccctaaagagctttagaagatagcttaacctgtaggtacatgttatgaaataaacacatttctaacaatacaagggagtaggggcagacctgtgttgagtatttgtgtgggttcttaattttgaaggacctccaatcactacattttgttaatactgccaataaaatcattttcaacttattttttaaagtaggttttcttactttggtggaccagaagtgagagattgttatatttaggatataggcaaatacagtaaaagttaaaaaaaaaaaacctgacccaaagtatactctgatagactatattatattcaattttgtatccccagtcgagaacatcttgtaagccttcattaagggccacctgctgtctgttgaactagactgaacaaaatatattttctcacaagctccatccctttttctttaggacatgttatatataatccatctcagaagttgaagatgtgatgttgctcggcctttggaataatttttaaatctgtaaatgtctatatgagcagaaacaaaacattgtgtaacatgttttaagcattattgtaattcctgtgttaacagtttgtgtgtctgctgctctggttttgaaacatgtttgtatatagatacaggagttggcataaattttgttaaataaagcaacaaaaattttctttgccctttga

SEQ ID NO: 342 - DNA, 1516 bp, Homo sapiens; identical to SEQ ID NO: 77

SEQ ID NO: 343 - DNA, 2137 bp, Homo sapiens
cttctgagtgggggcggggactgctggagttgcggggcctgcctggggtagggcggggcaggacagcttggagatagggcccggaattgcgggcgtcactctgctcctgcgacctagccaggcgtgagggagtgacagcagcgcattcgcgggacgagagcgatgagtgagaacgccgcaccaggccttgtctgatctcagagctgaagctggctgtgccctggggccacatcgcagccaaagcctggggctccctgcagggccctccagttctctgcctgcacggctggctggacaatgccagctccttcgacagactcatccctcttctcccgcaagacttttattacgttgccatggatttcggaggtcatgggctctcgtcccattacagcccaggtgtcccatattacctccagacttttgtgagtgagatccgaagagttgtggcagccttgaaatggaatcgattctccattctgggccacagcttcggtggcgtcgtgggcggaatgtttttctgtaccttccccgagatggtggataaacttatcttgctggacacgccgctctttctcctggaatcagatgaaatggagaacttgctgacctacaagcggagagccatagagcacgtgctgcaggtagaggcctcccaggagccctcgcacgtgttcagcctgaagcagctgctgcagaggttactgaagagcaatagccacttgagtgaggagtgcggggagcttctcctgcaaagaggaaccacgaaggtggccacaggtctggttctgaacagagaccagaggctcgcctgggcagagaacagcattgacttcatcagcagggagctgtgtgcgcattccatcaggaagctgcaggcccatgtcctgttgatcaagtaagtctggacccatccccttcagccacccgccaaggagacatgggcgccaggaatctccgggagggggccctggcatgaggctccaagttctctgcgtgtcgaccacatcgctaaggctcaagatcttttttgggaagcccccctggcagcagggtcatggaaggaggaaggtcagaggaggggagggctcgggcagcaggggatgggccggggctgtcccatgcctttccacaggtgtcagcggggggcatgcccaggtaaggctccataaccagtgagcccagtctcggctgactgcaacctctgtctcctggattcaaacgattctcctgcctcagcctcccgagtagctgggactacaggcgcccgccaccaggcctggcttatttttgtatttttagtagagacgaggtttcgccatgttggccaggctgctctccatctcctgacctcatgatccgcccgcctcggcctcccagtgttgggattacaggcgtgagccaccgtgcgtggcccaccatagacgatttttaagccataaaaagaaacgaagcactgacacgggctccagcatggatgagcctttaaaacatcgcgctaagtggacgaattcagacacaaccgtctacgtgttgtatggctgcattcacgttcaagtcaagtccaaatagggcacactgcagagacaaagccagagcagtccacggatattttgattcaagacagaattactctgagaaggagtccctgtcgttcatgatagacacgatgaaatccaccctcaaagagcagttccagtttgtggaagtcccaggcaatcactgtgtccacatgagcgaaccccagcacgtggccagtatcatcagctccttcttacagtgcacacacatgctcccagcccagctgtagctctgggcctggaactatgaagacctagtgctcccagactcaacactgggactctgagttcctgagccccacaacaaggccagggatggtggggacaggcctcactagtcttgaggcccagcctaggatggtagtcaggggaaggagcgagattccaacttcaacatctgtgacctcaagggggagacagagtctgggttccagggctgctttctcctggctaataataaatatccagccagctggaggaaggaagggcaggctgggcccacctagcctttccctgctgcccaactggatggaaaataaaaggttcttgtattctca

SEQ ID NO: 344 - DNA, 3616 bp, Homo sapiens
ggacgggacggagccggggcagccagaagaggtgggaaaagcggaggaggacgcccaggaggaggcggcggcggcggccgggaagtgaaaggtctcgcaaagttcagcggcggctgcgggcgccgagccccgggctagcggcagacgagcccgcagggccgctccgcggggcagcgcagccaggccggctatggtcccggggctcccgccgccccccaggtgcccgggacccgccaggccggtgcgcgagggtcaccccacctccccgcgcggtcccggcccctggctcccagctgccggcgaccgctgaccgagcccggcgccccaggaggaggaagaaaccagggccccgttccctcccgaggacggcggcgcttcatcccgcagcccagaggtctcggctccctccggcacccgcccggcccggctgctcccggctcctcccggccatggggagctgcgcgcggctgctgctgctctggggctgcacggtggtggccgcaggactgagtggagtagctggagtgagttcccgctgtgaaaaagcctgcaaccctcggatgggaaatttggctttggggcgaaaactctgggcagacaccacctgcggtcagaatgctaccgaactgtactgcttctacagtgagaacacggatctgacttgtcggcagcccaaatgtgacaagtgcaatgctgcctatcctcacctggctcacctgccatctgccatggcagactcatccttccggtttcctcgcacatggtggcagtctgcggaggatgtgcacagagaaaagatccagttagacctggaagctgaattctacttcactcacctaattgtgatgttcaagtcccccaggccggctgccatggtgctggaccgctcccaggactttgggaaaacatggaagccttataagtactttgcgactaactgctccgctacatttggcctggaagatgatgttgtcaagaagggcgctatttgtacttctaaatactccagtccttttccatgcactggaggagaggttattttcaaagctttgtcaccaccatacgatacagagaacccttacagtgccaaagttcaggagcagctgaagatcaccaaccttcgcgtgcagctgctgaaacgacagtcttgtccctgtcagagaaatgacctgaacgaagagcctcaacattttacacactatgcaatctatgatttcattgtcaagggcagctgcttctgcaatggccacgctgatcaatgcatacctgttcatggcttcagacctgtcaaggccccaggaacattccacatggtccatgggaagtgtatgtgtaagcacaacacagcaggcagccactgccagcactgtgccccgttatacaatgaccggccatgggaggcagctgatggcaaaacgggggctcccaacgagtgcagaagcctgcaagtgtaatgggcatgctgatacctgtcacttcgacgttaatgtgtgggaggcatcagggaatcgtagtggtggtgtctgtgatgactgtcagcacaacacagaaggacagtattgccagaggtgcaagccaggcttctatcgtgacctgcggagacccttctcagctccagatgcttgcaaaccgtgttcctgccatccagtaggatcagctgtccttcctgccaactcagtgaccttctgcgaccccagcaatggtgactgcccttgcaagcctggggtggcagggcgacgttgtgacaggtgcatggtgggatactggggcttcggagactatggctgtcgaccatgtgactgtgcggggagctgtgaccctatcaccggagactgcatcagcagccacacagacatagactggtatcatgaagttcctgacttccgtcccgtgcacaataagagcgaaccagcctgggagtgggaggatgcgcaggggttttctgcacttctacactcaggtaaatgcgaatgtaaggaacagacattaggaaatgccaaggcattctgtggaatgaaatattcatatgtgctaaaaataaagattttatcagctcatgataaaggtactcatgttgaggtcaatgtgaagattaaaaaggtcttaaaatctaccaaactgaagattttccgaggaaagcgaacattatatccagaatcatggacggacagaggatgcacttgtccaatcctcaatcctggtttggaataccttgtagcaggacatgaggatataagaacaggcaaactaattgtgaatatgaaaagctttgtccagcactggaaaccttctcttggaagaaaagtcatggatattttaaaaagagagtgcaagtagcattaagatggatagcacataatggcacttgtctatgtacaaaacacaaactttagagcaagaagacctcagacaggaaactggaattttttaaagtgccaaaacatatagaaatgtttgaatgcatgggtcttatctaacttatctcttctggacccatgtttaaatacagttttatttcatgaagagaaatgaaaacccctacactgatatctgttttctatgggactgattctgaaattcttaactattaagaatattttaatagcagcatgacatttagcagtaatccattaagggcagtacctctaacaaggacgccttccagcttcagcgatgttacttacgtttgatgctacttaaagtaatgaatgacgttttaaggaatccctaaccctactatcagaaaaggtgtttgttaaagagccttctcttgtgtgttacgcatgaactttggtctgtaggtgttaaatggaacctctccatgtgtatatagtatttccttgtataaagcactttactacctaccacttgtgttgtgaacgtttggtgactgctgttgaaagaaggaaaagggtgtgtgagaaagcctactgaagcagcagcactgccactacatgtggacaaaagtgaccatataaaagaagttgtgctatttaactctgaatacttggagaaactaggtgaagatgcaaccagaaaggagaatatgtatgcgtgaagtctcagctttgagctggaggctagattccaagatgacagccatgatgaaactttttaaaaaactaaaccagaagagactttaaaataagagaaagaaatcataaatgtagacatatgcttggctaaaggggaaatggactttaaattttaaagagctcatttgcaatgcacttgtatacacttcaaaaattattgtagacacagaatttgttatatttttgtgcttagtatttaaacctgaacattgaaacagttttcctccttgtctttcttaacagtaatagtcattatatttacctgttttttaacacaatgtatgtgatagtcaaaaaatcacagtttttcattattattcatcttctgtacccacgcataaccactatacatagtttcttttgtacttgaatatacaaaacatgaacacagtgccatatgaataatttcacatacagaacctttttttctctgaagtcctgtggacttgcaaatatatatatatattgctttgttaatttgtttttatatttcatatatgtaataaaggaatatgatctga

SEQ ID NO: 345 - DNA, 1858 bp, Homo sapiens
gcagtgtcactaggccggctgggggccctgggtacgctgtagaccagaccgcgacaggccagaacacgggcggcggcttcgggccgggagacccgcgcagccctcggggcatctcagtgcctcactccccaccccctcccccgggtcgggggaggcggcgcgtccggcggagggttgaggggagcggggcaggcctggagcgccatgagcagcccggatgcgggatacgccagtgacgaccagagccagacccagagcgcgctgcccgcggtgatggccgggctgggcccctgcccctgggccgagtcgctgagccccatcggggacatgaaggtgaagggcgaggcgccggcgaacagcggagcaccggccggggccgcgggccgagccaagggcgagtcccgtatccggcggccgatgaacgctttcatggtgtgggctaaggacgagcgcaagcggctggcgcagcagaatccagacctgcacaacgccgagttgagcaagatgctgggcaagtcgtggaaggcgctgacgctggcggagaagcggcccttcgtggaggaggcagagcggctgcgcgtgcagcacatgcaggaccaccccaactacaagtaccggccgcggcggcgcaagcaggtgaagcggctgaagcgggtggagggcggcttcctgcacggcctggctgagccgcaggcggccgcgctgggccccgagggcggccgcgtggccatggacggcctgggcctccagttccccgagcagggcttccccgccggcccgccgctgctgcctccgcacatgggcggccactaccgcgactgccagagtctgggcgcgcctccgctcgacggctacccgttgcccacgcccgacacgtccccgctggacggcgtggaccccgacccggctttcttcgccgccccgatgcccggggactgcccggcggccggcacctacagctacgcgcaggtctcggactacgctggccccccggagcctcccgccggtcccatgcacccccgactcggcccagagcccgcgggtccctcgattccgggcctcctggcgccacccagcgcccttcacgtgtactacggcgcgatgggctcgcccggggcgggcggcgggcgcggcttccagatgcagccgcaacaccagcaccagcaccagcaccagcaccaccccccgggccccggacagccgtcgccccctccggaggcactgccctgccgggacggcacggaccccagtcagcccgccgagctcctcggggaggtggaccgcacggaatttgaacagtatctgcacttcgtgtgcaagcctgagatgggcctcccctaccaggggcatgactccggtgtgaatctccccgacagccacggggccatttcctcggtggtgtccgacgccagctccgcggtatattactgcaactatcctgacgtgtgacaggtccctgatccgccccagcctgcaggccagaagcagtgttacacacttcctggaggagctaaggaaatcctcagactcctgggtttttgttgttgctgttgttgttttttaaaaggtgtgttggcatataatttatggtaatttattttgtctgccacttgaacagtttgggggggtgaggtttcatttaaaatttgttcagagatttgtttcccatagttggattgtcaaaaccctatttccaagttcaagttaactagctttgaatgtgtcccaaaacagcttcctccatttcctgaaagtttattgatcaaagaaatgttgtcctgggtgtgttttttcaatcttctaaaaaataaaatctggaatcctgcttttttgctctactagtacctctgtcacacta

SEQ ID NO: 346 - DNA, 2706 bp, Homo sapiens
atactgctgggattacaggcgcccgccaccacgcccggctaattttttgtatttttagtagagacggggtttcactgtgttggcaaggatggtctctatctcctgacctcgtgatatgcccgcctccgcctcccaaagtgctgggattacaggcttgagccaccgcgtctggcctatttatttattattttcgagacggagtgttgctcttgtggcccaggctggagtgcaacggcgggatttcggctcactgcaacctctgcctcccgggttcaagcaattctcctgcctcagcctcctgagtagctgggattacaggcaggcaccaccacacccggctaattttgtatttttagtagaaacggggtttctccatgttggtcagtctggtttcgaactcccagcgtcaggtcatctgcctgcctcggcctcccaaagtgctgggattacaggcgtgagccaccgcgcccagccacttctgtatttttaaaaaagtggtaaggaagtggaggattaaatgatttgcccaaagtctcacagtaatttgtagagctgagattgaaattcgggtgaaacttcacatatcacattctttttatcagatggcagtttctggatttactcttggtacctgcatacttctgttgcacattagttatgtggctaattatcccaatggaaaagtaacacagtcatgccatggaatgattcctgaacatggtcatagtccacagtctgttcctgttcatgacatttacgtgagtcagatgacattcaggccaggagatcagattgaagttactttgtcagggcatccatttaaaggctttctcctagaagcgcgtaatgctgaggatctgaatggccctcctattggctccttcacattgattgacagtgaagtgtcacaacttttgacctgtgaagatatacagggatcagcagtgagtcacagaagtgcatctaaaaaaacagaaattaaagtctactggaatgctccaagcagtgctccaaatcacacacagtttctagtcacagttgttgagaagtataaaatctactgggtgaagattcctggtcctataatttcacaaccaaatgcatttccttttacaacacctaaagctacagtagtacctttgccaacgttacctcccgtttcccacttaaccaaaccattcagtgcctcagattgtgggaacaagaagttctgtattaggagtcctttgaactgtgacccagagaaggaggcttcctgtgtcttcttgtccttcacaagagatgaccaatcggtgatggttgaaatgagcggccccagtaaaggctatttatcctttgcattgtctcatgatcagtggatgggtgatgatgatgcttatctgtgtattcatgaagatcagactgtgtacatccagccttcccatttaacggggcgaagtcaccctgtaatggactccagggatacccttgaggatatggcttggaggttggcggacggtgttatgcagtgttctttcagaagaaacattacccttcctggagttaagaatagatttgatctaaacacaagctattacatatttctagcagatggtgcagctaatgatggtcgaatttacaagcactctcagcaacctttgattacctatgaaaaatatgatgtgacagactctccaaagaacataggaggatcccattctgtactccttctgaaggttcatggtgccttaatgtttgtggcatggatgactactgttagcataggtgtactggttgcccggttcttcaagccagtttggtcaaaagctttcttgcttggtgaagcagcttggtttcaggtgcatcggatgctcatgttcaccacaactgtcctcacctgcattgcttttgttatgccgtttatatacaggggaggctggagtaggcatgcaggttaccacccatacctcggctgtatagtgatgactttggcagttcttcagcctcttctggcagtcttcaggccacctttacatgacccaagaaggcaaatgtttaactggactcattggagtatgggaacagctgctagaataatagcagtggcagcgatgttcctgggaatggatttaccaggactgaatcttcctgattcatggaaaacctatgcaatgaccggattcgtagcctggcatgttgggactgaggttgttctggaggtacatgcttatcggctctctcgcaaagttgaaatattggatgatgacagaattcagatccttcagtcatttactgcagtggaaacagagggtcatgcttttaaaaaggcagtgttggcaatttatgtctgtgggaatgttacttttctcatcatatttttatctgcaatcaaccatctatgagcaagcaaagaccttggcttttgcaggccaagtgataattatcatcaaaccaaagaaacttgaagcctgtcctgactgcctggagcatatttgtgaattctcacttggaagactggggtcatgtctgtagaggaattctgaagtccagcctttagagaacaacattcaagagggtcatatagactataaattaatgtcatgccctatatgtaattctgggtcttaaaggaaagattgtacttcaggagaagtaactctcaaatatttcatgccaagattttaagaatgttggtatttaagaaaataaatagtgatttggaaaatc

SEQ ID NO: 347 - DNA, 2251 bp, Homo sapiens
cctgagagcgggaccggcctcagctccaacacagcctccactgtgattaaaaataaaaattgctagagcagccctcactcgccacatctactttgatagctggctatttggaatttaaaggatatttgactttttctaacctcccatgaggctgtaagcctccgaagcagtaaaccagcccctctgtttgtttgtttgctttgcccttagttccactgctccaaacccacccaccaaggactctgaacctgtccaccccgggcgcatcaagatcttccagctgggtacccccgatttgggccgactttgcacctccaaacaaccttagcatgatgtcttatcttaagcaaccgccttacgcagtcaatgggctgagtctgaccacttcgggtatggacttgctgcacccctccgtgggctacccggggccctgggcttcttgtcccgcagccaccccccggaaacagcgccgggagaggacgacgttcactcgggcgcagctagatgtgctggaagcactgtttgccaagacccggtacccagacatcttcatgcgagaggaggtggcactgaaaatcaacttgcccgagtcgagggtgcaggtatggtttaagaatcgaagagctaagtgccgccaacaacagcaacaacagcagaatggaggtcaaaacaaagtgagacctgccaaaaagaagacatctccagctcgggaagtgagttcagagagtggaacaagtggccaattcactcccccctctagcacctcagtcccgaccattgccagcagcagtgctcctgtgtctatctggagcccagcttccatctccccactgtcagatcccttgtccacctcctcttcctgcatgcagaggtcctatcccatgacctatactcaggcttcaggttatagtcaaggatatgctggctcaacttcctactttgggggcatggactgtggatcatatttgacccctatgcatcaccagcttcccggaccaggggccacactcagtcccatgggtaccaatgcagtcaccagccatctcaatcagtccccagcttctctttccacccagggatatggagcttcaagcttgggttttaactcaaccactgattgcttggattataaggaccaaactgcctcctggaagcttaacttcaatgctgactgcttggattataaagatcagacatcctcgtggaaattccaggttttgtgaagacctgtagaacctctttttgtgggtgatttttaaatatactgggctggacattccagttttagccaggcattggttaaaagagttagatgggatgatgctcagactcatctgatcaaagttccgagaggcatagaaggaaaaacgaagggccttagaggggcctacaaaccagcaacatgaaatggacaaaccaatctgcttaagatcctgtcatagttttagatcattggttatcctgatttgcaaagtgatcaaaagcattctagccatgtgcaaccaaacaccaccaaaaataaaatcaaacaaaactaagttgtgaaggaagggagggaaggtcatagccttcttaagcagaggtgttccattgttttagccaatccttggttgaatcttaggaatgaacagtgtctcaagctcattcacgtttcatgaccaactggtagttggcactgaaaaaacttttcagggctgtgtgaattgtgtgactgattgtcctagatgcactactttatttaaaaaataatgttcataaggagtcaatatgtagtttaagagacaatcagtgtgtgtcttataaatggtacatctgtggtttttaatctgtgctagacttcaaaactgtgatctcctgttattgtatgcaaccttgaactccacctctgcaggggttcttctgtgattaaataggttataattataagcaaaattcagagcaactgagtactgatctaaaaagattacctttggctggaggtgagctgcactgaaactttacgacaaaatgtctctggacaaagagagtcagagaagagaagcaaaaggacactaattcatctgtaatttactgttggtaagcctagcagtaaagagacattggtcaattgctctgaccctgatgaattattaaactgagatcattgtcgtttatgcttgcagatgttaaatggaaaagttatatatgcataaaccttttcttcctggatttggcagatatgtataattatattaaaatggttctagcacaa

SEQ ID NO: 348 - DNA, 4482 bp, Homo sapiens
gacgcagcaggaggaaactgctcgggctgcaagcagtcttccaggctttgcggctgccaaaggaataattgagacgtctgagttgagcagcaggtggaatgtcagaagactgagaacattgttccttcttcatactgctgctctgttgccagagaatcccaatttacactcaaagcttctttgattaagtgctaggagataaatttgcattttctcaaggaaaaggctaaaagtggtagcaggtggcatttaccgtcatggagagcagggatcataacaacccccaggagggacccacgtcctccagcggtagaagggctgcagtggaagacaatcacttgctgattaaagctgttcaaaacgaagatgttgacctggtccagcaattgctggaaggtggagccaatgttaatttccaggaagaggaagggggctggacacctctgcataacgcagtacaaatgagcagggaggacattgtggaacttctgcttcgtcatggtgctgaccctgttctgaggaagaagaatggggccacgccttttatcctcgcagcgattgcggggagcgtgaagctgctgaaacttttcctttctaaaggagcagatgtcaatgagtgtgatttttatggcttcacagccttcatggaagccgctgtgtatggtaaggtcaaagccctaaaattcctttataagagaggagcaaatgtgaatttgaggcgaaagacaaaggaggatcaagagcggctgaggaaaggaggggccacagctctcatggacgctgctgaaaaaggacacgtagaggtcttgaagattctccttgatgagatgggggcagatgtaaacgcctgtgacaatatgggcagaaatgccttgatccatgctctcctgagctctgacgatagtgatgtggaggctattacgcatctgctgctggaccatggggctgatgtcaatgtgaggggagaaagagggaagactcccctgatcctggcagtggagaagaagcacttgggtttggtgcagaggcttctggagcaagagcacatagagattaatgacacagacagtgatggcaaaacagcactgctgcttgctgttgaactcaaactgaagaaaatcgccgagttgctgtgcaaacgtggagccagtacagattgtggggatcttgttatgacagcgaggcggaattatgaccattcccttgtgaaggttcttctctctcatggagccaaagaagattttcaccctcctgctgaagactggaagcctcagagctcacactggggggcagccctgaaggatctccacagaatataccgccctatgattggcaaactcaagttctttattgatgaaaaatacaaaattgctgatacttcagaaggaggcatctacctggggttctatgagaagcaagaagtagctgtgaagacgttctgtgagggcagcccacgtgcacagcgggaagtctcttgtctgcaaagcagccgagagaacagtcacttggtgacattctatgggagtgagagccacaggggccacttgtttgtgtgtgtcaccctctgtgagcagactctggaagcgtgtttggatgtgcacagaggggaagatgtggaaaatgaggaagatgaatttgcccgaaatgtcctgtcatctatatttaaggctgttcaagaactacacttgtcctgtggatacacccaccaggatctgcaaccacaaaacatcttaatagattctaagaaagctgctcacctggcagattttgataagagcatcaagtgggctggagatccacaggaagtcaagagagatctagaggaccttggacggctggtcctctatgtggtaaagaagggaagcatctcatttgaggatctgaaagctcaaagtaatgaagaggtggttcaactttctccagatgaggaaactaaggacctcattcatcgtctcttccatcctggggaacatgtgagggactgtctgagtgacctgctgggtcatcccttcttttggacttgggagagccgctataggacgcttcggaatgtgggaaatgaatccgacatcaaaacacgaaaatctgaaagtgagatcctcagactactgcaacctgggccttctgaacattccaaaagttttgacaagtggacgactaagatgagcaagctgaggcacagacaaataatttttccaactacacagaaccagtaaggggtgcaccaggatttgaagctgggaaggatggctgcagaggccatgtgcttaagccacaccactacatgaagctgtgatggcatcaagtctaccaactcatttactcactgaggaaattgaggctcagagaccacactcaaattactcatgctggacagtcagagattggcagacctggaaagagattaatgaatgtgttatgaaaaaaatgaataagttttatgaaaaaagaggcaatttctaccagaacactgtgggtgatctgctaaagttcatccggaatttgggagaacacattgatgaagaaaagcataaaaagatgaaattaaaaattggagacccttccctgtattttcagaagacatttccagatctggtgatctatgtctacacaaaactacagaacacagaatatagaaagcatttcccccaaacccacagtccaaacaagcctcagtgtgatggagctggtggggccagtgggttggccagccctgggtgctgatggactgatttgctggagttcagggaactacttattagctgtagagtccttggcaaatcacaacattctgggccttttaactcaccaggttgcttgtgagggatgagttgcatagctgatatgtcagtccctggcatcgtgtattccatatgtctataacaaaagcaatatatacccagactacactagtccataagctttacccactaactgggaggacattctgctaagattccttttgtcaattgcaccaaaagaatgagtgccttgacccctaatgctgcatatgttacaattctctcacttaattttcccaatgatcttgcaaaacagggattatcatccccatttaagaactgaggaacctgagactcagagagtgtgagctactggcccaagattattcaatttatacctagcactttataaatttatgtggtgttattggtacctctcatttgggcaccttaaaacttaactatccttccagggctcttccagatgaggcccaaaacatatataggggttccaggaatctcattcattcattcagtatttattgagcatctagtataagtctgggcactggatgcatgaattccactccttccagaaccaactgcattggttttccatgaccttaaggcagtagttctcaactggggggcaattttgcactgaagagagcatttggcagagtctgaagaagtttttggtgtcacagctttgtggggagcatgctatggcatttagtgggtaaagaccagggatgctgccaaacctgccttgcacaggacagcccctgcaacaaagaattatccagacaaaaatatcaatggtgctgaggttgagaaaacctgacttaaggggctgggatgcttttgaactagcttaaggcccaggactgtggagtgtgtggaccaccccacagaggagggactcagatttatttactcttgctggatctgtagtgatggagttccttctggtgtcagccccacaggaggctcccaggcctccctcacttcccatacccagtctaggagctccttctggctcccaagcacccagagctttcctccgccttttagttttggttcctccactggaatgtaggctcctcacgggcgatggctgtcttttcttgactttgtatcttcactgccaagcaaaaagtctgccaagtgggaatgtttaataaatattcattgaataatgaatgaaccatcttcgtacatgaataataatactgtcttacgtttttctggtgctttataatgtatacattacatctgagtattttattttatttaattttcaaaacaatcctttaaggtcaacattgttatccctattttgctgatgaggaaactaaggttagaaacattttgatttcctctaggacgtatagctaggaagtgttactatcttgatttgaacaaattttctggtgctaagtctgatgttctttccatgaatcattgtggtggttgagatggagctttgtaatgggaataaaacagtaccttaggttctttctgaaaaggaggtatctagcaatggataaatagataccactgaatgaaattaaatgttgattaggaacaaatttaaggcttaaaaaatactttatgagcagcaagattgctttaacttttaaaatgaagctttggttctctgatttgtaatgagcacctggacatgtcaattaaaatgcccatttgtgaagcttactcaataaaactttaaattgtctta

SEQ ID NO: 349 - DNA, 4399 bp, Homo sapiens
gacttccgggtcgcggtgcttgaagggagtgttccgtcgtttccgttgccggctgtttgcagtggggaaaccgaggcagctcctgctccccctagttcttccgctcctgtgaggaaaaaaaaatgtttatttctttgtgggagttcttctatgggcacttttttcgattttggatgaaatggctattacgacagatgactgggaagtgtgaattgcagcgaatatttgatacctatgtaggtgcacaaaggacacacaggatagaaaattccttgacatactccaagaataaggttttacagaaggcgacacatgttgttcagagtgaagtggacaaatatgtagatgatattatgaaggaaaagaatattaaccctgagaaggatgccagttttaaaatatgcatgaagatgtgcttactgcagataactggttataaacagctgtatttggatgtagaaagtgtgaggaaaaggccatatgattctgataacctacagcatgaagagctactcatgaagctttggaatcttctaatgcccacgaagaagttaaacgctagaatctccaagcagtgggctgaaattggttttcagggtgatgatcccaagacagacttcagaggcatgggcatacttgggttaatcaatcttgtgtatttcagtgaaaattacactagtgaagctcatcagattctttcccgttcaaatcatccaaaattagggtattcttatgcaatagttggaatcaatcttacagagatggcttatagcttactgaagagtgaagctttgaagtttcatctctataaccttgttcctggtataccaacaatggaacactttcatcagttttactgttatcttgtctatgaatttgacaagttttggtttgaagaagaaccagaaagcattatgtatttcaatttgtatagagagaagtttcatgaaaagattaaaggacttttactggattgtaatgtagcacttactttaaaagtataaatcatccactgtatcttctatttctaccacattttgcacattcaacagaatttatatgttgtaataggaattatctgatcaattacactcttatatataatttcctacaaaaatatttcagaaattctatttaagaaagctagtggacaatcagtgtatgtttacaattgtttatacactgttctccaaaggtaccttatccttccaaagatcccctctgtagagtcatgcgaactacagtttggaacttgggacttagcccgttggtgtaaaagtataaatcaggtatttgtattaaattgattaaaatgtgtaaaatcaattttcgtttttatgtgttatagggtcaagttggtatctttttcaaagctctttaagatttttttggtttttagtttggaaatggctgtttttaattttgtctgatttttatttctaggttaattaacagcaagtgtttctttatggttttctttgtttgcatcttaattacatgtcataacgttgcttcattagtagcaaatagagcagagatacagcagagagaataaagaattagggcctccttttgggtttctgtgattattgagcataactgatgagagaatgacagtattggtgactagcttttttgtttttaaataacacactttaaaatgccacagtgttatttgaaagcttaaaggcattttctcatcttcagtatttgctttttatcagttgtagaaaagaaccttagtgttttcttctctacctatgtatgcttatgaaaccgctctacctacatatgaaacttctctacctatgtatgtttacgaaaagagatgtatttgccaagaaaatcttgattatataaaagacaaaaagattataaaagacagtttctgtttaagtaaaactgtctttgaaacttaagaaagcttaagttttaaaaaaatctcagttaaacatcattggtttatttgacttactgttaactcttgcttctctttgactccatggtgtttttagataaccatgtatgaactttatgttaatggtttgtgggatactaaaatagcttgaagatgacttgatgactgtgcattttatatagttttattctcctaaaatctcaggagggcagcaagtgctgtcaacgattatatagtgatgagatttttatgggaatgatttcttcttggtgcgttttacacatttgtactgatagcaaaactaaagtttaaagcagcaaagtttaagttctccttaaatcctacagaaaccaaccttttaaggacataatttcatctaaaacatgacgatatttagcacaccttttaatgtgggtatatatcaagtgtttaaggactggctagtatgtgatagagcaagacctgagactttataagtatttgctcgtgtctgttgacagacctctttctttcaaacttgttagaagagtggtaagacatatccaattggaaaataagatgcagtgttgtatagcacatacatttaaagtgcttgcgttaaaattagtttctcaataagataaaattattttaaaaatttggttcactttattacaatagtggcaatttagcttttcagtattacaggaatttaaaaattggtttcttgtaggggacatctcaactttgggaatatcttcacttaatttttaaaaaatattttcatgctttattgtccagctatacaatatgtcgcaaaatcctgacaagttcattgtattaaggtattaactattacatggaaagcaattctgttcatcttttgatgtttgtgttgaaaatgcttatctttgtgttttgatcttccaacagctgagagcttgaactgatttaaacatttgtcaatatacttaagaatgctttaagtaaagaaggggaaaattttaagtaagttttttcccttctaggaagaaaaactatgatgatgttaagaaaatgtcattatagagcttgctcaataatatgttctttaaatccacctccatttgtacattataggtatcattctgtttttgcttaaaataatctgcaaccatttcagatagttttacagcaaattgatctaaaagccactaataaattctagggtttgagtctagaagccaagcaaactgtcaccaatgtcagttgtaaattagaatgcaacatgaggcttcagactcatgacaatgatatacatgaaaacaaaaatataattgtgtctaccttcctactttcccttttgacatatgtagttggaattttacatagtcttaaaatccatatttagaatcttacctgtttctataataattagtaaaatgccaaagtagtgatagaatattgtggcattgaagtagccgaaaaattgttagttttagcatcaaaaaagtaaatagatgttgaaatgaatttttgtatgtgccaggttgaagagagtgtgccagtgacaggaagtagtctaaaaaattaacagttatggttttaataggatctgaaagacaatctttaaagaaatgggagaaattgggggtatcagtgaacctataccaacctctctttgtacataaatatggtgatgtagctagatataaaaatcagtgtcttactggcaccatttacagtttagaaaacaatctttttcttaaaaatgcccatctgatttctatttttaggagctacttggatttgtatgtattttttctacgtgaaaatatatgtactcttcacttttgttccagtactataattgctcatgcactctttctcccctttgagaacattcagtgaaatacaacttcatcaaagatttgctcaaaggagaagaatcgcatgagtgtgaaaagtagatgctcgtagccagaacagaaaaggttacacatgatcatggcacagaagataggaggtttgacttggtgggccataatgtttattatcctttttgaaataacagggaccagcagcagttttctcaggataaatgctctaccccacttctctatgaacaggtgtggggaggcttactttccattttcatatttatacacctctctacaaaagcaatttttaatgaaggttagtggaattgttaaaaatctgagaggaatgatgactggaggtgtttggggtttttttctgtattcattttttaatgagaaaagttttaaatgtagtacaggttagacccaactactaccttactattataggacgattctatgtttctgttaaagtattcaagtagctttctctgggggaaaaagtaccacttggacacttaaaggaattgggatttttgtctactttggataaggcagttgacttcttaagtaaaagcaatagtgtaaaatgtcattttgtttggaatgttaagtgagcaaataaaaaacatgttgaaattgt

SEQ ID NO: 350 - DNA, 3175 bp, Homo sapiens
ttatgcgaacacaagtatatgaggggttgtgtaaaaattatttttctcttgctgtactacaaagagatagaatcaaactgctttttttcgacatactggtttttctttctgtttttcttctctttcttctatttcttgtggatattatggctaataacacaacaagtttagggagtccatggccagaaaacttttgggaggaccttatcatgtccttcactgtatccatggcaatcgggctggtacttggaggatttatttgggctgtgttcatttgtctgtctcgaagaagaagagccagtgctcccatctcacagtggagttcaagcaggagatctaggtcttcttacacccacggcctcaacagaactggattttaccgccacagtggctgtgaacgtcgaagcaacctcagcctggccagtctcaccttccagcgacaagcttccctggaacaagcaaattcctttccaagaaaatcaagtttcagagcttctactttccatccctttctgcaatgtccaccacttcctgtggaaactgagagtcagctggtgactctcccttcttccaatatctctcccaccatcagcacttcccacagtctgagccgtcctgactactggtccagtaacagtcttcgagtgggcctttcaacaccgcccccacctgcctatgagtccatcatcaaggcattcccagattcctgagtagggtggcttttggtttttgtttctttcttgtcttgtcttttattgaaaggaaatcaaaaataggctaaacagaattttgagggcatggcccaaataactcatgagttccaagttgaaacatggttgtgcaagttggacattacaatgtaaaacacattttcttcaaacacgttttcccttttgtttcaaaaaatgtaatattttcccccaagcgttttatatttatgtattttgtattcaatgtgaggcttattaaaaatagtgattctaatgtaagaatcagctaagatgcattatatatattttaattaaaattaaaacttcagatatttgtggattacaatcctcatttacttccaatgtgactaaaaagagaaaaaaaatcactgtgtcactttaaagaaaaatcttctaagggatttggattttactttctttagaatgacaagtgaatcatattgacattttacaatcttagatttttctttttttttcttttgagacagggtcttgatccgtcgcccaggcgggagttgcagtagcatgatcaggactcactgcagcctctatctcccaggctcaagtaatcctcccatcttagtgccccaagtagctgggactacaggggtgcactaccacaccgggttgaatttttttttaattttagtagagatgaagtgtcactatgttaccaaggctggtctcaaactcctaaactcagatgatcctcctgcctcggcctcccaaagtgctggaattagcctggccaatcttggatttttaatggaatatgtgggcacaaaatgacagaacataggacattctaaagttccttgatttgatcattataagaagtgtgggactcaagcacaggaaactgaactcttttggtgtcattggatgtttcatttttgacactaattttttctggacaaactctttatgtgtttttcccaagaatagttatctacttcctggaggcaaaatccttggatttactaacatgatgatttaccttttcttcaccgttgtcgttacattgttagaaaagcaacaggaaaaaatccaattcatttgacctaaaaacaagcctcaagtttaaaaccaagctcacgtttttcttaagggaaaaattttctttcttaaacttacatctagcaacttggaaagcactttctctggggatcttcttttgtaactttgcagacaaataagtatgagtcactggggagagagtttgttattgaaatagatgttgcccatgaagaattctccttcctggattgactcttaatcatcaggcatcattcctggtttgcttctctacgaatctcaattccaacttctctgcagagtctgtacagtgattaagccatgccagatggtctttggtgcacacagttatttaagaatccacttccacaggtggctgcccttgtaaggaagaatgcatccctaaatgtggccaccagagagttccagtgggcagatgtctgtggctgcccttctcatttaaggacatgagttcactggagtattactcaaaaagtctgtggttcatttccagtattgtgaatatttagtttatgtggccgtttctttgtttctttgaacagtgggattttcagtgaaaaagtaccctctttttcatttcctattgcagtggtcacagctaatagtgtctgaacatggttcaagaataagagattccatgtagcattttctttattattttcatttcccttatattatccatcattccttaaggacaattattcttaataatgcttatagaaaatgttctctaattaaacatgccaaaaggaaaaagtaagagaaagagggagcaagaagaaaatggaagaaaaagggaaaaaagctaaccggataaccaatttgttataagttggttttcaacaaagaaatttagcagccaagtaaggtttcaagggaatattaacttggtatcagggctacttttttttttttttttttacttgcatgtcatccttaatgtctaacatgaaaaatcagcaaagagtatggtttttatcaagaatttgtgttgggagtaaaaactgctttatagctcccaaattaggaagagaagagcagaaatcctctggggcatttaaccatctggcagaattgttgctgcacccttatcccagttataagacagtcaaaatgactatttcctaaatattgtgagtgtatgaaatgtgaaattaaagcaaaaactggagacttttaatgtatttctttaatttgaaatgttttgtggattgtgaaataaaaataaatttatgtcaagttttattcaaaattcatttatgaaataatgccaacactgttctaaaaagcaaggagtcaagaaattataaaattcagattaaatcaggaaaacacattagatggaaaattatactatagaatttgagcttattaaaatttattgcata

SEQ ID NO: 351 - DNA, 5435 bp, Homo sapiens
accctcttttcttatcattgacatttaaactctggggcaggtcctcgcgtagaacgcggctgtcagatctgccacttcccctgccgagcggcggtgagaagtgtgggaaccggcgctgccaggctcacctgcctccccgccctccgctcccagtgcaccctccgaggactgggagtcccgagtccagcttagggggagtgggggcgcgacccccaacccagaaaccttcacttgaccgctcaagttcgcggcagcagggcgggccgcgccgaatctcggcgtgcgcggagcggggagatgcaggcgagcgccagagcccgggctcgggggccctgcgccggggagaggagccgggacccaccggcggagccgaaaacaagtgtattcatattcaaacaaacggaccaattgcaccaggcggggagagggagcatccaatcggctggcgcgaggccccggcgctgctttgcataaagcaatattttgtgtgagagcgagcggtgcatttgcatgttgcggagtgattagtgggtttgaaaagggaaccgtggctcggcctcatttcccgctctggttcaggcgcaggaggaagtgttttgctggaggatgatgacagaggtcaggcttcgctaatgggccagtgaggagcggtggaggcgaggccgggcgccggcacacacacattaacacacttgagccatcaccaatcagcatagggctgcagccacttccctcacccacactctttatctctcactctccagccgctgacagcccattttattgtcaatctctgtctccttcccaggaatctgagaattgctctcacacaccaacccagcaacatccgtggagaaaactctcaccagcaactcctttaaaacaccgtcatttcaaaccattgtggtcttcaagcaacaacagcagcacaaaaaaccccaaccaaacaaaactcttgacagaagctgtgacaaccagaaaggatgcctcataaagctacttccagcgaaagcccgcgtcggagggcgactgccggcgagcgggagcggcgcagggctcggggcgggcggccagctcagccccagcgccagcgccagcgccagcgcgggctgagctcgcgggaagaagggagactccaggcgcgacagcagccgcggctcctagccccagcgtcgcccaatgctcccgacccgcgggaaaagacgaagaggctctgtggtgcccaaggccctggaacggccgcagagagcaaccgctgccggctgctttgtccagcccgaggcccagcgaacgcgcagagagcgggcgctccgaggactcgccgagggagcgccgagggaacctgctcgccgcgtctccgcccgcccgccggccctcgggctttgtgccgcactgggctccggcgcagaagagtcagccggcactcgagcgccgaggggggcaccgcgcccgccaccagcccgagtggagtcagtcggcaaggcagccgcacgctggaggtagagggaagagcgagctagcgcgagccgggaaggaagccaccaggccaaggcggtggaacgcgcgctccgagggagctcagagccgagcgggaggactgtcagcttccacccagcccccgggctcttgcccccaactccactggagcgctgagctcggaacttgaaaactctctgctccccaggcttcccccgactctcatctcccttgccttgcggaggctggggctcttccctgttctccggccccctgcgcttgagggggaagactttaactaggggcgcgcagatgtgtgaggccttttattgtgagagtggacagacatccgagatttcagagccccatattcgagccccgtggaatcccgcggcccccagccagagccagcatgcagaacaagtaggctccaaggagaagagaggagaggagaggagagctgaacagggagccacgtcttttcctgggagggctgctatctaagtcggggctgcaggttggagatttttaaggaagtggaaattggcaattggctttgtgtgtctgtggtttttggggagggggactacaaagaggggctaactccctctccctattctctaaggttggaccacagggatgaggttgtgagatacaaagataaaggagggatggggaacactatgatgtggtatttttcttttctgttttttctttttgataatatctatccttggctaaggggagggcggagttcagcggcggaaataaagcgagcagtggctggtgcgaaccgactcccggctctaagccttacttgcggtggccggacttgtctgtggctgaagccgagcccgggctctgactctcacgtctgcactggaggtgcggaaacctggactggggttcaccagccacatactggctgctctggttgttctctcctcttccttcttctattctaaccaaacaaaacccaactcgatgcttgtgccaggccttggccagtttggacggtgatggaaacatttctggattttagcgtctaagggagcactcaagggctgtaaggtttgctatcactgtcccaacactgcagagaccttgaaggttcagtgtgggatctgtagaacccatggtttgcggtgacactcagaggggatctttgggagatttatagagccggttcttagcgctttgtgggttcagaggctggctgcagtgtttatgaagaggggcagtgggctggggacactgctggggttatggctgtagtgaggtccatgtgtacttgttccttggcatgtgtctgactctgtgttgctgctgcagtacagtgggcaggggcacggttgcttggactgggctgcccgatgtctggcatggctggtggtcctgttgtcctttatttgatcgatagcagggaactgaccgccgaggttggcacaggttggcagggggatgaggatgcattgtggttgtctcctcctcctctccttcttcctcttccccttcctcctctcctttctgttcttgttctccctcatcttcctcttccttcttctccctcttcttcctcttcactctgctctcttctcttcttttcccctttcctctcctctccctttcctcaggtcacagcggagtgaatcagctcggtggtgtctttgtcaacgggcggccactgccggactccacccggcagaagattgtagagctagctcacagcggggcccggccgtgcgacatttcccgaattctgcagacccatgcagatgcaaaagtccaagtgctggacaatcaaaacgtgtccaacggatgtgtgagtaaaattctgggcaggtattacgagactggctccatcagacccagggcaatcggtggtagtaaaccgagagtagcgactccagaagttgtaagcaaaatagcccagtataagcgggagtgcccgtccatctttgcttgggaaatccgagacagattactgtccgagggggtctgtaccaacgataacataccaagcgtgtcatcaataaacagagttcttcgcaacctggctagcgaaaagcaacagatgggcgcagacggcatgtatgataaactaaggatgttgaacgggcagaccggaagctggggcacccgccctggttggtatccggggacttcggtgccagggcaacctacgcaagatggctgccagcaacaggaaggagggggagagaataccaactccatcagttccaacggagaagattcagatgaggctcaaatgcgacttcagctgaagcggaagctgcaaagaaatagaacatcctttacccaagagcaaattgaggccctggagaaagagtttgagagaacccattatccagatgtgtttgcccgagaaagactagcagccaaaatagatctacctgaagcaagaatacaggtatggttttctaatcgaagggccaaatggagaagagaagaaaaactgaggaatcagagaagacaggccagcaacacacctagtcatattcctatcagcagtagtttcagcaccagtgtctaccaaccaattccacaacccaccacaccggtttcctccttcacatctggctccatgttgggccgaacagacacagccctcacaaacacctacagcgctctgccgcctatgcccagcttcaccatggcaaataacctgcctatgcaacccccagtccccagccagacctcctcatactcctgcatgctgcccaccagcccttcggtgaatgggcggagttatgatacctacacccccccacatatgcagacacacatgaacagtcagccaatgggcacctcgggcaccacttcaacaggactcatttcccctggtgtgtcagttccagttcaagttcccggaagtgaacctgatatgtctcaatactggccaagattacagtaaaaaaaaaaaaaaaaaaaaaaaggaaaggaaatattgtgttaattcagtcagtgactatggggacacaacagttgagctttcaggaaagaaagaaaaatggctgttagagccgcttcagttctacaattgtgtcctgtattgtaccactggggaaggaatggacttgaaacaaggacctttgtatacagaaggcacgatatcagttggaacaaatcttcattttggtatccaaacttttattcattttggtgtattatttgtaaatgggcatttgtatgttataatgaaaaaaagaacaatgtagactggatggatgtttgatctgtgttggtcatgaagttgttttttttttttttaaaaagaaaaccatgatcaacaagctttgccacgaatttaagagttttatcaagatatatcgaatacttctacccatctgttcatagtttatggactgatgttccaagtttgtatcattcctttgcatataattaaacctggaacaacatgcactagatttatgtcagaaatatctgttggttttccaaaggttgttaacagatgaagtttatgtgcaaaaaagggtaagatataaattcaaggaagaaaaaaagttgatagctaaaaggtagagtgtgtcttcgatataatccaatttgttttatgtcaaaatgtaagtatttgtcttccctagaaatcctcagaatgatttctataataaagttaatttcatttatatttgacaagaatatagatgttttatacacattttcatgcaatcatacgtttcttttttggccagcaaaagttaattgttcttagatatagttgtattactgttcacggtccaatcattttgtgcatctagagttcattcctaatcaattaaaagtgcttgcaagagttttaaacttaagtgttttgaagttgttcacaactacatatcaaaattaaccattgttgattgtaaaaaaccatgccaaagcctttgtatttcctttattatacagttttctttttaacctta

SEQ ID NO: 352 - DNA, 801 bp, Homo sapiens
gctggccgtgggagaggcttaaaacaaacgccggaagcaactcccagccccataaagatctgtgaccggcagccccagacctgcctgccttcctgacttctgttccagagcaaaggtcattcagccgcttgaatcagccttttccccccacccggtccccaactttgtttacccgataaggaaggtcagcattcaaagtcaagaagcgccatttatcttcccgtgcgctctacaaatagttccgtgagaaagatggccgggaactcgatcctgctggctgctgtctctattctctcggcctgtcagcaaagttattttgctttgcaagttggaaaggcaagattaaaatacaaagttacgcccccagcagtcactgggtcaccagagtttgagagagtatttcgggcacaacaaaactgtgtggagttttatcctatattcataattacattgtggatggctgggtggtatttcaaccaagtttttgctacttgtctgggtctggtgtacatatatggccgtcacctatacttctggggatattcagaagctgctaaaaaacggatcaccggtttccgactgagtctggggattttggccttgttgaccctcctaggtgccctgggaattgcaaacagctttctggatgaatatctggacctcaatattgccaagaaactgaggcggcaattctaactttttctcttccctttaatacttgcagaagctgttcccaccatgaaggtaatatggtatcatttgttaaataaaaataaagtctttattctgtttttcttgaaa

SEQ ID NO: 353 - DNA, 3170 bp, Homo sapiens
gccttggagccagagagacgcagctaggcctgcacggctgtggagagatcctgccacgggccttgttcaccatgtcggtgctggatgcgctttgggaggatcgggatgtccgtttcgacctgtccgcgcagcaaatgaaaacaagacctggagaagtccttattgattgtttagattccattgaagacaccaaaggaaataatggagatagaggtagactcttggtaacaaatttaagaattctctggcactctttggcattatcaagagtcaatgtttctgtcggttacaattgcatattgaatattacaacaaggactgctaactctaaattacgaggccaaactgaagctctctatatactaacaaaatgtaacagtactcgttttgaatttatatttacaaatttggttcctggaagccctagactttttacttctgtgatggcagtacacagagcttatgaaacttctaaaatgtatcgtgattttaaattaagaagtgcactaattcagaacaagcaactaagactgttgccacaagaacatgtatatgataaaataaatggagtttggaatttatccagtgatcagggcaatttaggaaccttttttattaccaatgtgagaattgtgtggcatgcaaatatgaatgatagttttaatgtcagtataccatatctgcaaattcgttcaataaagattagagattcaaaatttggtttagctcttgtcatagaaagctctcagcagagtggtggatatgttcttggctttaaaatagatcctgtggaaaaactacaagaatcagttaaggaaatcaattcacttcacaaagtctattctgccagtcccatatttggagttgattatgagatggaagaaaagccccagccgctcgaagctctgacagtcgaacaaattcaagatgatgtagaaatagactctgatggtcacacggatgcttttgtggcttattttgctgatggcaataagcaacaagatcgtgaacctgtattttcagaagaactggggcttgcaatagagaaattgaaggatggattcaccctacagggactttgggaagtaatgagttgattgaccttgagttgagatggatttctattaaagatatctctagtttaaagatactagtcacctgccataagtcatggaatagtttttatatttacagcttttatatttaaaacttgtaagagtttttttaatgattgaggaaaaagtcatttagaaaacttcagttttcggccagcgcgtcgagggaggggccagcgacacatggcctagtaaccgtccggccgcggcgctggcttaagccatggctgagggtagctggattcctcaggcccgggcgctcctacagcagtgcctgcacgcccggctgcaaattcgcccagccaatggggacgttgcggcccagtgggtggaggtccaaagaggactggtgatctacgtgtgctttttcaagggagctgataaagaacttcttcccaaaatggccgaagctggactgtactgctgccatctctggctcactgcaacctccctgcctgattctcctgcctcagcctgccgagtgcctgcgattacaggcgcgcgccgccacacctgactggttttcgtatttttttggtggagacggggtttcgctgtgttggccgggctggtctccagctcctaaccgcgagtgatccgccagcctcggcctcccgaggtgccgggattgcagacggagtctggttcacttagtgctcaatggtgcccaggctggagtgcagtggcgtgatctccgctcgctacaacctccacctcccagctgcctgccttggcctcccgaagtgccaagagtgcagcctctgcccggccgccaccccgtctgggaagtgaggagcgtctctgcctggctgcccattgtctgggacgtgagcagcccctctgcctggctgcccagtctggaaagtgaggagcgtctctgcccggccgccatcccatctaggaagtgaggagcgcctcttcccacccgccatcccatctaggaagtgaggagcttctctgcctggccgcccatcgtctgagatgtggggagcacctctgcccggccgcgaccccatttgggaggtgaggagcaactctgcccagccgccccgtctgagaagtgaggagaccctccgcctggcaaccgccccgtctgataagtaaggagcccctctgcccagcagccgccccgtctgagaagtgaggagcccctctgcccagcagccaccctgtctgggaagtgaggagcgtctccgcccggcagccacccagtccgggagggaggtgggggggtcagtcccccgtccggccagccgccccgtccgggaggtgaggggcgcctctgcccagctgcccctactgggaagtgaggagcccctctgccccgccagccaccccgtccgggagggaggtgggggggtcagccccccgcccggccagccgccccgtccgggagggaggtgggggatcagccccccgcccggctagccgccccgtccgggaggcgaggggcgcctctgcccggctgcccctactgggaagtgaggagcccctctgcccggccagccgccccgtccaggagggaggtgggggggtcagccccccgcccggccagccgcccggtccgggagggaggtgggggggtcagccccccgcccggccagccgccccgtccgggaggttaggggcgcctctgcccggccgcccctactgggaagtgaggagcccctctgcccggccaccaccccgtctgggaggtgtacccaacagctcattgagagcgggcgatgatgacagtggcggctttgtggagtggaggtggggggaaggtggggaaaagattgagaaatcggatggttgccgtgtctgtgtagaaagaagtagacatgggagacttttcattttgttctgtactaagaaaaattcttaccctaaaacttaaagtataataaaaaaaaaaaaacttcagttttctaaaaattatatttaaaattgtaatcaaaatgtacctagtttataaatgtttattttgtacttaatacctgtaaagtcttagttttcagacattaagtgactgtatcatgttcggtttaataaagaatttatgcagcacca

SEQ ID NO: 354 - DNA, 5078 bp, Homo sapiens
tgcgagcaacagatccggacgccgcgagctgacccgctctgctgttgggcgatttttttttaattgcagaaaaatttattaaattggaaaatcttgcgtttttcaatggcgctggccccgggtcagcgggcgattttctctgcatcaagatgggctttgccgtttccgtagtgggcaccagtggtggcctgattgtcagtcttctcccggcatttttaaggccaggagccgagcgctgcttgtaggcgaataccctacagagcggtttggctttttaaattactgttattattttgggcagagaacagtcggtctggtgcaccccgtcctcgctgcagaagaggctgcgagtccgaggtgggtctctcggaaggtgaaattccttctggggtgagcgagccccggccccgcgcgcagtccagcggccccgcgtgtgtgccctcgccctgccggagccgggaaaatggaggctgtgattgagaaggaatgcagcgcgctcggaggcctcttccagaccatcatcagcgacatgaaggggagctatccagtttgggaagatttcataaacaaagcaggaaagctgcagtcccagcttcggacaacagtagtagcagcagctgccttcttggacgcctttcagaaagtggctgacatggccaccaacacacgtggtgggaccagggagattggatctgctctcaccaggatgtgcatgaggcacagaagcattgaagccaagctgaggcagttttcgagcgctttaattgattgtctgataaacccacttcaagaacagatggaagaatggaagaaagtggccaaccagctggataaagaccacgcaaaagaatataagaaagcccgccaagagataaaaaagaagtcctcggatacgctgaaactgcagaagaaagcaaaaaaagggtgggggttgtgcagtgtgagaagggagaggtgatatccagcctcagttggacagtgctctccaagatgtcaatgataagtatctcttattggaagaaacagaaaagcaggctgtccggaaggctttgattgaagaacgtggccgattctgtaccttcatctctatgctgcggccagtgattgaagaagaaatctcaatgctaggggaaataacccaccttcagaccatctcggaagatctaaaaagcctgaccatggaccctcacaaactgccctcctcaagtgaacaggtgattctggacttgaaaggttctgattacagctggtcgtatcagacgccaccctcttcccccagcaccaccatgtccagaaagtccagtgtctgcagcagcctgaacagtgtcaacagcagtgactcccggtccagcggctcccactcgcattcccccagctcacattaccgctaccgcagctccaacctggcccagcaggctcctgtgaggctgtccagcgtgtcctcccatgactcaggattcatatcccaggatgccttccagtccaagtcaccatcccccatgccgccagaggcccccaaccagaactcgtccagctcggcctcctccgaagcctcggaaacctgccagtcagtgagcgagtgcagctcccccacctctgtcagctcgggctccaccatgggtgcctgggtgtccacagagaagttgtctaacgggttttctcactatagtttatcaagtgagtcccacgtggggcccacgggtgcaggccttttccctcattgcctgcctgcctcccgcctgctccctcgggtcacctctgtccaccttccagactacgctcattattacaccattgggcccggcatgttcccgtcatctcagatccctagctggaaggactgggctaagcctgggccctatgaccagcctctggtgaacaccctgcagcgccgcaaagagaagcgagaaccggaccccaacgggggaggacccactaccgccagcggcccacctgcagcagctgaggaggctcagagaccacggagcatgactgtatcggctgccaccaggcctggtgaggagatggaggcttgtgaggagctggccctggccctgtctcggggcctgcagctggacacccagaggagcagccgggactcgcttcagtgctccagcggctacagcacccagacaaccaccccctgctgctctgaggacaccatcccttcccaagtttcagattatgattatttctctgtaagtggtgaccaggaggcagatcagcaggagttcgacaagtcctccaccattccaagaaacagcgacatcagccagtcctaccgacggatgttccaagccaagcgtccagcctcaactgctggcctccccaccaccctgggacctgctatggtcactccaggggttgcaactatccgacggaccccttccaccaagccttctgtccgccggggaaccattggagctggtcccatccccatcaagacacccgtgatccctgtcaagaccccaaccgtcccagacctcccaggggtgttgccagcccctccagatgggccagaagagcggggggagcacagccctgagtcgccatctgtgggtgagggcccccaaggtgtcaccagcatgccctcctcaatgtggagcggccaagcttccgttaaccctccacttccaggcccgaagcccagtatccctgaggagcacagacaggcaattccagaaagtgaagctgaagaccaggaacgggaacccccaagtgccactgtctccccaggccagattccagagagtgaccctgcagacctgagcccaagggatactccacaaggagaagacatgctgaacgccatccgaaggggcgtgaaactgaagaagaccacgacaaacgatcgctcagcccctcgcttttcttaggttcacaagaaatgcgccggtggggaatgaactgtttcattaataaaacctaatttgtcttgatccattccactctataataaaacaaaagattttgtaggcaactcggaatatagctcttttgaaagtactcgacacctttagataagaattaaaaccaacctatgtaactgacataatcttgatcttttaatttgtaaatattgacaattttctttctgcacattttaatcttagtttcccttttgatttttctgaaggtgccaaattccatttaacttttttacaagtctttgtaaaattttaaatgcataaagggggttggggcaggggaaccacgaagtagttaattttagaaaaggatttactatacttcactcttctttttttttccccacaagcttttgtagatgcattgtagtagtctagcttagaagcaaatgcaagttattttaatgtacaaactaaatgggtaagaggtaaaatcttcatttaaatatactatgttctggatgaaaagagcaggagtaacaattgatgagcaatattcagagtgaagtaaatctggaaatggtagactgtgttgggattggggggagggccatgggaggggtacatcgtcaacatagccgatcctgttacatttaagagtagcctcgtaggttgaatttcttctggtagcttcatggtaaatgcatccgaataagccatactggattgcagtgtttgtttctgtagggtgtttaaggacttgacttcctttctcccatgattcctctggactgcacacagcacccacaaccagccccatgcatgctgctgcctctgggcagtcgtagaatctcccacttcagtttctcgttgattgtactcacctttatggaatccaaatacatccaaaagggtaaggcagttttaaaaatgtgaaaacatttaaaaatgataatagcagggaattcttagattatagtaaatgccttttacttaactgtgcccagcaggctgggtgcgttaaaaagcccaagtattttgaaaaaactcgaacagatttgacaagggtagccagcttggagtctagcaacttgccaatgtgtttaccaatctgggggcttgtttttcttttcttctttcaaataaatggcagttaactggctttacagtaaacattgaagagaggaggatttgtttattgtcactgggaatctgaccactatactgtcctttttttgtattctgggtaaatgttttttggaaaagatttgtcttttctaagtggaagttaaatttgttatactgcccatcccctaaagccaacagagatttgtagatttaaagggatcacatttgaagacaatagtgtttaagaaagcaagcaagtcccttagcagtcaggtcataacagggcacatttctgaccgaaccctctcaaggcagaggaggagtttggtgggtttcatacaccctgcagattcctgttggctctaaccctcaattacctaatcttatgctttaacacataactgcattggatgtgagagtaacgtaccgtatggtcattgttctatatattaacattgaacactgctgcgattgctcaaggacattttatgttacggctttaaagcaaaggcatgattattagaaactatttaagcttttttctttgaaaaacaagctccttttacagaatataaacaacagtagtgcctgtggtttagcccaccaatcttgatgactaaaagtagctgatgcattgtgcatatgatgcttgagatggtttttgcaaaagcagaaatcgctgcaaggtaatcacaatagataaaagtggtattttaaacctttgaaataaatggatgtaactgtaccttggtacagcttttcacttgtttagtttttaaacgttagtataatctgaataaataaaatgttgccaaattcaatgtagaaagaatgtgacaacacaccttgggtagttctgcttgtgtttttgcatattgtaaaagcagtgtcacagctaaaaagaaagaaatcgtttctaacagtaaattattgtgctttagttgctagtttgtactgagagttgacctctccctgtgcagttttttgttctaaacttgtataaataacaattgtgtaatgtgtctccctcctacattgtaacaattgcttcagcctacgttataaataaagaaccactagatt

SEQ ID NO: 355 - DNA, 2022 bp, Homo sapiens
caatcatggatcaatagctatgtttggagaaggaatttgtggctgctccagctactgggcattttgtctggtccagttcatgtaatctcccaacaccccatgaagcaaggctttgttaatcctattttactgaaaatgaactaagactcagagagataaagctgttgcccaatgagccttctttctgccctccagatccacggtgctaattccccttccgatgacctaatgattctgagcttggcaaaggtcttatctcccagctcgcccaggcccagtgttccaggaatgtgacctttgctgcagcagccgctggagggggcagaggggatgggctggaggttgagcaaacagagcagcagaaaaggcagttcctcttctccagtgccctccttccctgtctctgcctctccctcccttcctcaggcatcagagcggagacttcagggagaccagagcccagcttgccaggcactgagctagaagccctgccatggcacccctgagaccccttctcatactggccctgctggcatgggttgctctggctgaccaagagtcatgcaagggccgctgcactgagggcttcaacgtggacaagaagtgccagtgtgacgagctctgctcttactaccagagctgctgcacagactatacggctgagtgcaagccccaagtgactcgcggggatgtgttcactatgccggaggatgagtacacggtctatgacgatggcgaggagaaaaacaatgccactgtccatgaacaggtggggggcccctccctgacctctgacctccaggcccagtccaaagggaatcctgagcagacacctgttctgaaacctgaggaagaggcccctgcgcctgaggtgggcgcctctaagcctgaggggatagactcaaggcctgagacccttcatccagggagacctcagcccccagcagaggaggagctgtgcagtgggaagcccttcgacgccttcaccgacctcaagaacggttccctctttgccttccgagggcagtactgctatgaactggacgaaaaggcagtgaggcctgggtaccccaagctcatccgagatgtctggggcatcgagggccccatcgatgccgccttcacccgcatcaactgtcaggggaagacctacctcttcaagggtagtcagtactggcgctttgaggatggtgtcctggaccctgattacccccgaaatatctctgacggcttcgatggcatcccggacaacgtggatgcagccttggccctccctgcccatagctacagtggccgggagcgggtctacttcttcaaggggaaacagtactgggagtaccagttccagcaccagcccagtcaggaggagtgtgaaggcagctccctgtcggctgtgtttgaacactttgccatgatgcagcgggacagctgggaggacatcttcgagcttctcttctggggcagaacctctgctggtaccagacagccccagttcattagccgggactggcacggtgtgccagggcaagtggacgcagccatggctggccgcatctacatctcaggcatggcaccccgcccctccttggccaagaaacaaaggtttaggcatcgcaaccgcaaaggctaccgttcacaacgaggccacagccgtggccgcaaccagaactcccgccggccatcccgcgccacgtggctgtccttgttctccagtgaggagagcaacttgggagccaacaactatgatgactacaggatggactggcttgtgcctgccacctgtgaacccatccagagtgtcttcttcttctctggagacaagtactaccgagtcaatcttcgcacacggcgagtggacactgtggaccctccctacccacgctccatcgctcagtactggctgggctgcccagctcctggccatctgtaggagtcagagcccacatggccgggccctctgtagctccctcctcccatctccttcccccagcccaataaaggtcccttagccccgagtttaaa

SEQ ID NO: 356 - DNA, 1096 bp, Homo sapiens
cgagctcactggtgacgtagatctcatgtgaccaggagtcgacgtgtgcagaagtcctggtaatctggtccttgttcccgtctggataccagcttccttcagcagcgcaggcggtggtccctgaggcccgtggaaggagtcaaacttgcgggaattttgcagtttatctgcagggctgttgtttccagcaagacccaaagctagaaaaggaggaggaagaaactgacccgatcagtgccagaagtcattgtattcaaagaagaataagcaagaaagaaaagaaggaaggaagagaggtagacagatacaagatgaaatcctgtcaaaaaatggaaggaaaaccagaaaatgagagtgaaccaaagcatgaggaagagccaaagcctgaggaaaagccagaagaggaggagaagctagaggaggaggccaaagcaaaaggaacttttagagaaaggctgattcaatctctccaggagtttaaagaagatatacacaacaggcatttaagcaatgaagatatgtttagagaagtggatgaaatagatgagataaggagagtcagaaacaaacttatagtgatgcgttggaaggttaatcgaaaccatccttacccctatttaatgtagtttaccttgatttttatctgatattaacaataccatatagcttgctttttattagcatttcctgatattcctttgtccatatttctacttataacctgttgctattaatggttttagatgtatctcttgttatctgcatctcattgtttattgtattttgaaccaatctacaagtctctgtcttttaataaaagaactttacacatttgtaaaaaagaggttcttggtaagatataaaatggaaaaaggctaagtaatatgtgaatatcatatttttgaaaggtaaaaagtacatttgtatattacatatatggacataacttgtgaaggatgaaagaaagtacagcctctcggtggtgggattatgaatgatttttctccttttgcttgtttgtattttctatattcctaaaattaacacacattattattgctagaataataaaagttttataaaaaagaagcaacaa

SEQ ID NO: 357 - DNA, 1197 bp, Homo sapiens
atggaggacgactcactctacttgagaggtgagtggcagttcaaccacttttcaaaactcacatcttctcggcccgatgcagcttttgctgaaatccagcggacttctctccctgagaagtcaccactctcatgtgagacccgtgtcgacctctgtgatgatttggctcctgtggcaagacagcttgctcccagggagaagcttcctctgagtagcaggagacctgctgcggtgggggctgggctccagaatatgggaaatacctgctacgtgaacgcttccttgcagtgcctgacatacacaccgccccttgccaactacatgctgtcccgggagcactctcaaacgtgtcatcgtcacaagggctgcatgctctgtactatgcaagctcacatcacacgggccctccacaatcctggccacgtcatccagccctcacaggcattggctgctggcttccatagaggcaagcaggaagatgcccatgaatttctcatgttcactgtggatgccatgaaaaaggcatgccttcccgggcacaagcaggtagatcatcactctaaggacaccaccctcatccaccaaatatttggaggctactggagatctcaaatcaagtgtctccactgccacggcatttcagacacttttgacccttacctggacatcgccctggatatccaggcagctcagagtgtccagcaagctttggaacagttggtgaagcccgaagaactcaatggagagaatgcctatcattgtggtgtttgtctccagagggcgccggcctccaagacgttaactttacacacctctgccaaggtcctcatccttgtattgaagagattctccgatgtcacaggcaacaagattgccaagaatgtgcaatatcctgagtgccttgacatgcagccatacatgtctcagcagaacacaggacctcttgtctatgtcctctatgctgtgctggtccacgctgggtggagttgtcacaacggacattacttctcttatgtcaaagctcaagaaggccagtggtataaaatggatgatgccgaggtcaccgcctctagcatcacttctgtcctgagtcaacaggcctacgtcctcttttacatccagaagagtgaatgggaaagacacagtgagagtgtgtcaagaggcagggaaccaagagcccttggctctgaagactaa

SEQ ID NO: 358 - DNA, 1994 bp, Homo sapiens
cgccgcgccggcgcctagcccgccgggtcagcgcggccaggcctcgccgccggccccgctcccagggtgcaccgcggctagcgctggggtgggagcgggcgagatgcgccgggcgggcggtgcccactgacctccctcggcggcccggcccgggcagcgcccgagcccaggcagccccgcccgccgcgccccgcccagcccatgggccacgggcccccaccgccgcccgccgggaggaccgagcctaagagggcagccgcctgaaggaacgcgacggcggcgcccgcagtatttttcagtgctgtacaagcgtcttgaattactctggtagcttttccagaaagacccatgacttcaccacatttctcgagttacgatgaaggtcctctggatgtcagcatggcagccacaaacctggagaaccagctgcacagcgcacagaagaacctcctgttccttcagcgggagcatgccagcacgctcaaggggctgcactccgagatcaggcggctgcagcagcactgcacagatttaacatatgagctgacagtcaaaagttcggaacagacaggagacgggacttctaaaagcagtgaattaaagaaaagatgtgaagagctggaagcccaactgaaagtgaaagagaacgaaaatgctgagttgttgaaagaactggagcagaaaaacgcgatgatcacagtgctggagaacaccatcaaggagcgagagaagaagtacctggaggagctgaaggccaagagtcacaagctgaccctgctgtctagcgagctggagcagcgggccagcaccatcgcctacctgacctcccagctgcacgccgccaagaagaagctcatgagctccagcgggacctcagatgccagcccgtcagggagccccgtgctggccagctacaagccagcgccccccaaagacaagctacccgaaacgcctcgccgccgcatgaaaaagagcctctcagcccccttgcacccggaatttgaagaggtctacagattcggggcagagagcaggaaactccttttgcgggaaccagtggatgctatgcccgaccccaccccatttctgctggctagggagtccgccgaggtccacctcatcaaagagaggcccctcgtcatcccccccatcgcctccgaccgaagcggcgagcagcacagcccggcccgcgaaaagccgcacaaggcccacgtcggggtggcacatcggatccaccacgccaccccgccgcaggcccagcccgaggtgaagaccctggcggtcgaccaggtgaacggaggcaaggtggtgaggaagcactcagggacggacagaactgtgtgaagcccgccgtgccccaccccgcgctgtccatgcactgtgagcaccactgggaaatctcagccacaccttttctgtttaatcccatgcatgccaaacacttttcacacctaccgacccattctccttctgcttctcttgccctcttcttcacaccaaaatatgatcgtgtccctgccgcagaatatgtatttcctaattgctgtggccaaacgcctgtgtgccgaatcgcttgcttctgatcccgctccgtgtaacctaagtgcgctgcaggcaaagcccaggccacggctgcgtcactactgatgttcacgatgccacacagtcacacacctaattcattctcaagtcggagcaacacataccaaccttgaccttatcctcaagctccagggcagcctggccgagcagcccctgctccctcctggagacccttgtcacctcccgagctcctcctggagacccctgtcacctcctgaccaacctttcccagggcggcaccgatcaccgagcagccgtgcgtgtatctcaaggaactaaataagatgacgctactcctcatagcaccacaacctgaatgtgtgttcatatttttttgttagttttatccaaaatgtttaagatcccaacaaactttattttctaaacctgcc

SEQ ID NO: 359 - DNA, 2757 bp, Homo sapiens
aaaaacgctgcccggggaaagtccgggcagagcccgagcagcggccagggtaacgctgtcttgtggacccgcacttcccacccgagacctctcactgagcccgagccgcgcgcgacatgagccacgggaagggaaccgacatgctcccggagatcgccgccgccgtgggcttcctctccagcctcctgaggacccggggctgcgtgagcgagcagaggcttaaggtcttcagcggggcgctccaggaggcactcacagagcactacaaacaccactggtttcccgaaaagccgtccaagggctccggctaccgctgcattcgcatcaaccacaagatggaccccatcatcagcagggtggccagccagatcggactcagccagccccagctgcaccagctgctgcccagcgagctgaccctgtgggtggacccctatgaggtgtcctaccgcattggggaggacggctccatctgcgtcttgtacgaggaggccccactggccgcctcctgtgggctcctcacctgcaagaaccaagtgctgctgggccggagcagcccctccaagaactacgtgatggcagtctccagctaggcccttccgcccccgccctgggcgccgccgtgctcatgctgccgtgacaacaggccaccacatacctcaacctggggaactgtatttttaaatgaagagctatttatatatattatttttttttaagaaaggaggaaaagaaaccaaaagttttttttaagaaaaaaaatccttcaagggagctgcttggaagtggcctccccaggtgcctttggagagaactgttgcgtgcttgagtctgtgagccagtgtctgcctataggagggggagctgttagggggtagacctagccaaggagaagtgggagacgtttggctagcaccccaggaagatgtgagagggagcaagcaaggttagcaactgtgaacagagaggtcgggatttgccctgggggaggaagagaggccaagttcagagctctctgtctcccccagccagacacctgcatccctggctcctctattactcaggggcattcatgcctggacttaaacaatactatgttatcttttcttttatttttctaatgaggtcctgggcagagagtgaaaaggcctctcctgattcctactgtcctaagctgcttttcttgaaatcatgacttgtttctaattctaccctcaggggcctgtagatgttgctttccagccaggaatctaaagctttgggttttctgaggggggggaggagggaactggaggttattggggttaggatggaagggaactctgcacaaaacctttgctttgctagtgctgctttgtgtgtatgtgtggcaaataatttgggggtgatttgcaatgaaattttgggacccaaagagtatccactggggatgttttttggccaaaactcttccttttggaaccacatgaaagtcttgatgctgctgccatgatccctttgagaggtggctcaaaagctacagggaactccaggtcctttattactgccttcttttcaaaagcacaactctcctctaaccctcccctcccccttcccttctggtcgggtcatagagctaccgtattttctaggacaagagttctcagtcactgtgcaatatgccccctgggtcccaggagggtctggaggaaaactggctatcagaacctcctgatgccctggtgggcttagggaaccatctctcctgctctccttgggatgatggctggctagtcagccttgcatgtattccttggctgaatgggagagtgccccatgttctgcaagactacttggtattcttgtagggccgacactaaataaaagccaaaccttgggcactgttttttctccctggtgctcagagcacctgtgggaaaggttgctgtctgtctcagtacaatccaaatttgtcgtagacttgtgcaatatatactgttgtgggttggagaaaagtggaaagctacactgggaagaaactcccttccttcaatttctcagtgacattgatgaggggtcctcaaaagacctcgagtttcccaaaccgaatcaccttaagaaggacagggctagggcatttggccaggatggccaccctcctgctgttgccccttagtgaggaatcttcaccccacttcctctacccccaggttctcctccccacagccagtcccctttcctggatttctaaactgctcaattttgactcaaaggtgctatttaccaaacactctccctacccattcctgccagctctgcctccttttcaactctccacattttgtattgccttcccagacctgcttccagtctttattgctttaaagttcactttgggcccacagacccaagagctaattttctggtttgtgggttgaaacaaagctgtgaatcactgcaggctgtgttcttgcatcttgtctgcaaacaggtccctgcctttttagaagcagcctcatggtctcatgcttaatcttgtctctcttctcttctttatgatgttcactttaaaaacaacaaaacccctgagctggactgttgagcaggcctgtctctcctattaagtaaaaataaatagtagtagtatgtttgtaagctattctgacagaaaagacaaaggttactaattgtatgatagtgtttttatatggaagaatgtacagcttatggacaaatgtacacctttttgttactttaataaaaatgtagtaggataaa

SEQ ID NO: 360 - DNA, 8571 bp, Homo sapiens
ctccccgccagtccgggcgaacgcggccgggcccttggggaccgagtctcggcgccgccggggaacgggcgcgggccgcgccacagccggagcggggcagggccccgccaccgccttcttccgccggccccgccgccggccatgcattcttccggctcctctgactcccaaagccccggctggggcccggccagcccgagggcgggggacacccgcccccgctctccgcagccgcccgccgtccgcgcccgccgaggtgagcccggcgcgcgggccgcgcccgccgccacgacccttccacatccgcggaaaccgctgcaggctccaccggctccccgcgctgcggtcgcctcttctctgcccctttcatcatcccctgcttccttgccctctggtcggaaatctcattctcttcatccccagttccttggcttttacctctttctggcttttgctcccttccccctactcctgtccttcctctttttcgcattataaccccctactttcttcctctcaccttgtaagctttttttctaggccccccattttttttcttaaaaaaaaaagggaaacaaaaaccctattgctacaaatgagaattttgagggtaactcttcgctagagccagagaccttttaaaggaatgcatcggtgtgcaggaatcgtggtggtgaggagactgaggtcctcagtatctgggaaatcttattgaggggaccctgtttcggtcatgtcacttgtgtcttcagtttggagatcctgaggttgtctgaagcgagtggatctatttttctaagtccaatagacgaccgcagtgagacacggtgcggggacggccaccgattactgaatgggaattgtgttatcatttgctaaatatattgtgacatacttcgtgcctcggtgaacagctcccttgaccttgtgcggctcctcctccctcgctctctgtccccctctggaatttcccctgagagatcaccgagaaagacaggacggagtccagtgtgagaatggctataactttggaagaagctccgtggctgggctggctcttggtgaaagcactgatgaggtttgccttcatggtcgtcaacaacctggttgctattccatcctacatctgctatgtaattatacttcagccccttcgagtgctggacagtaagcggttctggtatatcgaaggaatcatgtataaatggcttttaggaatggtagcttcctggggatggtatgctggatatacagtgatggaatggggagaagatattaaagcagtttcaaaagatgaagcagtgatgttggtgaatcatcaggcaacaggagatgtgtgcacactgatgatgtgcctccaggacaaaggactggttgttgctcagatgatgtggttgatggatcatatttttaagtacacaaactttggaattgtttctctagttcatggagacttctttataagacagggaagatcttatcgtgaccaacagctgctgcttctcaagaagcacttagaaaataattacaggagcagagatcgaaaatggattgttttgtttccagaagggggcttcctcaggaagaggcgagaaacaagtcaggcatttgccaagaaaaataacttgccatttcttacaaatgttactctgccaaggtctggggcaacaaaaattattttgaatgcacttgtagcacaacagaaaaatggaagtccagcaggaggagatgctaaagaattagacagcaaatcaaaaggcctccagtggataatagatacaacgatagcttatcccaaagctgaacctatagatattcaaacctggatccttggatacaggaaaccaacagtcacacatgtacattacaggatctttccaattaaagatgtacccctggagactgatgaccttaccacttggctctatcagcggtttgttgaaaaagaagacctcttatcacatttttatgaaacaggagcttttccaccttccaagggccataaggaagctgtttccagggagatgaccctcagcaacttgtggatatttctcatacagtcttttgcatttttgtcaggctatatgtggtacaacatcattcagtatttttaccattgcctgttttaggaattgacgtggacttgtcaaggtcaccgtaggagttcagactttctttcataagtgtgcattattttacatgtgcaaatcagaatatatttaaaaaaaagcaaaagaaattcaatggatggattaatatttatccccctttgggatattttaaaatctactaaaatgaggattagtaatataatgacctgctaatatattttaagaacatgttttaaaaagatacactctatcacatatttaagcaaacatcacatttggagaagaggaaatcataaaatcatcctagaagactatctgagagaaattctgttgccaccagttatacttgacaatttagttgaagctcagaaagttatattcatccctcttagctgtagtctatattagggcagttctctagaacgcccacatttccaccaactcagtaaacttgaggggagctggttggcacctcgtgaagaactctttccctgtcgtttgcagtaacaaactccagtctgttgcagtaacaaactccagtctgttgcagtaacaaactctagaatattgacattctctgtgggggaaaagcagtgtccactggaccccttctggtactggatgtgttctttacaaaggctagctcagtccaacactgtgtttacatacactcgtgcttttccttatctgacttctcattttgtatcagaggcatatcataaattgataattttgcaaaatgcacttttttgagatgcagatatagcaaaggattagtaatatagcctgaaaacaaatgggagcatagcagtgtgtgaggttctcgagaactgtcttgtctctgtgtgtttatttgcctgccagtgctctccagcgccatcctgccctggacaccaccctgacgtgatgcctctattgcagctcagaggctttattttttccattttgacattggcactaaatgcatttggggatggttaaaacaaattactatagaacatttaaatgatcagtttaaggggaaataggctagtttatagaaaaataagagctagtggcttataatggtgacaggttctcatgtggcacccctaggacctgtgcagacagtagtctgttgaatcattacatcaaggagctgcccctgtcagggtgagtgtaattaggaacgataccagcacataaggctccccccaatctcttccagttgctttttcttttttcttttttttttagacaggtcttactctgtcacccaggctgtagtgcagtggcataatctcagctcactgcagtctctgcctcccgggttcgagcgattctcctgcctcagcctcccgagtagctgggactacaggcacccaccatcatgcttggctaatttttgtatttttagtagagatggggtttcaccatgttggccaggctggcctcgaactcctgacctcaggtgatctgcccacctcggcttcctaaagtgctgggattgcaggcgtgagccaccacgcccggcctccagttgcttttgaagagggtaaagtcaagtttctatttctagaaaacattttttagaaatttgttgcgatgtttgtacaatttacctcataagagaaccacacccttctccaaaagtgctggtactgcatcagtgagatgagtagggtttttgtttgggattgtaagactattaagatcctagtaagtcagtggtagtttactgtgatgtgagcattgtagattcccccgttgtcactaatcacacaacaattttgagaagtaggctataaaacaaaaaaaggttgctgttttctatttttaaataaaccaaaaaaaaacagaaaagatgtgaattttccccagttatgtgggaaaggtaaagcaacaccaaataaaagcccacagcagcttcatctttacgataactcagtgcatatgtgaaagagaatgatgcattaactgaaatacctcattgaatattatactactactggtaaaatgcagaagacagtgttaatgtgtttggtttggggactggttgttataaaatgcaatttttttttaaatctaagcatttcattatgtgttctacagtgtcggtgaataaatgaaaccaatctcaatttagaggtatggatgatgacagaaagcccaatagaagcttaatgatgcttctgtttgaggcccagcaagcaccactaaattactggatgaaatgaaattgttcacttgagggattagtcaaccatctgggggagaagttgctcactgtcaaatacagcatgcacggtcctagctgatagaccttttcctcattgctacagcaagccacagggtagagtgaccagttctcctatccaaaaataaatgcgaacatgcatacataaatgtggctgagggccacttttgccatcactgtgctccaaaggaacatgatattgttaaatatactgtacacattaaactattctataagatgctttacttttcaagtacggtgtcattttcacagtctccagggtgacaaatgccaatagatatgtgagttaatttttttaaatatctccgtgagttgtaaatagatgtgtatttgatctgccctatccttctttgattctttaacatgttctctctcttctgtttgcaaaatatgtttgaaagcattggtagtgctttccttatcagtaactggagttctcctgcttgcactagagaaggtaaagagagaatcagtattcttatatggcaatctggggaagcagcaatatgccactgtacaaaactgaagaaaagttcctaatttgtactttgtgaagggagatgaaaggacgtttaaagtatatatattttgtcaagaggaaagaagataaaactatgccagttttatatcaatagcttgtagaagctcagctcttcttggtcttggctagactgcctagattcccacagcagacaaggttgagaatccattgctggaatcttggtattgatgagttacagtgatggaacatgtgcttggccacaggcaggtccagtcactgcaaaagtgaccaagccagcaggtcacccttaacttcagaaacaattattggtggtgaactgtacttaaattgcagagaaacctgtaagtaatggaaggtaaagaaaaattacagaatggaaaataatattttgggcaagcaaacaaattcactgagaattccaaaagtatattaaaaaagaagatagctatgagttcagatctatcttattggtctttaatattacaaccaatccttaactttccactataaaggaaggattactagattgattactttctggatagataatctggtaataaatgataggtaaatcaaaaattacttttatttaggagtttgaattcttactctcatcagacattttttttctagggacgcttactaattaaatgatttaagttgtttcttaggggttttttgcctatatatttatgactgtgttaatgagtagtgaaatgatgcggaaagacagctatcaggaagaggaaatacagaagcctgaataatctatgggttagaaaagcatccctgaataatcaaaaattggcagtattggcattgttctcaagcctttttatgaaaatgaaatctgaaatcaccaaatgtaaacctgggaacattattctagtgttgctgtcttggattcatgttaagaagcgtcttcattctttgctcatgttgcccacttcttgtggatttgtctgagtgttttttgacaatcacttccttaaagactcttctgaactagttggacctggttaatcatagagagtagcctttaatcatggatagtcttcttggattatttttatatttgaaaagaaaatgttttatttgcactactgagtaggaagagttaattgttttctttgttctttttttgaagtcattacacaggacttcactccagagttaccattatgagtgtgttcagctctggtccacagaggatggataaaaatggtttgttatgtttttttgctctgcagtgctatgagccttatatctgttaatatgaaggacaaagtcaaaagcagcagtggatagcaggaagggtagagactaatatgtttgggaccaaaaccatctaagttagagatttccagatcacagaggggctgggcattctctggagcagtcattggttggtgctttattgtaatcattttgcgccaatccccaacaattaggaactggaccctgggaataagctgagggtgctgaactgttggggaagggtgactgtagccacatggaagataaaatatgggtttttctgcaaaatttccatctgagggtttttacatttaatatttttttaagacagtttaaagagcaaacgttttttaagtgtattctagttgcaaagtatgcacacatatcttgaatggctttatttttattgtgtaaaactgttgaacacatgactgtgatgcacaaattctttacgtgtaaggagtctatgcattttacagtaacttattttatgatcgggtgatgagacagttatactttcaactgccattatttttattaagtgctttcattttctttacagttattataaaattgtatttattttatacagatgggttttcattttcctgatgctgtaatgtttacttcagcttgttgacctttctttgtgttatctgcatgttgtaacgtgtgataagaatgaatgtaaaggctgtggcaactgtaattaatttttgtaaagggctggtcacacgtggatctggtttatgaatgcatttgggatgattttggtaaccagatcaccttttcagaaatttagatgtgaacaccaaaagaagcattttctcaacaaaaattaatagctggttctattttttttaaacctagaaaaaataaagttgatttttttcaattaaagtgcttttaattcttagcagtggggatggggcatgtgtgttttaccagagctatttgggcattaatatctgcaggcaagtacttaaagcacactgtggcagttggatgctgaaggcaaactgaaaaaccaaatgaaaaaacatcagacttccttctttggtttaaaaatatttccccctttctccccattctcccaatccagtggtgtgctggtaaatgtttagcagttcactcttctgggagaaaattatgtattcaactatacatgtttgttataaattttgctgatagcaagaacatataacacaattaacaaataataagatacaaatactttattgtaaatcccatatagccagttgattctcacagtatacttagttgctcaggaaagaactaaaatgcttttttaaaaggatacttaattgctttttgctcaactcctacagtcaacctatgattgattgtctttcaactgtgatttgaaaaatggcagactgtccaaatctaactcatttcccaataaatttattatcattcaatctgatacgtgatctactgttaaaactgtttcttaccatggtacatattagactcattaagccgaaaccacttttagctttaacattaattgtaaatttatatgattcaattttcataaccaatgcttaacaactgcaggcaaaattctaaaatgtgaccactgggtcttgggaatcagtaggggctgtatccagcacaccactgccccatcctttttttcttaactattagtgttgaataaacttctcatagttaatctacttgctgaactcaggaaattcctatcactgaccctggccagggctttaaagggtaggaaaagcattaatgtcagtcctacacagcgaacttttgatttagaagaatgtgacagaaagaaaacatttactgaaatacatgggaagcttgcatatttctaaagttgtctttatacttttcatttctcaaagctaagtaaactgtggtataggcatctctaagatgttagcatttaaaacatcaattgttttattgatgtttaaacaattgtttaaatcccactgaaaaatttaaatattaaaatatcttgcacagtctaccaaatgagttaaatcgttacagtcgtgtctacctcttatttttctatctgtatttaggctgctgttttggtgagattctaatttctttttcccctggaactactttctgtggaagacaaggaacagactggggacagaggcctgaaaacaaattggaagcactcagagatctattgctgaccagccctattcctcatgagttggcggggggaaagccattgtttttaatttccacttaatatgaaaatgcttgtttttaaaatgttttttcctgctgaacaaatgtatttttaaaaggaaaaaaattctcttttggctctaagaagtcagctgtatgagcaggcgtgaccatatcataacatgctgatatgatagaaatcaataaatttttacctctcagga

SEQ ID NO: 361 - DNA, 10876 bp, Homo sapiens
cggacgcccgcgccggctgtgctgcacagggggaggagagggaaccccaggcgcgagcgggaagaggggacctgcagccacaacttctctggtcctctgcatcccttctgtccctccacccgtccccttccccaccctctggcccccaccttcttggaggcgacaacccccgggaggcattagaagggatttttcccgcaggttgcgaagggaagcaaacttggtggcaacttgcctcccggtgcgggcgtctctcccccaccgtctcaacatgcttaggggtccggggcccgggctgctgctgctggccgtccagtgcctggggacagcggtgccctccacgggagcctcgaagagcaagaggcaggctcagcaaatggttcagccccagtccccggtggctgtcagtcaaagcaagcccggttgttatgacaatggaaaacactatcagataaatcaacagtgggagcggacctacctaggcaatgcgttggtttgtacttgttatggaggaagccgaggttttaactgcgagagtaaacctgaagctgaagagacttgctttgacaagtacactgggaacacttaccgagtgggtgacacttatgagcgtcctaaagactccatgatctgggactgtacctgcatcggggctgggcgagggagaataagctgtaccatcgcaaaccgctgccatgaagggggtcagtcctacaagattggtgacacctggaggagaccacatgagactggtggttacatgttagagtgtgtgtgtcttggtaatggaaaaggagaatggacctgcaagcccatagctgagaagtgttttgatcatgctgctgggacttcctatgtggtcggagaaacgtgggagaagccctaccaaggctggatgatggtagattgtacttgcctgggagaaggcagcggacgcatcacttgcacttctagaaatagatgcaacgatcaggacacaaggacatcctatagaattggagacacctggagcaagaaggataatcgaggaaacctgctccagtgcatctgcacaggcaacggccgaggagagtggaagtgtgagaggcacacctctgtgcagaccacatcgagcggatctggccccttcaccgatgttcgtgcagctgtttaccaaccgcagcctcacccccagcctcctccctatggccactgtgtcacagacagtggtgtggtctactctgtggggatgcagtggctgaagacacaaggaaataagcaaatgctttgcacgtgcctgggcaacggagtcagctgccaagagacagctgtaacccagacttacggtggcaactcaaatggagagccatgtgtcttaccattcacctacaatggcaggacgttctactcctgcaccacagaagggcgacaggacggacatctttggtgcagcacaacttcgaattatgagcaggaccagaaatactctttctgcacagaccacactgttttggttcagactcgaggaggaaattccaatggtgccttgtgccacttccccttcctatacaacaaccacaattacactgattgcacttctgagggcagaagagacaacatgaagtggtgtgggaccacacagaactatgatgccgaccagaagtttgggttctgccccatggctgcccacgaggaaatctgcacaaccaatgaaggggtcatgtaccgcattggagatcagtgggataagcagcatgacatgggtcacatgatgaggtgcacgtgtgttgggaatggtcgtggggaatggacatgcattgcctactcgcagcttcgagatcagtgcattgttgatgacatcacttacaatgtgaacgacacattccacaagcgtcatgaagaggggcacatgctgaactgtacatgcttcggtcagggtcggggcaggtggaagtgtgatcccgtcgaccaatgccaggattcagagactgggacgttttatcaaattggagattcatgggagaagtatgtgcatggtgtcagataccagtgctactgctatggccgtggcattggggagtggcattgccaacctttacagacctatccaagctcaagtggtcctgtcgaagtatttatcactgagactccgagtcagcccaactcccaccccatccagtggaatgcaccacagccatctcacatttccaagtacattctcaggtggagacctgtgagtatcccacccagaaaccttggatactgagtctcctaatcttatcaattctgatggtttctttttttcccagcttttgagccaacaactctgattaactattcctatagcatttactatatttgtttagtgaacaaacaatatgtggtcaattaaattgacttgtagactgaggggattttggttttggttttgggttttgtttttttgcggtgggggggctggtatttggaagaatttagctctttatgttacagaaatcttttttgcaaggacttagaaatgataatgcttaagattgttcttgcccaatgtgggaagagaatctaaggtttttatatgtcttgcaacctcatcaaaggaaaattactggcatcattttcataatttgaaaaaaaaagccaaattaatatatttcttttttgattcactttttaagtgatcatttttaaaactttacttttgacccactgaatttatttagatagaaggaaaagagatgatgggagggaagtttagataaaggatggaagttggttttatttaaacaatagccctgtgatttcctaatgagaagtgactagaaattgaagaaaccaaataaggaggatattggtcaatttagctttagtttctcttactctctcaagcctgccctgtttaactccaaagttcatggctcataatttgagaaacactgttttaaacacaggagaaaaaaatgtccattttaaatcatagctattgaattctacaattacaaagaaacaaacaaacaaaatttgaccaacccaggcggttaaatttaaactcttcaggaaaaatttaagctgttaaaattattctttttctaaatttctaaagtggagggacagaatttttcagatttaaaagggcctcctaggtgcccagaaaattagtggaaagaaccacgtctagacgcatctttgatgtgtcagagttccaaggataaaaagaaacttttaaagtcttctatactcagccaggttatcaatcaaatatgagggcaaaataatattttcagacagattttaggcagtttatcttccatatatccttttctttaagggtatttgtagatacactccagaaaaacaagagtgaaatatgaaggaagttgtggggtccagcaaacagtgcttccaaatcagacccctgatagaggtggaaaactttgcaatgcaacaactgcgtagctggcttagaggacagccaatacagatggaacagaaagatgaggatgggattgagggatcagggattgaggtctccaagaataaaaagggacttcatggaaaaagtaggcttgtggataattaatcacaggggcaaataatgcagttaaaataacaacatgacaatcaggtggaggaatgtataataaacccaaatgtggctgggtagagtggctcacacctgtaatcccagcactttgggaggccaagccgggcagattacctgaggtcaggagttcgagaccagcttggccaacatggcgaaaccccgtctctactaaaaatacaaaaattagccaggcttgggggcgcacgcctgtagtcccagctcctcaggagctgaggtaggagaatcacttgaacccaggaggcaaaggttgcagggagttgagccaagatcgcgccattgcaccctagcctgggcaacagagcgagattctgtttcaaaaaacccccaagtgtattataaggcaataattcctatacgaagcaaactaaaatgcagcaatattaaggtataaaaacaaagaggaataattccattgaaccttgattctggaaactttgatccacccagcagtcatgatgttagactcattgaaaagaatgtatttctaatgcatgatgcgatcggtctatagatgtgtcatggaaacttggttgcaacttcaagacaaaataaaaagtaaacatttacatgaaaaatggtggatatggaaggtggagaagagaggagataacagctttatctttcaaaatagagaattgagagatggtaccaaaagctgatgaagtaaaaattctgtaggccgttggaaggaagctaccataccaggccacttaaactcctacaccatcaaaggcctgaagcctggtgtggtatacgagggccagctcatcagcatccagcagtacggccaccaagaagtgactcgctttgacttcaccaccaccagcaccagcacacctgtgaccagcaacaccgtgacaggagagacgactcccttttctcctcttgtggccacttctgaatctgtgaccgaaatcacagccagtagctttgtggtctcctgggtctcagcttccgacaccgtgtcgggattccgggtggaatatgagctgagtgaggagggagatgagccacagtacctggatcttccaagcacagccacttctgtgaacatccctgacctgcttcctggccgaaaatacattgtaaatgtctatcagatatctgaggatggggagcagagtttgatcctgtctacttcacaaacaacagcgcctgatgcccctcctgacacgactgtggaccaagttgatgacacctcaattgttgttcgctggagcagaccccaggctcccatcacagggtacagaatagtctattcgccatcagtagaaggtagcagcacagaactcaaccttcctgaaactgcaaactccgtcaccctcagtgacttgcaacctggtgttcagtataacatcactatctatgctgtggaagaaaatcaagaaagtacacctgttgtcattcaacaagaaaccactggcaccccacgctcagatacagtgccctctcccagggacctgcagtttgtggaagtgacagacgtgaaggtcaccatcatgtggacaccgcctgagagtgcagtgaccggctaccgtgtggatgtgatccccgtcaacctgcctggcgagcacgggcagaggctgcccatcagcaggaacacctttgcagaagtcaccgggctgtcccctggggtcacctattacttcaaagtctttgcagtgagccatgggagggagagcaagcctctgactgctcaacagacaaccaaactggatgctcccactaacctccagtttgtcaatgaaactgattctactgtcctggtgagatggactccacctcgggcccagataacaggataccgactgaccgtgggccttacccgaagaggacagcccaggcagtacaatgtgggtccctctgtctccaagtacccactgaggaatctgcagcctgcatctgagtacaccgtatccctcgtggccataaagggcaaccaagagagccccaaagccactggagtctttaccacactgcagcctgggagctctattccaccttacaacaccgaggtgactgagaccaccattgtgatcacatggacgcctgctccaagaattggttttaagctgggtgtacgaccaagccagggaggagaggcaccacgagaagtgacttcagactcaggaagcatcgttgtgtccggcttgactccaggagtagaatacgtctacaccatccaagtcctgagagatggacaggaaagagatgcgccaattgtaaacaaagtggtgacaccattgtctccaccaacaaacttgcatctggaggcaaaccctgacactggagtgctcacagtctcctgggagaggagcaccaccccagacattactggttatagaattaccacaacccctacaaacggccagcagggaaattctttggaagaagtggtccatgctgatcagagctcctgcacttttgataacctgagtcccggcctggagtacaatgtcagtgtttacactgtcaaggatgacaaggaaagtgtccctatctctgataccatcatcccagaggtgccccaactcactgacctaagctttgttgatataaccgattcaagcatcggcctgaggtggaccccgctaaactcttccaccattattgggtaccgcatcacagtagttgcggcaggagaaggtatccctatttttgaagattttgtggactcctcagtaggatactacacagtcacagggctggagccgggcattgactatgatatcagcgttatcactctcattaatggcggcgagagtgcccctactacactgacacaacaaacggctgttcctcctcccactgacctgcgattcaccaacattggtccagacaccatgcgtgtcacctgggctccacccccatccattgatttaaccaacttcctggtgcgttactcacctgtgaaaaatgaggaagatgttgcagagttgtcaatttctccttcagacaatgcagtggtcttaacaaatctcctgcctggtacagaatatgtagtgagtgtctccagtgtctacgaacaacatgagagcacacctcttagaggaagacagaaaacagcaggtcttgattccccaactggcattgacttttctgatattactgccaactcttttactgtgcactggattgctcctcgagccaccatcactggctacaggatccgccatcatcccgagcacttcagtgggagacctcgagaagatcgggtgccccactctcggaattccatcaccctcaccaacctcactccaggcacagagtatgtggtcagcatcgttgctcttaatggcagagaggaaagtcccttattgattggccaacaatcaacagtttctgatgttccgagggacctggaagttgttgctgcgacccccaccagcctactgatcagctgggatgctcctgctgtcacagtgagatattacaggatcacttacggagagacaggaggaaatagccctgtccaggagttcactgtgcctgggagcaagtctacagctaccatcagcggccttaaacctggagttgattataccatcactgtgtatgctgtcactggccgtggagacagccccgcaagcagcaagccaatttccattaattaccgaacagaaattgacaaaccatcccagatgcaagtgaccgatgttcaggacaacagcattagtgtcaagtggctgccttcaagttcccctgttactggttacagagtaaccaccactcccaaaaatggaccaggaccaacaaaaactaaaactgcaggtccagatcaaacagaaatgactattgaaggcttgcagcccacagtggagtatgtggttagtgtctatgctcagaatccaagcggagagagtcagcctctggttcagactgcagtaaccaacattgatcgccctaaaggactggcattcactgatgtggatgtcgattccatcaaaattgcttgggaaagcccacaggggcaagtttccaggtacagggtgacctactcgagccctgaggatggaatccatgagctattccctgcacctgatggtgaagaagacactgcagagctgcaaggcctcagaccgggttctgagtacacagtcagtgtggttgccttgcacgatgatatggagagccagcccctgattggaacccagtccacagctattcctgcaccaactgacctgaagttcactcaggtcacacccacaagcctgagcgcccagtggacaccacccaatgttcagctcactggatatcgagtgcgggtgacccccaaggagaagaccggaccaatgaaagaaatcaaccttgctcctgacagctcatccgtggttgtatcaggacttatggtggccaccaaatatgaagtgagtgtctatgctcttaaggacactttgacaagcagaccagctcagggagttgtcaccactctggagaatgtcagcccaccaagaagggctcgtgtgacagatgctactgagaccaccatcaccattagctggagaaccaagactgagacgatcactggcttccaagttgatgccgttccagccaatggccagactccaatccagagaaccatcaagccagatgtcagaagctacaccatcacaggtttacaaccaggcactgactacaagatctacctgtacaccttgaatgacaatgctcggagctcccctgtggtcatcgacgcctccactgccattgatgcaccatccaacctgcgtttcctggccaccacacccaattccttgctggtatcatggcagccgccacgtgccaggattaccggctacatcatcaagtatgagaagcctgggtctcctcccagagaagtggtccctcggccccgccctggtgtcacagaggctactattactggcctggaaccgggaaccgaatatacaatttatgtcattgccctgaagaataatcagaagagcgagcccctgattggaaggaaaaagacagacgagcttccccaactggtaacccttccacaccccaatcttcatggaccagagatcttggatgttccttccacagttcaaaagacccctttcgtcacccaccctgggtatgacactggaaatggtattcagcttcctggcacttctggtcagcaacccagtgttgggcaacaaatgatctttgaggaacatggttttaggcggaccacaccgcccacaacggccacccccataaggcataggccaagaccatacccgccgaatgtaggtgaggaaatccaaattggtcacatccccagggaagatgtagactatcacctgtacccacacggtccgggactcaatccaaatgcctctacaggacaagaagctctctctcagacaaccatctcatgggccccattccaggacacttctgagtacatcatttcatgtcatcctgttggcactgatgaagaacccttacagttcagggttcctggaacttctaccagtgccactctgacaggcctcaccagaggtgccacctacaacgtcatagtggaggcactgaaagaccagcagaggcataaggttcgggaagaggttgttaccgtgggcaactctgtcaacgaaggcttgaaccaacctacggatgactcgtgctttgacccctacacagtttcccattatgccgttggagatgagtgggaacgaatgtctgaatcaggctttaaactgttgtgccagtgcttaggctttggaagtggtcatttcagatgtgattcatctagatggtgccatgacaatggtgtgaactacaagattggagagaagtgggaccgtcagggagaaaatggccagatgatgagctgcacatgtcttgggaacggaaaaggagaattcaagtgtgaccctcatgaggcaacgtgttatgatgatgggaagacataccacgtaggagaacagtggcagaaggaatatctcggtgccatttgctcctgcacatgctttggaggccagcggggctggcgctgtgacaactgccgcagacctgggggtgaacccagtcccgaaggcactactggccagtcctacaaccagtattctcagagataccatcagagaacaaacactaatgttaattgcccaattgagtgcttcatgcctttagatgtacaggctgacagagaagattcccgagagtaaatcatctttccaatccagaggaacaagcatgtctctctgccaagatccatctaaactggagtgatgttagcagacccagcttagagttcttctttctttcttaagccctttgctctggaggaagttctccagcttcagctcaactcacagcttctccaagcatcaccctgggagtttcctgagggttttctcataaatgagggctgcacattgcctgttctgcttcgaagtattcaataccgctcagtattttaaatgaagtgattctaagatttggtttgggatcaataggaaagcatatgcagccaaccaagatgcaaatgttttgaaatgatatgaccaaaattttaagtaggaaagtcacccaaacacttctgctttcacttaagtgtctggcccgcaatactgtaggaacaagcatgatcttgttactgtgatattttaaatatccacagtactcactttttccaaatgatcctagtaattgcctagaaatatctttctcttacctgttatttatcaatttttcccagtatttttatacggaaaaaattgtattgaaaacacttagtatgcagttgataagaggaatttggtataattatggtgggtgattattttttatactgtatgtgccaaagctttactactgtggaaagacaactgttttaataaaagatttacattccacaacttgaagttcatctatttgatataagacaccttcgggggaaataattcctgtgaatattctttttcaattcagcaaacatttgaaaatctatgatgtgcaagtctaattgttgatttcagtacaagattttctaaatcagttgctacaaaaactgattggtttttgtcacttcatctcttcactaatggagatagctttacactttctgctttaatagatttaagtggaccccaatatttattaaaattgctagtttaccgttcagaagtataatagaaataatctttagttgctcttttctaaccattgtaattcttcccttcttccctccacctttccttcattgaataaacctctgttcaaagagattgcctgcaagggaaataaaaatgactaagatattaaaagtatttgaatagt

SEQ ID NO: 362 - DNA, 4783 bp, Homo sapiens
gaattctagaggcggcggagggtggcgaggagctctcgctttctctcgctccctccctctccgactccgtctctctctctctctctctctctcccctccctctctttccctctgttccattttttccccctctaaatcctccctgccctgcgcgcctggacacagatttaggaagcgaattcgctcacgttttaggacaaggaagagagagaggcacgggagaagagcccagcaagatttggattgaaaccgagacaccctccggaggctcggagcagaggaaggaggaggagggcggcgaacggaagccagtttgcaattcaagttttgatagcgctggtagaagggggtttaaatcagatttttttttttttaaaggagagagactttttccgctctctcgctccctgttaaagccgggtctagcacagctgcagacgccaccagcgagaaagagggagaggaagacagatagggggcgggggaagaagaaaaagaaaggtaaaaagtcttctaggagaacctttcacatttgcaacaaaagacctaggggctggagagagattcctgggacgcagggctggagtgtctatttcgagctcagcggcagggctcgggcgcgagtcgagaccctgctcgctcctctcgcttctgaaaccgacgttcaggagcggctttttaaaaacgcaaggcacaaggacggtcacccgcgcgactatgtttgctgatttttcgccttgccctctttaaaagcggcctcccattctccaaaagacacttcccctcctccctttgaagtgcattagttgtgatttctgcctccttttcttttttctttcttttttgttttgctttttccccccttttgaattatgtgctgctgttaaacaacaacaaaaaaacaacaaaacacagcagctgcggacttgtccccggctggagcccagcgccccgcctggagtggatgagcctctccatgagagatccggtcattcctgggacaagcatggcctaccatccgttcctacctcaccgggcgccggacttcgccatgagcgcggtgctgggtcaccagccgccgttcttccccgcgctgacgctgcctcccaacggcgcggcggcgctctcgctgccgggcgccctggccaagccgatcatggatcaattggtgggggcggccgagaccggcatcccgttctcctccctggggccccaggcgcatctgaggcctttgaagaccatggagcccgaagaagaggtggaggacgaccccaaggtgcacctggaggctaaagaactttgggatcagtttcacaagcggggcaccgagatggtcattaccaagtcgggaaggcgaatgtttcctccatttaaagtgagatgttctgggctggataaaaaagccaaatacattttattgatggacattatagctgctgatgactgtcgttataaatttcacaattctcggtggatggtggctggtaaggccgaccccgaaatgccaaagaggatgtacattcacccggacagccccgctactggggaacagtggatgtccaaagtcgtcactttccacaaactgaaactcaccaacaacatttcagacaaacatggatttactttggccttcccaagtgatcacgctacgtggcaggggaattatagttttggtactcagactatattgaactccatgcacaaataccagccccggttccacattgtaagagccaatgacatcttgaaactcccttatagtacatttcggacatacttgttccccgaaactgaattcatcgctgtgactgcataccagaatgataagataacccagttaaaaatagacaacaacccttttgcaaaaggtttccgggacactggaaatggccgaagagaaaaaagaaaacagctcaccctgcagtccatgagggtgtttgatgaaagacacaaaaaggagaatgggacctctgatgagtcctccagtgaacaagcagctttcaactgcttcgcccaggcttcttctccagccgcctccactgtagggacatcgaacctcaaagatttatgtcccagcgagggtgagagcgacgccgaggccgagagcaaagaggagcatggccccgaggcctgcgacgcggccaagatctccaccaccacgtcggaggagccctgccgtgacaagggcagccccgcggtcaaggctcaccttttcgctgctgagcggccccgggacagcgggcggctggacaaagcgtcgcccgactcacgccatagccccgccaccatctcgtccagcactcgcggcctgggcgcggaggagcgcaggagcccggttcgcgagggcacagcgccggccaaggtggaagaggcgcgcgcgctcccgggcaaggaggccttcgcgccgctcacggtgcagacggacgcggccgccgcgcacctggcccagggccccctgcctggcctcggcttcgccccgggcctggcgggccaacagttcttcaacgggcacccgctcttcctgcaccccagccagtttgccatggggggcgccttctccagcatggcggccgctggcatgggtcccctcctggccacggtttctggggcctccaccggtgtctcgggcctggattccacggccatggcctctgccgctgcggcgcagggactgtccggggcgtccgcggccaccctgcccttccacctccagcagcacgtcctggcctctcagggcctggccatgtcccctttcggaagcctgttcccttacccctacacgtacatggccgcagcggcggccgcctcctctgcggcagcctccagctcggtgcaccgccaccccttcctcaatctgaacaccatgcgcccgcggctgcgctacagcccctactccatcccggtgccggtcccggacggcagcagtctgctcaccaccgccctgccctccatggcggcggccgcggggcccctggacggcaaagtcgccgccctggccgccagcccggcctcggtggcagtggactcgggctctgaactcaacagccgctcctccacgctctcctccagctccatgtccttgtcgcccaaactctgcgcggagaaagaggcggccaccagcgaactgcagagcatccagcggttggttagcggcttggaagccaagccggacaggtcccgcagcgcgtccccgtagacccgtcccagacacgtcttttcattccagtccagttcaggctgccgtgcactttgtcggatataaaataaaccacgggcccgccatggcgttagcccttccttttgcagttgcgtctgggaaggggccccggactccctcgagagaatgtgctagagacagcccctgtcttcttggcgtggtttatatgtccgggatctggatcagattctgggggctcagaaacgtcggttgcattgagctactgggggtaggagttccaacatttatgtccagagcaacttccagcaaggctggtctgggtctctgcccaccaggcggggaggtgttcaaagacatctccctcagtgcggatttatatatatatttttccttcactgtgtcaagtggaaacaaaaacaaaatctttcaaaaaaaaaatcgggacaagtgaacacattaacatgattctgtttgtgcagattaaaaactttatagggacttgcattatcggttctcaataaattactgagcagctttgtttggggagggaagtccctaccatccttgtttagtctatattaagaaaatctgtgtctttttaatattcttgtgatgttttcagagccgctgtaggtctcttcttgcatgtccacagtaatgtatttgtggtttttattttgaacgcttgcttttagagagaaaacaatatagccccctacccttttcccaatcctttgccctcaaatcagtgacccaagggagggggggatttaaagggaaggagtgggcaaaacacataaaatgaatttattatatctaagctctgtagcaggattcatgtcgttctttgacagttctttctctttcctgtatatgcaataacaaggttttaaaaaaataataaagaagtgagactattagacaaagtatttatgtaattatttgataactcttgtaaataggtggaatatgaatgcttggaaaattaaactttaatttattgacattgtacatagctctgtgtaaatagaattgcaactgtcaggttttgtgttcttgttttcctttagttgggtttatttccaggtcacagaattgctgttaacactagaaaacacacttcctgcaccaacaccaataccctttcaaaagagttgtctgcaacatttttgttttcttttttaatgtccaaaagtgggggaaagtgctatttcctattttcaccaaaattggggaaggagtgccactttccagctccacttcaaattccttaaaatataactgagattgctgtggggagggaggagggcagaggctgcggtttgactttttaatttttcttttgttatttgtatttgctagtctctgatttcctcaaaacgaagtggaatttactactgttgtcagtatcggtgttttgaattggtgcctgcctatagagatatattcacagttcaaaagtcaggtgctgagagatggtttaaagacaaattcatgaaggtatattttgtgttatagttgttgatgagttctttggttttctgtatttttccccctctctttaaaacatcactgaaatttcaataaatttttattgaaatgtct

SEQ ID NO: 363 - DNA, 8780 bp, Homo sapiens
cgctgggcaacgtgggcaacgcggcgggcggcgggctcgcgcggcgggaggggcagcggcggcgcgcccgggctctacctcccgggctctgcctcccgggctctgcctctcgggcacttgcctggctcctgcgcgttcctgggcatcggctctgcagctgacacacagtagcggggacacccgacgccgctagcgacaggcgcgcggacggctggtcccagagggacgctgcgcttggggacgccggcgagactcgccaggagccaagaggaaacaggaatcattcaaactggattttaaaatcattgcaaatcagtgatggatcagaagttgcagagtgcaatcccgagtaaaagtcttcaaaaaattttgcttcaggtaacagaggaaggaaaattgatctaccaccttaaaaccctgatctagaaaaaatatatattcatgataggaagttataactaagaaaatttatttgcctcttaatgctcctgaatgaaaggaattatccctttgttctttgggaggacttgtgtatctgagattgttgtaataatcagtcattttattaaaaccttgacatgatcaccagggaggaaaaatagagcaatagtcaaaacctgtgtgttagtccaagatgacttctgaagaaatgacagcttctgttctcatacctgtgactcagagaaaagtggtttctgcccagtcggctgcagatgaaagtagtgaaaaggtctcagacatcaatatttcaaaagcacatactgtcagacgaagtggggagacttctcataccatctcacaactgaacaaacttaaagaagaaccttctggaagcaacttgccaaagattctctcaatagcgagggagaaaatagtgagtgatgagaacagtaatgaaaaatgttgggagaaaatcatgccagattctgcgaaaaaccttaacattaactgcaacaacatattgagaaaccatcagcatggccttcctcagagacaattttatgaaatgtacaactctgttgctgaggaagacttgtgtttagaaactggaattccttctccactggaaagaaaggtgttccctggaattcaactggaactagacagaccttccatgggcattagtcctttaggaaatcagtcagtgatcatagagacaggcagagcacaccctgacagcagaagggcagtatttcattttcattatgaagttgacagaagaatgtcagacactttctgtaccctatcagaaaacttaattttagacgattgtggaaattgtgtaccactacctgggggtgaggagaagcaaaagaaaaactatgtggcatatacctgtaaactgatggaattggccaaaaattgtgataataagaatgagcagctgcagtgtgatcattgtgacaccttgaatgataaatacttttgctttgaaggctcttgtgagaaggttgacatggtatattcaggtgatagcttttgtaggaaagactttactgacagtcaagctgccaagacctttttgagccattttgaggacttccctgataattgtgatgatgtagaagaagacgcttttaaaagcaaaaaggagcgatccactttgttagtcaggagattctgtaaaaatgacagagaagttaagaaatctgtgtatactggaacaagagcaattgtgagaactctgccttctggccacattgggctgactgcatggagttacatagatcagaagagaaatggtcccttactgccttgtgggagagtaatggaacccccgtcaacagtggagataaggcaagatgggagccaacgtctgtcagaagcccagtggtatcctatggtttcagaaggaagtgcagcaggaagagactttgcaggaatggaagaggtgaggcagctccacgtgagattctgcaaagggattaagatttggcaccaggcttggtttctgtgcagcctcttaggcagagagccccaggagagggaagcaggctgtcagctgtggctttgcacgctctcagctgtcttgaaggttggttggctcttcccgctctctgaggtacccaattttaccttgttaaaggatggatgtggatgctggaggcttaaagaagaccagatctacaatgcagtgagaagagaagaaacagaaaatacagttggatctctactccatttcctcaccaagctcccagcctccgagacagcccatggaaggataagcgttggtccatgcttaaagcaatgtgtccgagacactgtatgtgagtatcgcgccaccctccaaaggacttcaatatcgcagtacatcaccggttctctcctagaagcaaccacgtctttgggagcaagaagtggccttctcagtacttttggaggatccactggacgaatgatgctgaaagaacgccagccaggcccctctgtggccaattccaatgccctcccttcaagttcagctgggatcagcaaggagctgatcgatctgcagcctctcatccagttcccagaggaagtcgccagcatcctgatggagcaagagcagactatttaccgcagggtcttgccagtcgactacctttgcttcttaacacgggacttgggcactcctgaatgccagagctccttgccctgcctcaaagcatccatctcagcgtcgattcttaccactcagaatggagagcacaatgcccttgaagatctggtgatgaggtttaatgaggtgagctcctgggtgacatggctgatcctcacggcaggctccatggaggagaagcgagaagtcttttcatatttggtgcatgtggccaaatgctgctggaacatgggcaactacaacgctgtcatggagttcttggctggcctcaggtcaagaaaagttttaaaaatgtggcagttcatggaccagtctgatattgagaccatgaggagcctgaaggatgctatggcccagcatgagtcctcttgtgagtacagaaaggtggtgacacgtgccctgcacatccctggctgtaaggtggttccattctgtggggtgtttctgaaggagctctgtgaagtgcttgacggcgcctccggtctcatgaagctttgcccgcggtacaattcccaagaagaaactttagagtttgtagcagattacagtggacaagataatttcttacaacgagtgggacaaaatggcttaaagaattcggagaaggagtccactgtcaacagcatctttcaggtcatccggagctgcaatcgaagtctggagacagacgaggaggacagccccagtgaaggaaacagctccaggaaaagctccttgaaggataaaagccgatggcagtttataattggagatttgttggattcagacaatgacatctttgagcaatccaaagaatacgactctcatggttcagaggactcacagaaggccttcgaccatgggacggagctcatcccttggtacgtgctgtccatccaagccgatgtgcaccagttcctgctgcagggggccacggtcatccactacgaccaggacacacacctctctgcccgctgcttcctccagcttcagcccgacaatagcaccttgacctgggtaaagcccacaactgcctccccagccagcagtaaagcaaaacttggtgtacttaataacacagctgagcctggaaaattcccactactgggtaatgctggattaagtagcctgacggaaggggtcttggatctttttgcagtgaaggctgtatacatgggccaccctggcattgatatacacactgtgtgtgttcagaacaaactgggtagcatgttcctgtcagagactggtgtgacattgctctatgggcttcagaccacagacaacagattattgcacttcgtggcaccaaagcacacagctaaaatgctcttcagcggattattggaactcactagagctgtgagaaagatgaggaaattccctgaccaaagacagcagtggctgcggaaacagtacgtcagcctttatcaggaggatggacggtatgaaggcccaactttggctcacgctgtggagttgtttggtggcagacggtggagtgctcgaaaccccagccccggaacatcagcaaagaatgctgagaagcccaatatgcagagaaacaataccctgggcataagcactaccaagaaaaagaagaaaatcctcatgaggggtgagagtggagaggtaactgacgatgagatggcaacccgaaaggccaagatgcacaaagagtgtcgaagccggagtggttctgatcctcaagacattaatgaacaagaagaatcagaggtgaatgccatcgctaaccctccaaaccccctcccttccagaagagcccactctttgaccacagctgggtcccccaacttggctgccgggacgtcatctcccatcaggccagtgtcctcccctgtgctgtcttcttcaaacaagagcccatccagtgcttggagcagtagtagctggcacgggcggatcaaaggcggcatgaagggatttcagagcttcatggtttcagatagcaacatgagttttgttgaatttgttgagctgttcaaatcattcagtgtcaggagccgcaaggacctgaaggatctgtttgatgtctatgcagtgccctgcaaccgatctggctccgagtcagccccactctacaccaacctgacaattgatgaaaacaccagcgatcttcagcctgacctagatctgttgaccagaaatgtctcggatttggggttgttcattaagagtaaacagcagctatcggacaaccagaggcagatatctgatgccattgctgctgcaagcattgtgacaaatggcactgggattgagagcacatctctgggcatttttggggtgggcatacttcagctcaacgatttcctcgtgaattgccaaggagaacactgcacttatgatgaaatcctcagcatcatccagaagttcgagcctagcatcagtatgtgtcatcagggactaatgtcatttgaagggtttgccaggtttctgatggataaagaaaattttgcctcaaaaaatgatgagtcacaggagaacattaaagaactgcagctacccctctcatactattacatcgaatcttcgcacaatacctacctcacgggccatcagctcaaaggagaatcctcggtagaactctacagccaggtccttttgcaaggctgtcgaagtgtagaattggactgctgggacggagacgatgggatgcccatcatttatcatggacatacgctgacaaccaagatccccttcaaggaagtggttgaagccattgatcgcagtgccttcatcaactctgacctgccaatcatcatatcgattgagaaccactgttcattgcctcagcaacgaaaaatggcagaaattttcaagactgtgtttggagaaaagctggtgactaaattcttatttgagactgatttctcagatgatccaatgcttccttcacctgaccaactcagaaagaaagttcttcttaaaaacaagaagctaaaagcccatcagacgccagtggatatcttaaagcaaaaggctcatcagttagcatctatgcaagtgcaggcttataatggtgggaatgccaacccccgacctgccaataatgaggaagaggaagatgaggaggacgaatatgattatgactatgaatccctttctgatgacaacattctggaagacagacctgaaaataaatcatgtaatgacaagcttcagtttgaatataatgaagaaatcccaaagaggataaagaaagcagataactctgcttgcaacaaaggaaaggtttatgatatggaactgggagaagaattttatcttgatcagaataaaaaggaaagcagacagattgcaccagagctttctgaccttgtaatctattgtcaagcagtaaaatttccaggactgtcaactctaaatgcatctggctctagcagaggaaaagaaaggaaaagcaggaagtccatttttggcaacaatccgggcagaatgagcccaggggagacagcatcatttaacaaaacatctggaaaaagttcctgtgaaggcattcgacagacctgggaggaatcttcttcccctctcaacccaaccacgtccctcagtgctatcattagaactcccaaatgttatcatatctcgtcgctgaatgaaaatgccgccaaacgtctgtgtcgcaggtattctcagaaactgacccagcacaccgcctgtcagctgctgagaacttaccctgctgccacccgcatcgactcttccaacccgaaccccctcatgttctggctccatgggatacagcttgtggcactcaactaccagactgatgatctccctttacatttaaatgctgcaatgtttgaggcaaatggtggttgtggttatgtattgaaacctccagttctgtgggacaagaactgccccatgtatcagaagttttctccactagaaagagatctggacagcatggatcctgcagtctattctttaactattgtctctggtcagaatgtgtgccccagtaatagcatgggaagcccgtgcattgaagtcgacgtcctgggcatgcctctggacagctgccatttccgcacaaagcccatccatcgaaacaccctgaaccccatgtggaacgagcagtttctgttccacgttcacttcgaagatcttgtatttcttcgttttgcagttgtggaaaacaatagttcagcggtaactgctcagagaatcattccactgaaagctttaaaacgaggatatcgacatcttcagctgcgaaaccttcacaatgaagtcttggagatttctagtttattcattaacagcagaaggatggaagaaaattcctctggcaataccatgtcagcctcttcgatgtttaatacagaagaaagaaaatgtttgcagactcacagagtcacggtgcatggggtcccagggccagagccctttaccgttttcactattaatggaggcaccaaggcaaagcagcttctgcagcaaattctgacaaatgaacaagacatcaaacctgttaccacagactattttttgatggaagaaaaatattttatatctaaagaaaagaatgaatgtaggaaacaaccattccagagagccattggtccagaagaggagatcatgcaaattttaagcagctggtttccagaagagggatacatgggcaggattgtcttaaaaacccagcaggaaaacctagaagagaaaaacattgttcaagatgacaaagaggtgatcttgagctcagaggaggagagtttctttgtccaagtgcatgatgtttctccagagcaacctcgaacagtcatcaaagcaccccgcgtcagcactgcacaggatgtcattcagcagaccttatgcaaagccaaatattcctacagcatcctgagcaaccccaatccaagcgactatgtgcttttggaagaggtggtgaaagacactaccaacaagaagactaccacaccaaagtcctctcagcgggtccttctggatcaggagtgtgtgtttcaagcccaaagcaagtggaaaggtgcaggaaaattcatccttaagctaaaggagcaggtgcaggcatctcgagaagataaaaagaaaggcatttctttcgcaagtgaactcaagaagctcaccaagtcaactaaacagccccgaggacttacatcaccttctcagctcttgacctcagaaagtatccaaaccaaggaggagaaacctgtgggtggcttgtcctccagtgacacaatggattaccgacagtgactaagggcagcatgtttaacccaggtatagtaagtcattgcaccatcctggaacagggcttaacttaaactactttgtaaggaaggcataattagtacaatgtcttttatcttttccaacaggaggatgtcccttgaaggcaggtaggaatgggaccttaaaacaggaaaagggctctgaagatatgtgtaacatgatatgctattgaacaccgcctataaagaaaaagggaaagaggctgggcgtggtggcgcatgcctgtaatcccagcactttgggaggccaaggcaggcagatcacctgaggtcagttcaagaccagcctgaccaacatggagaaaccccgtctctactaaaaatacaaaattagctgggcatggtggtgcatgcctataatcccagctactggggaggctgaggcaggagaatcacttgaacttggaaggcagaggttgcagtgagctgagatcacaccattgcactccagcctgggcaatgagagtgaaaactccgtctcaaaaaaaaaaaaatgtgaagatctttaagcaagaagttaaagagtgaacatggtggaaaaaatataattattttcatcagacttaaactggaaattgatgatttctgaactgaagccttcacacatgtgagatccatgctgaggagaagcaaaatggcacagggctagttgccaccaaccaatttactgatgaatgaagcccaggggactgccattttataaatgtcagcagttggaaaaatcgtcacgaattgacttagagcaagggtcagcaagcttgtctgtaaagggccaaacagtaaatattttagggctgggggccataaaatatgttgcaaccacccaattctgccattgtagtgcaaaagcagccatagacaacacatacatgaacgaacgtggctgtattccaataaaactttatttatggacactgaaa

SEQ ID NO: 364 - DNA, 124 bp, Homo sapiens
caactacagccactactacaggaccatcgaggacctgcgggacaagattcttggtgccaccattgagaacgccaggattgtcctgcagatcaacaatgctcaactggctgcagatgacttctga

SEQ ID NO: 365 - DNA, 4764 bp, Homo sapiens
tcatcaacatgcattcccagaaatgccatgaaaggaaagaccaagtcttgactgagaaacggaccgggcagatgagggactcccacatatacctgtttcctgctcttcccgaagacattttgccacaagcatataattcagcttctgaaaaatacggtcttcctcactgcagacaccatgccagcgttttaaatcaagttggctactcgtgctgtttagagtatgcagtttgcctgtggcaatattaaactcatctggaagaaagcacttaaacctatccagttcctcatcggtgatgttatccaggctggttagcaagagtatctccttatatttactctccatctcacgacttttcagcttataagggatccaaactatgtaagattataccaccaaaagtgattcaacattcaaaatgaagcaagattgtttcctactccattttctctggggcaatagcagaataggagcaagccagcactagtcagctaactaagtgactcaaccaaggccttttttccttgttatctttgcagatacttcattttcttagcgtttctggagattacaacatcctgcggttccgtttctgggaactttactgatttatctcccccctcacacaaataagcattgattcctgcatttctgaagatctcaagatctggactactgttgaaaaaatttccagtgaggctcacttatgtctgtaaagatgggaaaaaaatacaagaacattgttctactaaaaggattagaggtcatcaatgattatcattttagaatggttaagtccttactgagcaacgatttaaaacttaatttaaaaatgagagaagagtatgacaaaattcagattgctgacttgatggaagaaaagttccgaggtgatgctggtttgggcaaactaataaaaattttcgaagatataccaacgcttgaagacctggctgaaactcttaaaaaagaaaagttaaaagtaaaaggaccagccctatcaagaaagaggaagaaggaagtggatgctacttcacctgcaccctccacaagcagcactgtcaaaactgaaggagcagaggcaactcctggagctcagaaaagaaaaaaatcaaccaaagaaaaggctggacccaaagggagtaaggtgtccgaggaacagactcagcctccctctcctgcaggagccggcatgtccacagccatgggccgttccccatctcccaagacctcattgtcagctccacccaacagttcttcaactgagaacccgaaaacagtggccaaatgtcaggtaactcccagaagaaatgttctccaaaaacgcccagtgatagtgaaggtactgagtacaacaaagccatttgaatatgagaccccagaaatggagaaaaaaataatgtttcatgctacagtggctacacagacacagttcttccatgtgaaggttttaaacaccagcttgaaggagaaattcaatggaaagaaaatcatcatcatatcagattatttggaatatgatagtctcctagaggtcaatgaagaatctactgtatctgaagctggtcctaaccaaacgtttgaggttccaaataaaatcatcaacagagcaaaggaaactctgaagattgatattcttcacaaacaagcttcaggaaatattgtatatggggtatttatgctacataagaaaacagtaaatcagaagaccacaatctacgaaattcaggatgatagaggaaaaatggatgtagtggggacaggacaatgtcacaatatcccctgtgaagaaggagataagctccaacttttctgctttcgacttagaaaaaagaaccagatgtcaaaactgatttcagaaatgcatagttttatccagataaagaaaaaaacaaacccgagaaacaatgaccccaagagcatgaagctaccccaggaacagcgtcagcttccatatccttcagaggccagcacaaccttccctgagagccatcttcggactcctcagatgccaccaacaactccatccagcagtttcttcaccaagaaaagtgaagacacaatctccaaaatgaatgacttcatgaggatgcagatactgaaggaagggagtcattttccaggaccgttcatgaccagcataggcccagctgagagccatccccacactcctcagatgcctccatcaacaccaagcagcagtttcttaaccacgaaaagtgaagacacaatctccaaaatgaatgacttcatgaggatgcagatactgaaggaagggagtcattttccaggaccgttcatgaccagcataggcccagctgagagccatccccacactcctcagatgcctccatcaacaccaagcagcagtttcttaaccacgttgaaaccaagactgaagactgaacctgaagaagtttccatagaagacagtgcccagagtgacctcaaagaagtgatggtgctgaacgcaacagaatcatttgtatatgagcccaaagagcagaagaaaatgtttcatgccacagtggcaactgagaatgaagtcttccgagtgaaggtttttaatattgacctaaaggagaagttcaccccaaagaagatcattgccatagcaaattatgtttgccgcaatgggttcctggaggtatatcctttcacacttgtggctgatgtgaatgctgaccgaaacatggagatcccaaaaggattgattagaagtgccagcgtaactcctaaaatcaatcagctttgctcacaaactaaaggaagttttgtgaatggggtgtttgaggtacataaggtaagcccacaccattgttttataaaatttctcctgcaacctccaatttttaaagtcttaacttgtcaactggagtttggtcaacttactcaacacagaaaatcaaccccttcacccttcccccagcactagagataattgaatagagttcatttcaggatatggggtacgttatattgtaacattcctcttcttaaggtatcatcatgcaagttatttagacagtcactaggaaacttggcattttattagttttgatgatctattcagagccacccttgtccaggacagtgcagagtttatatcaacacacatatccttaggattttgtttctttgagttcttctccatctgtatcaatgacaacttaatttaattgtgaataaaagagttgctctcccaagcctgaatcctgattgtgacaaccagagtaagaaataaaatagactactctgctttagaatgcagctatgtctaacagttagctagaattctgatcatttggactccaaagtttcttgcctcttctcattcattaattcatcaggagactgtagagcaactaacttctgcattaaataataagagaaatacgaagcaaaaagactaaaaaagtcacgtagcttaactgctcaatttataaatggggcaataaaatgcaaaaaaaagaaaaaaagcttggtgaattcttaggcttacagtgtgcctttcagtctctacacatcatgtaaatattatgcttagctgatttaacttcttgtttgaagtactgtttcatactccattatacatgtcttctagggtggcttacttttaattgtgctgttttctctacactcagtttaaatgactgtacatatatatgtggttgtagagttaatgaataatgagctacaaaccagaacaatgtgactagatagataggatgatctagatttgagatctgggcagattgggaaagagtgactatatggagaagaaagaagtagttacatattgaaataacagtctacttaatgaggacgtgcaacattctttctcaaacttacaaagtgccataaaaagcctctattctctgctcttgggcaggtgtgaaagaaacctaccaaattaatcagatttttctgtatccaggctccttaaaaaatcccagctgtgctgatgtggaaacaggaagaattaggaaagtaatcaattttttttcctagaaaaaatccagcagacaaagaacttcaacaaaagaggctcaagggaggagttgaaaggcaggattcaaagaccaagtatcttaagctatttggtacctgttattcaggacctacagctctgtttactctatcaaagacaaaagtttccagaaacaccctgtatttctcatagatttgaaaattattgatccagtttcagaagataagtgttaattttcttttgcagaaaaatgtaaggggtgaattcacttattatgaaatacaagataatacagggaagatggaagtggtggtgcatggacgactgaccacaatcaactgtgaggaaggagataaactgaaactcacctgctttgaattggcaccgaaaagtgggaataccggggagttgagatctgtaattcatagtcacatcaaggtcatcaagaccaggaaaaacaagaaagacatactcaatcctgattcaagtatggaaacttcaccagactttttcttctaaaatctggatgtcattgacgataatgtttatggagataaggtctaagtgcctaaaaaaatgtacatatacctggttgaaatacaacactatacatacacaccaccatatatactagctgttaatcctatggaatggggtattgggagtgcttttttaatttttcatagtttttttttaataaaatggcatattttgcatctacaacttctataatttgaaaaaataaataaacattatcttttttgtgaaaggaa

SEQ ID NO: 366 - DNA, 2104 bp, Homo sapiens
gctcgccgcgccgctctgggagccgctgctggtcccggccttgcggcctgcgggggaggctgcccggaggaggcagcggcggcggcagcgcgtcctcggtccccaggaccacggcttctttcctgccagatctatccatctggccatccatccgtgggggtctgcaatggccacctttagccgccaggaatttttccagcagctactgcaaggctgtctcctgcctactgcccagcagggccttgaccagatctggctgctccttgccatctgcctcgcctgccgcctcctctggaggctcggggttgccatcctacctgaagcatgcaagcaccgtggcaggcgggttcttcagcctctaccacttcttccagctgcacatggtttgggtcgtgctgctcagcctcctgtgctacctcgtgctgttcctctgccgacattcctcccatcgaggcgtcttcctatccgtcaccatcctcatctacctactcatgggtgagatgcacatggtagacaccgtgacatggcacaagatgcgaggggcacagatgattgtggccatgaaggcagtgtctctgggcttcgacctggaccggggcgaggtgggtacggtgccctcgccagtggagttcatgggctacctctacttcgtgggcaccatcgtcttcgggccctggatatccttccacagctacctacaagctgtccaaggccgcccactgagctgccggtggctgcagaaggtggcccggagcctggcactggccctgctgtgccttgtgctgtccacttgcgtgggcccctacctcttcccgtacttcatccccctcaacggtgaccgcctccttcgcaacaagaaacgcaaagccaggggcaccatggtaaggtggctgcgagcctacgagagtgctgtctccttccacttcagcaactattttgtgggctttctttccgaggccacggccacgttggcgggggctggctttaccgaggagaaggatcacctggaatgggacctgacggtgtccaagccactgaatgtggagctgcctcggtcaatggtggaagttgtcacaagctggaacctgcccatgtcttattggctaaataactatgttttcaagaatgctctccgcctggggaccttctcggctgtgctggtcacctatgcagccagcgccctcctacatggcttcagtttccacctggctgcggtcctgctgtccctggcttttatcacttacgtggagcatgtcctccggaagcgcctggctcggatcctcagtgcctgtgtcttgtcaaagcggtgcccgccagactgttcgcaccagcatcgcttgggcctgggggtgcgagccttaaacttgctctttggagctctggccatcttccacctggcctacctgggctccctgtttgatgtcgatgtggatgacaccacagaggagcagggctacggcatggcatacactgtccacaagtggtcagagctcagctgggccagtcactgggtcacttttggatgctggatcttctaccgtctcataggctgaggcacatctgtggaccctcataaccctcttaagacccctctcagggtgccactgatgggggatgagggaaggccctctctctactccttgaccccctccatccttgacccccaacacctcaacacacacacacacacacacacacaaaatcacaccattttcatgcctgtcaatccccaccccaccacaaggcaggaagggggtggtgcctgctggggcctagagggggatgcttggggaaacagagaaggggagatccagggcctccccgccttccttcttcctttttatatacaatttgttattgtcaaataaaagtaggaaatattcaataggcttcttcttcactgctcagaggggaataggaatgagtgaggaagggagcacagcatggataaaggtttggaagctggaaaccatgaagagagagcagactgtgattggttcatggttagtttatgattgattagatgatgagcctgaagatggcaggatcctggtcctgcttggtttgatcagggcagggacagattgcatagttggatgtgggg

SEQ ID NO: 367 - DNA, 800 bp, Homo sapiens
accaccatgaatccactcctgatccttacctttgtggcagctgctcttgctgccccctttgatgatgatgacaagatcgttgggggctacaactgtgaggagaattctgtcccctaccaggtgtccctgaattctggctaccacttctgtggtggctccctcatcaacgaacagtgggtggtatcagcaggccactgctacaagtcccgcatccaggtgagactgggagagcacaacatcgaagtcctggaggggaatgagcagttcatcaatgcagccaagatcatccgccacccccaatacgacaggaagactctgaacaatgacatcatgttaatcaagctctcctcacgtgcagtaatcaacgcccgcgtgtccaccatctctctgcccaccgcccctccagccactggcacgaagtgcctcatctctggctggggcaacactgcgagctctggcgccgactacccagacgagctgcagtgcctggacgctcctgtgctgagccaggctaagtgtgaagcctcctaccctggaaagattaccagcaacatgttctgtgtgggcttccttgagggaggcaaggattcatgtcagggtgattctggtggccctgtggtctgcaatggacagctccaaggagttgtctcctggggtgatggctgtgcccagaagaacaagcctggagtctacaccaaggtctacaactatgtgaaatggattaagaacaccatagctgccaacagctaaagcccccagtatctcttcagtctctataccaataaagtgaccctgttctc

SEQ ID NO: 368 - DNA, 597 bp, Homo sapiens
tctgcagagagaatggccagcaggaaggcggggacccggggcaaggtggcagccaccaagcaggcccaacgtggttcttccaacgtcttttccatgtttgaacaagcccagatacaggagttcaaagaagccttcagctgtatcgaccagaatcgtgatggcatcatctgcaaggcagacctgagggagacctactcccagctggggaaggtgagtgtcccagaggaggagctggacgccatgctgcaagagggcaagggccccatcaacttcaccgtcttcctcacgctctttggggagaagctcaatgggacagaccccgaggaagccatcctgagtgccttccgcatgtttgaccccagcggcaaaggggtggtgaacaaggatgagttcaagcagcttctcctgacccaggcagacaagttctctccagctgaggtggagcagatgttcgccctgacacccatggacctggcggggaacatcgactacaagtcactgtgctacatcatcacccatggagacgagaaagaggaatgaggggcagggccaggcccacgggggggcacctcaataaactctgttgcaaaattggaa

SEQ ID NO: 369 - DNA, 4230 bp, Homo sapiens
gctgagcgccggaggagcgtaggcagggcagcgctggcgccagtggcgacaggagccgcgcgaccggcaaaaatacacgggaggccgtcgccgaaaagagtccgcggtcctctctcgtaaacacactctcctccaccggcgcctccccctccgctctgcgcgccgcccggctgggcgcccgaggccgctccgactgctatgtgaccgcgaggctgcgggaggaaggggacagggaagaagaggctctcccgcgggagcccttgaggaccaagtttgcggccacttctgcaggcgtcccttcttagctctcgcccgcccctttctgcagcctaggcggcccgggttctcttctcttcctcgcgcgcccagccgcctcggttcccggcgaccatggtgacgatggaggagctgcgggagatggactgcagtgtgctcaaaaggctgatgaaccgggacgagaatggcggcggcgcgggcggcagcggcagccacggcaccctggggctgccgagcggcggcaagtgcctgctgctggactgcagaccgttcctggcgcacagcgcgggctacatcctaggttcggtcaacgtgcgctgtaacaccatcgtgcggcggcgggctaagggctccgtgagcctggagcagatcctgcccgccgaggaggaggtacgcgcccgcttgcgctccggcctctactcggcggtcatcgtctacgacgagcgcagcccgcgcgccgagagcctccgcgaggacagcaccgtgtcgctggtggtgcaggcgctgcgccgcaacgccgagcgcaccgacatctgcctgctcaaaggcagttcagacccccccacacccatcaaagagccgctcctcccccccgcaggcgccttcgccgcctccctcccttcctttcctttccgctcctcttccgacctgtccacccgggaggaagggagctggaaagggggcggaaacctctcccctccaaaaagcacaacaaaactgttcagtgcggaggagccgggttcgcccctgccggacagcggggggctttgttccccgcagttgtttcctgcccatttgacctgtcagctgctggggaaacgctgctgttgacctttggttgaactgctaaggcgattttgctgatttttctttctttttccgcgagggctgtcttttgctcctccaaatgagcccagtccccctcccttctccccaaagcgctccaagagaaagtgccaggaaggggcttgtcccggaaggcctggcggctgagcggggccaggtcctggttaggccaccagggtgggcgtccgcgccattgtttgagcttgtcggcgctggtgggagagatgagggcaattcctctgggacgcaagtcccctcgaatggccggggctggccgggatgttccccgcacggcgctgccctcgagtccccccgatggagagcgcgggcgcgccttccttcgctggcgtccaaacccgggaccagctagaacacagcagggctgggactgggttccagccccacgtggagtctggatttgttttgttgtgttttgctttccttcctggaagaaatcccgaggggaccgccctagagcggcagctccaggacctcggcccttgggcttccgggggtgcagccacttaggccccgctcccggggagagagggattattttttaagatttatccccagggcgcgcggcatttccctgtccctcgtgaatcccgttgagagtcctccctccccaacctcctccatttccccagccagaccgattcgagagccctggagattctgggcgaggctagtgactgggtagtacaggcctctagccccaccattgctctctctgtcttcagttccccaggagggcaatggcatcaaacagcacagctctgggggatgtcaatattgcataccttttctacctaaagggaaaatgactcgcttttctgcttgcaaatatggtagtttctgcttacaaatgtaatacaatgcccatgacagccaaggactggaagcataagttgctaggtcttacaggtgattttttacaatgaagcaaactcactatgttagacaccatttacattggatgtctccaactaacaaaagtaactaaagacagatgtaggtgtaaattgagagtgaaatttgaccctttagaccgtcacaacttccttgggcttatcctgggtgcttataggagaggtgggctccacccacaaaaatggactgctcagaaaaatgagggagagagaaagggtggccactttcccgagccaagaaattccttgaaaaaaaatcagaacatctgaaaccagagagccgatttccttaccgggaggcagttcctggctaacgaagaggaagcacgatgggaagaaaagttcactccaacggaagccagtttgctgaacatagcagatcgcccaggaggactgggagagactgcaaaccagttcgagcccccagcatggcgttaggtgtcagccagctggcaggaaggtccaggtgtctgtgttcagagtctcaaggcggctatgagaggttttcctccgagtacccagaattctgttctaaaaccaaggccctggcagccatcccacccccggttccccccagtgccacagagcccttggacctgggctgcagctcctgtgggaccccactacacgaccaggggggtcctgtggagatccttcccttcctctacctcggcagtgcctaccatgctgcccggagagacatgctggacgccctgggcatcacggctctgttgaatgtctcctcggactgcccaaaccactttgaaggacactatcagtacaagtgcatcccagtggaagataaccacaaggccgacatcagctcctggttcatggaagccatagagtacatcgatgccgtgaaggactgccgtgggcgcgtgctggtgcactgccaggcgggcatctcgcggtcggccaccatctgcctggcctacctgatgatgaagaaacgggtgaggctggaggaggccttcgagttcgttaagcagcgccgcagcatcatctcgcccaacttcagcttcatggggcagctgctgcagttcgagtcccaggtgctggccacgtcctgtgctgcggaggctgctagcccctcgggacccctgcgggagcggggcaagacccccgccacccccacctcgcagttcgtcttcagctttccggtctccgtgggcgtgcactcggcccccagcagcctgccctacctgcacagccccatcaccacctctcccagctgttagagccgccctgggggccccagaaccagagctggctcccagcaagggtaggacgggccgcatgcgggcagaaagttgggactgagcagctgggagcaggcgaccgagctccttccccatcatttctccttggccaacgacgaggccagccagaatggcaataaggactccgaatacataataaaagcaaacagaacactccaacttagagcaataacggctgccgcagcagccagggaagaccttggtttggtttatgtgtcagtttcacttttccgatagaaatttcttacctcatttttttaagcagtaaggcttgaagtgatgaaacccacagatcctagcaaatgtgcccaaccagctttactaaagggggaggaagggagggcaaagggatgagaagacaagtttcccagaagtgcctggttctgtgtacttgtccctttgttgtcgttgttgtagttaaaggaatttcattttttaaaagaaatcttcgaaggtgtggttttcatttctcagtcaccaacagatgaataattatgcttaataataaagtatttattaagactttcttcagagtatgaaagtacaaaaagtctagttacagtggatttagaatatatttatgttgatgtcaaacagctgagcaccgtagcatgcagatgtcaaggcagttaggaagtaaatggtgtcttgtagatatgtgcaaggtagcatgatgagcaacttgagtttgttgccactgagaagcaggcgggttgggtgggaggaggaagaaagggaagaattaggtttgaattgctttttaaaaaaaaaagaaaagaaaaagacagcatctcactatgttgccaaggctcatcttgagaagcaggcgggttgggtgggaggaggaagaaagggaagaattaggtttgaattgcttttttaaaaaaaaagaa

SEQ ID NO: 370 - DNA, 159 bp, Homo sapiens
gttccattcagtgccacaccagtgaatgccttttataatggctgcatggaagtgaatattaatggtgtacagttggatctggatgaagccatttctaaacataatgatattagagctcactcatgtccatcattttggaaaaagacaaagaattcttaa

SEQ ID NO: 371 - DNA, 426 bp, Homo sapiens
aaacaagcacaatatgaaaaacaattagagcagttaaacaaggataatacggcttcactaaatatgaaggaactcacacttaaagatgtggaatgtaaattctccaaaatgaaaactacttatgaagaggttacaaccaaattagaagaatataaagaagcctttgcagcagcattgaacgctaacaattccatgtcaaaaaaattaacgaaatctaataagaaaatagcaatgatcagcaccaagctccttatggagaaagagtgggtgaaatattttctcagcactcttcctacaaggcgaggtcaagagtcaccttgtgttgaaaatcttactagtatagtactcaacagtaaatatattcccaaaatgaccgtaagaattcctacttcaaaccctcagacctcaaataactgccagaactac

SEQ ID NO: 372 - DNA, 1554 bp, Homo sapiens
ggtaggcgcgcccagacctgagacgggttgggactgggctgcgtcacgcgcgggctctaagcgcccggggccccgcccagtggccggcacagccaatcgcagcgcgggaaggcggtgggggcggggaaggccgcctggaaacttaaatcccgaggcgggcgaacctgcaccagaccgcggacgtctgtaatctcagaggcttgtttgctgagggtgcctgcgcagctgcgacggctgctgggttttgaaacatgaatctttcgctcgtcctggctgccttttgcttgggaatagcctccgctgttccaaaatttgaccaaaatttggatacaaagtggtaccagtggaaggcaacacacagaagattatatggcgcgaatgaagaaggatggaggagagcagtgtgggaaaagaatatgaaaatgattgaactgcacaatggggaatacagccaagggaaacatggcttcacaatggccatgaatgcttttggtgacatgaccaatgaagaattcaggcagatgatgggttgctttcgaaaccagaaattcaggaaggggaaagtgttccgtgagcctctgtttcttgatcttcccaaatctgtggattggagaaagaaaggctacgtgacgccagtgaagaatcagaaacagtgtggttcttgttgggcttttagtgcgactggtgctcttgaaggacagatgttccggaaaactgggaaacttgtctcactgagcgagcagaatctggtggactgttcgcgtcctcaaggcaatcagggctgcaatggtggcttcatggctagggccttccagtatgtcaaggagaacggaggcctggactctgaggaatcctatccatatgtagcagtggatgaaatctgtaagtacagacctgagaattctgttgctaatgacactggcttcacagtggtcgcacctggaaaggagaaggccctgatgaaagcagtcgcaactgtggggcccatctccgttgctatggatgcaggccattcgtccttccagttctacaaatcaggcatttattttgaaccagactgcagcagcaaaaacctggatcatggtgttctggtggttggctacggctttgaaggagcaaattcgaataacagcaagtattggctcgtcaaaaacagctggggtccagaatggggctcgaatggctatgtaaaaatagccaaagacaagaacaaccactgtggaatcgccacagcagccagctaccccaatgtgtgagctgatggatggtgaggaggaaggacttaaggacagcatgtctggggaaattttatcttgaaactgaccaaacgcttattgtgtaagataaaccagttgaatcattgaggatccaagttgagattttaattctgtgacatttttacaagggtaaaatgttaccactactttaattattgttatacacagctttatgatatcaaagactcattgcttaattctaagacttttgaattttcattttttaaaaagatgtacaaaacagtttgaaataaattttaattcgtatataaaggtg

SEQ ID NO: 373 - DNA, 2544 bp, Homo sapiens
ccagatcgcagctgaaggatctgttgagcgcttcaggaaaggcggtgagatccggtaccgcagcagagcactctcagctctgggtcttgcaggcgcagggctcccccatgccagcagaaagatttcctctggtgaagaggaccgtcgaatctgtcctcctcaagacacctcttgtacagaatttattcgaatgccacggccaaggtcttccttgaaaaatgttaaccgatgtgtgctttttgtcttttgtcatcctttctttaggacaggcgacactaacaggtgaagatctcgggagaccatgactaagaaaagaattgctgtgattgggggaggagtgagcgggctctcttccatcaagtgctgcgtagaagaaggcttggaacctgtctgctttgaaaggactgatgacatcggagggctctggaggttccaggaaaatcctgaagaaggaagggccagtatttacaaatcagtgatcatcaatacttctaaagagatgatgtgcttcagtgactatccaatcccagatcattatcccaacttcatgcataatgcccaggtcctggagtatttcaggatgtatgccaaagaatttgaccttctaaagtatattcgatttaagaccactgtgtgcagtgtgaagaagcagcctgattttgccacttcaggccaatgggaagtggtcactgaatctgaagggaaaaaggagatgaatgtctttgatggagtcatggtttgcactggccatcacaccaatgctcatctacctctggaaagcttccctggaattgagaagttcaaagggcagtacttccacagtcgagactataagaacccagagggattcactggaaagagagtcattataattggcattgggaattctggaggggatctggctgtagagattagccaaacagccaagcaggttttcctcagcaccaggagaggggcttggatcctgaatcgtgtaggggactacggatatcctgctgatgtgttgttctcttctcgacttacacattttatatggaagatctgtggccaatcattagcaaacaaatatttggaaaaaaagataaaccaaaggtttgaccatgaaatgtttggcctgaagcctaaacacagagctctgagtcagcatccaaccttaaatgatgacctgccaaatcgtatcatttctggcttggtgaaagtgaaaggaaatgtgaaggaattcacggagacagctgccatatttgaggatggctccagggaggatgacattgatgctgttatctttgccacaggctatagctttgactttccgtttctggaagattccgtcaaagtggtcaaaaacaagatatccctgtataaaaaggtcttccctcctaacctggaaaggccaactcttgcaatcataggcttgattcagcccttaggagccattatgcccatttcagagctccaaggacgctgggccactcaggtatttaaaggtctaaagacattgccctcacagagtgaaatgatggcagaaatatctaaagctcaagaggaaattgacaaaaggtatgtggagagccaacgccataccattcagggagactacatagataccatggaagagcttgctgatttggtgggggtcaggcccaatctgctgtctctggccttcactgaccccaagctggcattacacttattactgggaccctgcactccaatccactatcgtgtacagggccctggaaagtgggatggggctcgaaaagctatcctcaccacagatgatcgcatcaggaagcctctgatgacaagagtagttgaaaggagtagttctatgacttcaacaatgacaataggcaagtttatgctagctcttgccttctttgctataattatagcttacttctagttgtcctattgtcactgccctgtttttcattgggaagcttatctacagatgccttcagaatctgacgagattgactctcagtttcatattgcccagaaatctactttaatgtctctttcgaaagcattaattcactttcctttttcctacaatgaaacctgttttccatttgtattaactcatctcccttccactcatgatccgtcactcttccttgtggtaatccctagactgggagctcaggtactcttttagtcatctttgtatgtctttagcagagttcttgacatgtggtaggtgcttaataaatgtttgttgtttatcaaattttatggtagggagagtaagtcagcatcggtataaaatcgcttactccacgtaactcttcttctgatagggtttgattttctattagaagctcaattttagttttttttcatattataactaaatatgtttcctgagagataagagaaataatgttcctacaatagttgtatgtatctaagataagacatatagatgcttaagacattttgtttcacttgctattcactagtgtacttgaaacatggtcatttttagcccttttccttaggaaccatgtctttattttctcaataaagaaattactttcaact

SEQ ID NO: 374 - DNA, 1623 bp, Homo sapiens
gatgtggattttgccgtggggccaccaggctgttctcacgtgaacagctttaaggtgggagagaactggaggcaggaactgcgggttatctaccagtgcttcgtgtggtgtggaaccccagagaccaggaaaagcaaggcaaagtcctgcatctgccatgtgtgtggcacccatctgaacagactccactcttgcctttcctgtgtcttctttggctgcttcacggagaaacacattcacgagcacgcagagacgaaacaacacaacttagcagtagacctgtattacggaggtatatactgctttatgtgtaaggactatgtatatgacaaagacattgagcaaattgccaaagaagagcaaggagaagctttgaaattacaagcctccacctcaacagaggtttctcaccagcagtgttcagtgccaggccttggtgagaaattcccaacctgggaaacaaccaaaccagaattagaactgctggggcacaacccgaggagaagaagaatcacctccagctttacgatcggtttaagaggactcatcaatcttggcaacacgtgctttatgaactgcattgtccaggccctcacccacacgccgatactgagagatttctttctctctgacaggcaccgatgtgagatgccgagtcccgagttgtgtctggtctgtgagatgtcgtcgctgtttcgggagttgtattctggaaacccgtctcctcatgtgccctataagttactgcacctggtgtggatacatgcccgccatttagcagggtacaggcaacaggatgcccacgagttcctcattgcagcgttagatgtcctgcacaggcactgcaaaggtgatgatgtcgggaaggcggccaacaatcccaaccactgtaactgcatcatagaccaaatcttcacaggtggcctgcagtctgatgtcacctgtcaagcctgccatggcgtctccaccacgatagacccatgctgggacattagtttggacttgcctggctcttgcacctccttctggcccatgagcccagggagggagagcagtgtgaacggggaaagccacataccaggaatcaccaccctcacggactgcttgcggaggtttacgaggccagagcacttaggaagcagtgccaaaatcaaatgtggtagttgccaaagctaccaggaatctaccaaacagctcacaatgaataaattacctgtcgttgcctgttttcatttcaaacggtttgaacattcagcgaaacagaggcgcaagatcactacatacatttcctttcctctggagctggatatgacgccgtttatggcctcaagtaaagagagcagaatgaatggacaattgcagctgccaaccaatagtggaaacaacgaaaataagtattccttgtttgctgtggttaatcaccaaggaaccttggagagtggccactataccagcttcatccggcaccacaaggaccagtggttcaagtgtgatgatgccgtcatcactaaggccagtattaaggacgtactggacagtgaagggtatttactgttctatcacaaacaggtgctagaacatgagtcagaaaaagtgaaagaaatgaacacacaagcctactga

SEQ ID NO: 375 - DNA, 9736 bp, Homo sapiens
cggggccagggcagcgcggactcgcgtcccgtggagcgttccaggcgggcgcgcggctttctccccagacccaccgagtggcggcggaggcgagatgcgcgggggcgtgctcctggtcttgctgctgtgtgtcgccgcgcagtgccggcagagaggcctgtttcctgccattctcaatcttgccagcaatgctcacatcagcaccaatgccacctgtggcgagaaggggccggagatgttctgcaaacttgtggagcatgtgccaggtcggcccgtccgaaacccacagtgccggatctgtgatggcaacagcgcaaaccccagagcagaacgccatccaatatcacatgccatagatggcaccaataactggtggcaaagtcccagcattcagaatgggagagaatatcactgggtcacaatcactctggacttaagacaggtctttcaagttgcatatgtcatcattaaagctgccaatgcccctcgacctggaaactggattttggagcgttctctggatggcaccacgttcagcccctggcagtattatgcagtcagcgactcagagtgtttgtctcgttacaatataactccaagacgagggccacccacctacagggctgatgatgaagtgatctgcacctcctattattccagattggtgccacttgagcatggagagattcatacatcactcatcaatggcagaccaagcgctgacgatctttcacccaagttgttggaattcacttctgcacgatatattcgccttcgcttgcaacgcattagaacgctcaatgcagatctcatgacccttagccaccgggaacctaaagaactggatcctattgttaccagacgctattattattcaataaaggacatttctgttggaggcatgtgtatctgctatggccatgctagtagctgcccatgggatgaaactacaaagaaactgcagtgtcaatgtgagcataatacttgcggggagagctgtaacaggtgctgtcctgggtaccatcagcagccctggaggccgggaaccgtgtcctccggcaatacatgtgaagcatgtaattgtcacaataaagccaaagactgttactatgatgaaagtgttgcaaagcagaagaaaagtttgaatactgctggacagttcagaggaggaggggtttgcataaattgcttgcagaacaccatgggaatcaactgtgaaacctgtattgatggatattatagaccacacaaagtgtctccttatgaggatgagccttgccgcccctgtaattgtgaccctgtggggtccctcagttctgtctgtattaaggatgacctccattctgacttacacaatgggaagcagccaggtcagtgcccatgtaaggaaggttatacaggagaaaaatgtgatcgctgccaacttggctataaggattacccgacctgtgtctcctgtgggtgcaacccagtgggcagtgccagtgatgagccctgcacagggccctgtgtttgtaaggaaaacgttgaggggaaggcctgtgatcgctgcaagccaggattctataacttgaaggaaaaaaacccccggggctgctccgagtgcttctgctttggcgtttctgatgtctgcagcagcctctcttggcctgttggtcaggtaaacagtatgtccgggtggctggtcaccgacttgatcagtcccaggaagatcccgtctcagcaagatgcactaggcgggcgccatcaggtcagcatcaacaacaccgcggtcatgcagagactggctcccaagtactactgggcagcccccgaggcctaccttggaaataagctgactgcgtttggcggattcctgaaatacacggtgtcctacgatattccggtagagacggtagacagtaacctcatgtcgcatgctgacgtcatcattaagggaaacggactcactttaagcacacaggctgagggtctgtcattgcagccttatgaagagtacctaaacgtggttagacttgtgcctgaaaacttccaagattttcacagcaaaaggcagattgatcgtgaccagctgatgactgtccttgccaatgtgacacatcttttgatcagagccaactacaattctgcaaaaatggctctttacaggttggagtccgtctctctggacatagccagctctaatgccatcgacctggtggtggccgctgatgtggagcactgtgaatgtccgcaaggctacacagggacctcctgtgagtcgtgcctctctggctattaccgcgtggatggaatactctttggaggaatttgtcaaccctgtgaatgccacggccatgcagctgagtgtaatgttcacggcgtttgcattgcgtgtgcgcacaacaccaccggcgtccactgtgagcagtgcttgcccggcttctacggggagccttcccgagggacacctggggactgccagccctgcgcctgccctctcaccatagcctccaacaatttcagccccacctgccacctcaatgatggagatgaagtggtctgtgactggtgtgccccgggctactcaggagcttggtgtgagagatgtgcagatggttactatggaaacccaacagtgcctggcgaatcttgtgttccctgtgactgcagcggcaacgtggacccctcggaggctggtcactgtgactcagtcaccggggagtgcctgaagtgcctggggaacacagatggcgcccactgtgaaaggtgtgctgacgggttctatggggacgctgtgacagccaagaactgccgcgcctgtgaatgccatgtgaaaggctcccattctgccgtgtgccatcttgagaccgggctctgtgactgcaaaccaaacgtgactggacagcagtgtgaccagtgcttgcatggctattatgggctggactcaggccatggctgccggccctgcaactgcagcgtggcaggctccgtgtcagatggctgcacggatgaaggccagtgtcactgtgtcccaggtgtggcagggaaaaggtgtgacaggtgtgcccatggcttctacgcctaccaggatggtagctgtacaccctgtgactgcccacacactcagaatacctgcgacccagaaactggagagtgtgtctgcccccctcacacacagggtgtgaagtgtgaagaatgtgaggatgggcactggggctacgatgcggaggtggggtgccagcaggcctgcaattgcagtctcgtggggtcgactcatcatcggtgcgatgtggtcaccggccattgccagtgcaagtcaaaatttggtggccgggcctgcgatcagtgttccttgggttacagagactttcccgactgtgttccctgtgactgtgacctgagggggacgtcgggggacgcctgcaacctggagcagggtctctgcggctgtgtggaggaaaccggggcctgcccttgcaaggaaaatgtctttggtcctcagtgcaacgaatgtcgagagggcaccttcgctctccgcgcagacaaccccctgggctgcagcccgtgcttctgctccgggctgtcccacctctgctcagagctggaggactacgtgaggaccccagtaacgctgggctccgatcagcctcttctgcgtgtggtttctcagagtaacttgaggggcacgaccgagggggtttactaccaggcccccgacttcctgctggatgccgccaccgtccggcagcacatccgtgcagagccgttttactggcggctgccgcagcagttccaaggagaccagctcatggcctatggtggcaaactgaagtacagcgtggccttctattctttggatggcgtcggcacctccaattttgagcctcaagttctcatcaaaggtggtcggatcagaaagcaagtcatttacatggatgcaccagccccagagaatggagtgagacaggaacaagaagtagcaatgagagagaatttttggaaatattttaactctgtttctgaaaaacctgtcacgcgagaggattttatgtctgtcctcagcgatattgagtacatcctcatcaaggcatcgtatggtcaaggattacagcagagcagaatctcagacatttcaatggaggttggcagaaaggctgaaaagctgcacccagaagaagaggttgcatctcttttagagaattgtgtctgtcctcctggcactgtgggattctcatgtcaggactgcgcccctgggtaccacagagggaagctcccagcagggagtgacaggggaccacgccctctggttgctccttgtgttccctgcagttgcaacaaccacagtgacacctgtgaccccaacaccgggaagtgtctgaactgtggcgataacacagcaggtgaccattgtgatgtgtgtacttctggctactacgggaaggtgactggctcagcaagtgactgtgctctgtgtgcctgtcctcacagccctcctgccagttttagtcccacttgtgtcttggaaggggaccacgatttccgttgtgacgcctgtctcctgggctatgaaggaaaacactgtgaaaggtgctcctcaagctattatgggaaccctcaaacaccaggtggcagttgccagaagtgtgactgcaacccgcacggctctgtccacggtgactgtgaccgcacatctgggcagtgcgtttgcaggctgggggcctcggggctccggtgcgatgagtgtgaaccgaggcacattctgatggaaacagattgtgtttcctgtgatgatgagtgtgtaggtgtgctgctgaatgacttggatgagattggtgatgccgttctttctctgaacctcactggcattatccctgtcccatatggaattttgtcaaacctggaaaatacaactaaatatctccaggaatctttattaaaagaaaatatgcaaaaggacctgggaaaaattaagcttgaaggtgttgcagaagaaacggacaacctgcaaaagaagctcactaggatgttagcgagtacccaaaaggtgaatagggcaactgagagaatcttcaaggagagtcaagacctggccatagccattgagaggctgcagatgagcatcacagaaattatggaaaagacaactttaaatcagactttggatgaagatttcctactacccaattctactcttcagaacatgcaacagaatggtacatctttgctagaaatcatgcagataagagacttcacacagttgcaccaaaatgccacccttgaactcaaggctgctgaagatttattgtcacaaattcaggaaaattaccagaagccgctggaagaattggaggtattgaaagaagcagcaagccacgtcctttcaaagcacaacaatgaactaaaggcggctgaggcgctcgtgagggaagctgaggcaaagatgcaggaaagcaaccacctgctgctcatggtcaatgctaatctgagagaattcagtgataaaaagctgcatgttcaagaagaacaaaatctgacctcagagctcattgtccaaggaagaggattgatagatgctgctgctgcacaaacagatgctgtacaagatgctctagagcacttagaggatcaccaggataagctacttttatggtctgccaaaatcaggcaccacatagatgacctggtcatgcacatgtcccaaaggaacgcagtcgacctggtctacagagctgaggaccatgccgctgagttccagagactagcagatgttctgtacagtggccttgaaaacatcagaaatgtgtccctgaatgccaccagtgcagcctatgtccattacaacatccagagcctgattgaagaatcggaggaactggccagagatgctcacaggactgtgactgagacgagcctgctctcagaatcccttgtttctaacgggaaagcggccgtgcagcgcagctccagatttctaaaagaaggcaacaacctcagcaggaagcttccaggtattgcattggaactgagtgaattgagaaataagacaaacagatttcaagagaatgctgttgaaattaccaggcaaaccaatgaatcactcttgatacttagagcaattcctaaaggtataagagacaagggagccaaaaccaaagagctggccacgtctgcaagccagagcgcggtgagcacgctgagggacgtggcggggctgagccaggagctgctgaacacatctgccagcctgtccagggtcaacaccacattacgagagacacaccagcttctgcaggactccaccatggccactctgttggctggaagaaaagtcaaagacgtggaaattcaagccaaccttttgtttgatcggttgaagcctttgaagatgttagaggagaatctgagcagaaacctatcagaaattaaactgttgatcagccaggcccgcaaacaagcagcttctattaaagtcgccgtgtctgcagacagagattgcatccgggcctaccagcctcagatttcctctaccaactacaataccttaacactaaatgttaagacacaggaacccgataatcttctcttctacctcggtagcagcaccgcttctgatttccttgcagtggagatgcggcgagggagagtggccttcctgtgggacctgggctccgggtccacacgcttggagtttccagactttcccattgatgacaacagatggcacagtatccatgtagccaggtaacccttagatttggaaacattggttcactgagtgtaaaggaaatgagctcaaatcaaaagtcaccaacaaaaacaagtaaatcccctgggacagctaatgttctggatgtaaacaattcaacactcatgtttgttggaggtcttggaggacaaatcaagaaatctcctgctgtgaaggttactcattttaaaggctgcttgggggaggccttcctgaatggaaaatccataggcctatggaactatattgaaagggaaggcaagtgccgtgggtgcttcggaagctcccagaatgaagacccttccttccattttgacgggagtgggtactctgtcgtggagaagtcacttccggctaccgtgacccagataatcatgctttttaataccttttcacctaatggacttcttctctacctgggttcatacggcacaaaagactttttatccatcgagctgtttcgtggcagagtgaaggttatgactgacctgggttcaggacccattacccttttgacagacagacgttataacaatggaacctggtacaaaattgccttccagcgaaaccggaagcaaggagtgctagcagttatcgatgcctataacaccagtaataaagaaaccaagcagggcgagactccgggagcatcttctgacctcaaccgcctagacaaggacccgatttatgtgggtggattaccaaggtcaagagttgtaaggagaggtgtcaccaccaaaagctttgtgggctgcatcaagaacctggaaatatccagatcaacctttgacttactcagaaattcctatggagtgagaaaaggctgtttactggagcccatccggagtgttagcttcctgaaaggcggctacattgaattgccacccaaatctttgtcaccagaatcagaatggctggtaacatttgccaccacgaacagcagtggcatcatcctggctgccctcggcggggatgtggagaagcggggtgatcgtgaggaagcacacgtgcccttcttttccgtcatgctgatcggaggcaacattgaggtacatgtcaatcctggggatgggacaggcctgagaaaagctctcctgcacgctcccacgggtacctgcagtgatggacaagcgcattccatctccttggtcaggaatcggagaattatcactgtccaattggatgagaacaatcctgtggaaatgaagttgggcacattagtagaaagcaggacgataaatgtgtccaatctgtacgtcgggggaattccagagggagaggggacgtcactgctcacaatgagaagatcgttccatggctgtatcaaaaacctgatcttcaatttggaacttttggatttcaacagtgcagttggccatgagcaagtcgacctggacacctgctggctgtcagaaaggcctaagctggctcccgatgcagaggacagcaagctcttgccagagccccgggcttttccagtaggagcggcttcctttactatcagtcaggtccagtcagcaaaggagggcctaggacagagggagttaaaatggggccttgctgtaaaggtgcctgcgaaagctggagctggagctggagctggagctgtgctaaaaatcagagcggggacagggagggaaagggtgcctcaagcaactcagatgacacggcccaatccataggaacagtgtgtggtggatgcagctctggagtacgttcccggcgctcaccagtttggtctcacacaaaacagccatttcatcttgccttttaatcagtcggctgtcagaaagaagctctcggttgagctaagcatccgcacgttcgcctccagcggcctgatttactacatggctcatcagaaccaagcagactacgctgtgctccagctgcacgggggccgcctccacttcatgtttgaccttggcaaaggcagaacaaaggtctctcaccctgcactgctcagtgatggcaagtggcacacggtcaagacagactatgttaaaagaaaaggcttcataactgtcgacggccgagagtctcccatggtgactgtggtgggagatggaaccatgctggatgtggagggtttgttctacctaggaggcctgccctcccagtaccaggccaggaaaattggaaatatcacccacagcatccctgcctgcattggggatgtgacggttaacagcaaacagctggacaaggacagcccggtgtctgccttcacggtgaacaggtgctacgcagtggcccaggaaggaacatactttgacggaagcggatatgcagctcttgtcaaagagggctacaaagtccagtcagatgtgaacatcacactggagtttcgaacctcctcgcagaatggcgtcctcctggggatcagcactgccaaagtggatgccattggactagagcttgtggacggcaaggtcttgttccatgtcaacaatggtgctggcaggataacagctgcatatgagcccaaaaccgccactgtgctctgtgatggaaaatggcacactcttcaagctaacaaaagcaaacaccgtatcactctgattgttgacgggaacgcagttggcgctgaaagtccacacacccagtctacctcagtggacaccaacaatcccatttatgttggtggctatcctgctggtgtgaagcaaaaatgcctgcgcagccagacctcgttccgcgggtgtttgaggaagctagctctgattaagagcccgcaggtgcagtcctttgacttcagcagagcgttcgaactgcacggagttttccttcattcctgtcctgggaccgagtcctgaacttcaagcagaatcctcagttggaatcattgctaatattttgaggagaagtgtatgtgtgaattaagaatctcttcagttcatatttcatttccaactcaggttaagtgtttctggggagagatgttgtgtttacgttacactaaaaccacatgtgcaacaaatacctccattaaatggtctaaaatgtaaa

SEQ ID NO: 376 - DNA, 3699 bp, Homo sapiens
tcactggagaggaggcagggacagacccagcagcacccacctgagcgagaagagcagacaccgtgctcctggaatcacccagcatgttgcaaggtctcctgccagtcagtctcctcctctctgttgcagtaagtgctataaaagaactccctggggtgaagaagtatgaagtggtttatcctataagacttcatccactgcataaaagagaggccaaagagccagagcaacaggaacaatttgaaactgaattaaagtataaaatgacaattaatggaaaaattgcagtgctttatttgaaaaaaaacaagaacctccttgcaccaggctacacggaaacatattataattccactggaaaggagatcaccacaagcccacaaattatggatgattgttattatcaaggacatattcttaatgaaaaggtttctgacgctagcatcagcacatgtaggggtctaaggggctacttcagtcagggggatcaaagatactttattgaacctttaagccccatacatcgggatggacaggagcatgcactcttcaagtataaccctgatgaaaagaattatgacagcacctgtgggatggatggtgtgttgtgggcccacgatttgcagcagaacattgccctacctgccaccaaactagtaaaattgaaagacaggaaggttcaggaacatgagaaatacatagaatattatttggtcctggataatggtgagtttaaaaggtacaatgagaatcaagatgagatcagaaagagggtatttgagatggctaattatgtcaacatgctttataaaaagctcaatactcatgtggccttagttggtatggaaatctggactgacaaggataagataaagataaccccaaatgcaagcttcaccttggagaatttttctaaatggagggggagtgttctctcaagaagaaagcgtcatgatattgctcagttaatcacagcaacagaacttgctggaacgactgtgggtcttgcatttatgtctacaatgtgttctccttattctgttggcgttgttcaggaccacagcgataatcttcttagagttgcagggacaatggcacatgaaatgggccacaactttggaatgtttcatgacgactattcttgcaagtgtccttctacaatatgtgtgatggacaaagcactgagcttctatatacccacagacttcagttcctgcagccgtctcagctatgacaagttttttgaagataaattatcaaattgcctctttaatgctccattgcctacagatatcatatccactccaatttgtgggaaccagttggtggaaatgggagaggactgtgattgtgggacatctgaggaatgtaccaatatttgctgtgatgctaagacatgtaaaatcaaagcaacttttcaatgtgcattaggagaatgttgtgaaaaatgccaatttaaaaaggctgggatggtgtgcagaccagcaaaagatgagtgcgacctgcctgaaatgtgtaatggtaaatctggtaattgtcctgatgatagattccaagtcaatggcttcccttgccatcacgggaagggccactgcttgatggggacatgccccacactgcaggagcagtgcacagagctgtggggaccaggtaggaggacaaatcctttcccctgtgcatgtgcgaaggaaaatcatttcagatgacagtgtttaaccatggtcaaaggaccattctgtcctatccttcttagaagctttgaactcaaaatcatggaaaggttttaagatttgaggttggttttagggttgctagatttagcaagtaaaaataaggatggccccgttaaattttaacttaaaattaacaagttttttgttaattttttgttttttgtctcagcatcagtatatcccatgcaatatttgaggtgtgctcatactaaaattatttgtgtatctgaaattcaaattaaactgggtgtctttttcttttcatctggcaaccctactaagatcataaacccttggaaatctgtgtgtgtgcgggtgtgtgtgtgtgtgtgtgtgcaggggtggcagaagtactgtgggatgggacagaaataagaaaagatggaaaaaagaaaagaactgaggttgcagataagtcatgttacaacaggaatgaaggtgggtcaaagtacgggtactgtcgcagagtggatgacacactcattccctgcaaagcaaatgataccatgtgtgggaagttgttctgtcaaggtgggtcggataatttgccctggaaaggacggatagtgactttcctgacatgtaaaacatttgatcctgaagacacaagtcaagaaataggcatggtggccaatggaactaagtgtggcgataacaaggtttgcattaatgcagaatgtgtggatattgagaaagcctacaaatcaaccaattgctcatctaagtgcaaaggacatgctgtgtgtgaccatgagctccagtgtcaatgtgaggaaggatggatccctcccgactgcgatgactcctcagtggtcttccacttctccattgtggttggggtgctgttcccaatggcggtcatttttgtggtggttgctatggtaatccggcaccagagctccagagaaaagcagaagaaagatcagaggccactatctaccactggcaccaggccacacaaacagaagaggaaaccccagatggtaaaggctgttcaaccccaagagatgagtcagatgaagccccatgtgtatgatctgccagtagaaggcaatgagcccccagcctcttttcataaagacacaaacgcacttccccctactgttttcaaggataatccagtgtctacacctaaggactcaaatccaaaagcatgaagcaacagctaagcaagaactaatggctaaattatcaacttggaaaactggaaaatctggatggcagagaaatatactatctatctcaccagtatttgctctcgactcaagaaggttaacattttctgattcatgttagactttgaagagactaaagaaaattttcaagaggaacatatgcctgagaacctttgcatgaatttaaaatttcaattatccattcttataagaaggaagatgattgtaaagaaatatctccgaagttaaaatctgtaataggaattgattcattctctaatgaaaacaaaacataaaaacatcacactaatcttggaggaataagaaaaattgtacatccattaaatgtacaattgattgcaacatcttgattgttttaaccattaacttgtcaaattacaatcacagttaagaaaatgatgtaaaattctgttttgtggatctctttcctagattagcttctgaaatcattattagctatatcatttgaggttttctacaatttggtataactaagaatttaaaaatgttttatcatatatatttgtataattaattactggcatggttaaagtggttttcactttttaaatggagaaaatttcagttaaattaataggataaaccaggttgcgaactggtgacctgtaggccatgtttgcactgcaaatatatttggtctgaatgatattgatattggacacatagtacttttacatgttttgaatgtattgctaatatttaaaaattgagagatcttgcataaacaatagattcccagctttgtcaga

SEQ ID NO: 377 - DNA, 3807 bp, Homo sapiens
aaacccggaagcggatcgggtggagtgtaggtcatatcgccgcgaatgctgtgtatttacttgaactcatacatcagaagatagtgatcttaacacattatgtttgggaagtttaaaatatctcttccaaatgcttgatgaaaaaggtgggaggatcacttgagccagggagttgaaggctgcagtgagccctgtttttgccaccacactccagcttggagaggtgaggggctgtcctctggatggcaattgatgaaggatgagtctgtgccctgaaggggagatcagtccagcccagctccccactgctgcctcgtgtgtggtggcttctccaggagagaggattgattcctaaagactcatgttacgtgaggaagcagctcagaagaggaaaggaaaggagccaggcatggctcttcctcagggacgcttgactttccgggatgtggctatagaattctcattggcagagtggaaatgcctgaacccttcacagagggctttgtacagggaagtgatgttggagaactacaggaacctggaggctgtggatatctcttccaaatgcatgatgaaggaggtcttgtcaacagggcaaggcaatacagaagtgatccacacagggacattgcaaagacatgaaagtcatcacattggagatttttgcttccaggaaattgagaaagaaattcatgacattgagtttcagtgtcaagaagatgaaagaaatggccttgaagcacccatgacaaaaataaaaaagttgactggtagcacagaccaacatgatcacaggcatgctggaaacaagcctattaaagatcagcttggatcaagcttttattcacatctgcctgaactccacatatttcagatcaaaggtgaaattggtaatcaacttgagaagtctactaatgatgctccctcagtttcaacattccaaagaatttcctgtaggccccaaacccagatttctaataactatgggaataatcccctgaattcttcattactcccacaaaaacaggaagtacacatgagagaaaaatctttccaatgtaataagagtggcaaagcctttaattgtagctcactcttaaggaaacaccagataccccatttaggagacaaacaatataaatgtgatgtatgtggcaagctctttaatcacgagcaataccttgcatgccatgatagatgtcacactgttgagaaaccttacaagtgtaaagagtgtggcaagaccttcagtcaggagtcatcccttacctgccatcgtagacttcatactggagtaaaacgttacaattgtaatgagtgtggcaagatctttggtcaaaattcagcccttctaattgataaggcaattgatactggagaaaatccttacaagtgtaatgaatgtgacaaggcttttaatcaacaatcacaactttcacatcatagaattcatactggagagaaaccttacaaatgtgaagaatgtgacaaagttttcagtcggaaatcaaccattgagacacataagagaattcatactggagagaaaccatacagatgtaaggtttgtgacacagctttcacgtggcattcacagctggctcgacatagaagaattcatactgcaaagaaaacttataaatgtaatgagtgtggcaagaccttcagtcacaagtcatcccttgtatgccatcatagacttcatggtggagagaaatcttacaaatgtaaggtttgtgacaaggcttttgtgtggagttcacaactggcaaaacatactagaattgactgtggagaaaaaccttacaagtgtaatgaatgtgggaagacctttggtcaaaattcagatcttttaattcataagtcaattcatactggggagcaaccttacaaatgtgatgaatgtgaaaaggttttcagtcgtaaatcaagccttgagacacataagataggtcatactggagagaaaccatacaaatgtaaggtttgtgacaaggcttttgcgtgtcattcctatctggcaaaacatactagaattcatagtggagagaaaccttacaagtgtaatgagtgcagcaagaccttcagtcacaggtcataccttgtatgccatcatagagttcatagtggtgagaaaccttacaagtgtaatgagtgcagcaagaccttcagtcgcaggtcatcccttcattgccatcgtagacttcatagtggtgagaaaccttacaagtgtaatgagtgtggcaataccttccgtcactgctcatcccttatataccatcgtagacttcatactggagagaaatcttacaaatgtacaatttgtgacaaggctttcgtgcgtaattcactcctgtcaagacataccagaattcacactgcagagaaaccttacaagtgtaatgaatgtgggaaggcttttaatcaacaatcacacctttcacgtcatcatagaattcatactggagagaaaccttagaaatgtgaagcatgtgacaaagtttccatttggaaatcacaccttaaagacataggagaatttatactggagagaaagcttacaaatgtaaggtttctgacaagacttgggagtgattcacacctggaacaacatactggacttcacactggagagaaaccttacaagtgtaatgagtgtggcaaagcctttggcaagcagtcaacacttattcaccatcaggcaattcatggtgtagggaaacttgactaatgtaatgattgtcacaaagtcttcagtaatgctacaacgattacaaatcattggagaatccataatgaagagagatcttacaagtgtaataaatgtggcaaatttttcagagatcgttcacatattgcaggtcatcggtgaactcatactggagagaaaccttacaaatgtcatgactgtgccaaggtcttcagtcaagcttcatcctatgcaaaacataggagaatttatacaggagagaaacctcacaagtgtgatgattgtggcaaagcctttgcttcacgttcacacgtcattagacatcagagaatctatactggacagaaatcttacaaatgtcatcagtgtggcaaggtcttcagtccaagatcactccatgcagaacatcagaaaattcatttttgagataaccgttcccaatgaaatgagtatagcaaaccatcaagcattaattgacattggagtcaattcagcattgacttgagtttgtgttgacttaacattgagttcaagcctttattgacattcaagtgtttatgttaagaggatggggccaggtgtggtggctccgacctgtaatcccagcacgtcgggaggccaaggcacataggtcacttgaggtcaggagtttgaaaccagcatggccaacagatgtgagccacttttctcagcctgttttttgtttcttattttctattatttttttgagccagtactttttaaagagatagtacttttttcagttagtactttttgaaagggatatatcatagtaatttttaaaagggatatgaggccaggcacggaggctcatgcctataatcccagcactttgggaggccgaggcaggcagatcacggggtcaggagatcgagactttcctggctaacagggtgaatccctgtctctactaaaaatacaaaaaattagctgggcatggtggctggcgcctgtagtcccagctactccagatgctgaggcaggagaatggcatgaacctgtgaggcggagcttgcagggagtcgagatcgcaccactgggctccagcctgggcgacagagtgagagtctatctca

SEQ ID NO: 378 - DNA, 483 bp, Homo sapiens
atgacaataaatatgttaagtgtatttggaaatgaagacttcgattgccatggagacttaaaaacagatcaactgaaaatgaatattctgattaagaagctaaaacataagtttgatgatcttacagtagagaaggaagctgtatcttcaaaatgtgtcaatttggctaaagacaatcaagttcttcaacaggagttattatcgatgaaaaaagtacaacaggaatgtgaaaaacttgaggaggataaaaagatgttggaagaagaaatattaaatcttaagacacatatggaaaacaatatggtagaacttagtaaactacaagaatataaatcggagctagatgaaagggcaatgccggcagtagaaaaattagaagaaatccatttacaggtggagctggactgtgtagaacaaataattagagaaacaaagagaactgttgctgtgttggacacttgctcccatctattttcttctcta

SEQ ID NO: 379 - DNA, 3138 bp, Homo sapiens
aagcctattaaagatcagcttggatcaagctttcattcgcatctgcctgaactccacatgtttcagacccaagggaaaattggtaatcaagtggagaagtctatcaatgatgcttcctcagcttcaacatcccaaataatttgtaggctcaaaacccatatttctattaagtatgggaagaatttcctctattcttcattattcacacaaatacaagaagtacacatgagggaaaaacctttccaatgtaatgagtgtggcaaagcctttaatcatagctcatgtttaaggagacatcacgtaacccattcaggagagaaacagtataaatgtgatgtatgtggcaaagtctttcatcagaagcaataccttgcatggcaccatagtgttcatactggagaaaaaccttacaagtgtaatgagtgttccaagaccttcaatcagaagtcatcccttcagtgtcatcatagacttcatactgtacagaaacattacaaatgtgaagaatgcaacaaagcttttagtagaaaagcaaaccttgcacatcatggacttcatactggagggaaatcttacaaatgtaagggttgtgacaaggttttccaccatgatttatgccttgcacaacatcagagagttcatactggagagaaccttacacatttcacgagtatggaaagacctttgctcaaaattcagcccttgtaatgcataaggcaattcatactggaaagaaaccttacacatgtaatgaatgtggcaaggtttttagtagaaaagcacaccttgcatgtcatcatagacttcatactgtctaaggtttctaatcaacaatcaaaccttgcacaacatcagagagtttatactggagagaaaccttacaagtgtaatgagtggggcaaagccttaagtgggaagtcgtcacttttttatcatcaagcaatccatggtgtagggaaactttgcaaatgtaatgattgtcacaaagtcttcagtaatgctacaaccattgcaaatcactggagaatccataatgaagacagatcttacaagtgtaataaatgtggtaaaattttcagacatcgatcatatcttgcagtttatcagcgaactcatactggagagaaaccttacaaatatcatgactgtggcaaggtcttcagtcaagcttcatcctatgcaaaacataggagaattcatacaggagagaaacctcacaagtgtgatgattgtggcaaagtcttgacttcacgttcacacctcattagacatcagagaatccatactggacagaaatcttacaaatgtcttaagtgtggcaaggtcttcagtctgtgggcactccatgcagaacatcagaaaattcatttttgagataactgttccaaatacagtgactatagaagatcataaagctttaattgacattagagccaaataggcattgacttgagattgagttgacttaaccttgagtttaagaattaatttacattaaagtgtttatgttaagaagattgggccaggtggggattacaggcgcgagccaccgcgcccggcccctaagttaatatttcaaacaatcgaaggtaaaacaacatattgtgttgggccacctgtactgaacgctgaatcgtttttcctcttaagttgaaaatggttttaatgcaaagcgccttttttgagcaggtagagtcacgcatccggcaggcggggcgagctcccctctgtctggggcagggtgggggagaggggcagggacctcggtaaaggggtggagtggcgcgctggttgccgcgggcactggcaattagaagggattattaaactaagcaaggtcctgggttgtttgagtggataatggaaactgaaaggtgacgtgcaaaactgcctattactcccaggagtggaggataatttcatatttcatggaaataaactcagggcccggagcggtggctcacacctgtaatcccagcactttgagaggccaaggagggaggatcgcttaagcccaggaattcgaaatcagcctaggcaacatagtaagacctcatctctactaaaaataaaaaaaaacagccaggtgtgttagtccacacctgtggtcccagctgcttgggctgcctcagcttcccgagtagctgggattacaggtatgaaccactatgcccggctaactttgttttttttttttagaaattaaaccttttttcagcttaatgacccaggggtgtatttttgaaggacttgggagctctctttgaaaggcaaacaacaagggaaacagtacctttatctcagtaggaaattaaataattcaaacatcaaataacttcaatttaaggctatggactttgagataattctgagccttgagaggaatgtggtcaggcaacctgagtccagtggaatgcaggtgcaacttctaagagttttcctgtaagtaattaagaagactaagtagccccagagataagacctcctcggatcattgtcccttcttatgtagtgataaagtaaccttccttgaagtgtatctatccgtaatcaatcaagttgctgcagcctatgcactggcccagaataaaaaacgtggtgattctgctaaagcttctctgtctttccctgtgtgtgaaatcttaacgtctctacttgggaacgctgatcccattcatttagagttgatgtttccacgtggctatttccaagctttgccttcaaataaattctgtacttaatcatatattctaaattttattatttactgctgacatcagtttctgtcggattgtaggagcctcaccagagagggcccctgtcgccatgttgtaaaactcacacttgccaaaagttgtgggttagggtttctccccctccctcaggatgacgctagttagctgacacagatggtcacctccattaccaagtagagtcaggatgaactatgtgtgactgttcaactatgtgtcctcttccctgaggactgattagtgtttatcttgaaaacatgtccttaatgggttgtatagaacactgaagcatctgatttcaaactcttagctcttttcctctatttcccatcacattctggtctaaggcttatttattaataaaatgatttttatttctttatta

SEQ ID NO: 380 - DNA, 1330 bp, Homo sapiens
gagtctggaccacgcagactcagaacagcactactcacagcagggcctcttgctcgctctagctgctgggaggaaaacggcttgctaatctccacgcccagaaattcagacaagagcattctccttatctcatctgcacaggaagcaggtctaagtgtaatttcacaagcccctgactctgtgtagacacccagctctccagaaaaatgctttgaagacaaaggatacagcatacagtcccgtgtctcggctgagtcatcgcattccttaatagaagtgtcttctccccgggtttggtggcctgcttctggagtggtcagttctgctgccgacatgcccacccagctcgagatggccatggacaccatgattagaatcttccaccgctattctggcaaggaaaggaagagattcaagctcagcaagggggaactgaaactgctcctgcagcgagagctcacggaattcctctcgtgccaaaaggaaacccagttggttgataagatagtgcaggacctggatgccaataaggacaacgaagtggattttaatgaattcgtggtcatggtggcagctctgacagttgcttgtaatgattactttgtagaacaattgaagaagaaaggaaaataaaggtaagtaataagctcatctaaaggcagaaatatatccaaagttatgtacttaatgttcatttataccgttcagatctatagacccagtaatgtcatttatagctataatatccagtgcatatattaataattaattgctactattgaattatgtgccccttaaaatattgactttatgtagatattctaaatctcatatgccctacttgaaacttgcctgtattattaagaggctatatgcatctttttggtttgtcaaaacgagggcattacaaaaatttagctactttcaaatgagacttgaatttggcaaatttctaagatggacattcatatccttaaattgtattttgaacttcttaccctattaaaaaaaattaactgggaagttcgtgaatgctaatcaagggctaaataaagtggaaagcagcatccttgaaaatcatcgctctcaggacggggtctgcctggaatagcactgaatgtgtttagtagtgcctttggcttgggggctttggagaaagctgcttgagcccttcccatgctcataaattaggtaaggagcagtgaggaagtgtctacagcaacctcagccaatgtgatgtgcctctacagctgtatgaagtagattctctgattttatcttgaaatccacaacttccacaaaaaagaaaaatcttttaccatttctcatt

SEQ ID NO: 381 - DNA, 3266 bp, Homo sapiens
agaagaggacaggaaagaaacttcagtctgagggttgaggacacgtcccggagcagaggaggaccaagctcccaagccccctgtcaccttgacacgcagacggttccccaggactgcgaagaggggggcaaccagcgccccgccccgccccgctgcgccgcccgccattggccggtccgaaagacgcggggcgttgtcggtttgaatgagagcgcctggagccggggcgcaggcgcagaggagggcggtgttgagaccggcggagcggcgggacccctaggtggcggagggacgctccgggaaagcgaggggcgctacgagctctggcccacgtgacctgccgggggcgggagcagggggcgcgccggcctcctgcggtgcccctgccttggggaggggccgtgaccacccgtctgtcgcccgaggcggccgccgctgcaccttcaccgcgtacccgggacccgcccgcccgcgggagagaaatgttgctgaagtgctgctgaaagggccagagatgcaaggatttgggatacattttgaacctttaagctgtctgacattgacctcctttcattattaataaagaagaatcaggagcttaggatgtattaacaccaactcattaatatactaaccggacaatgttctacaaacaattctacattgtaaaggactggattggcacaaaataaaataattttattttattcagcttataatatgactcgatggaggaaaatttgataagcatgagagaagaccattcttttcatgttcgttacagagaatggaagcttcttgcctagagctggccttggaaggggaacgtctatgtaaatcaggagactgccgcgctggcgtgtcattctttgaagctgcagttcaagttggaactgaagacctaaaaacacttagcgctatttacagccagttgggcaatgcttatttctatttgcatgattatgccaaagcattagaatatcaccatcatgatttaacccttgcaaggactattggagaccagctgggggaagcgaaagctagtggtaatctgggaaacaccttaaaagttcttgggaattttgacgaagccatagtttgttgtcagcgacacctagatatttccagagagcttaatgacaaggtgggagaagcaagagcactttacaatcttgggaatgtgtatcatgccaaagggaaaagttttggttgccctggtccccaggatgtaggagaatttccagaagaagtgagagatgctctgcaggcagccgtggatttttatgaggaaaacctatcattagtgactgctttgggtgaccgagcggcacaaggacgtgcctttggaaatcttggaaacacacattacctccttggcaacttcagggatgcagttatagctcatgagcagcgtctccttattgcaaaagaatttggagataaagcagctgaaagaagagcatatagcaaccttggaaatgcatatatatttcttggtgaatttgaaactgcctcggaatactacaagaagacactactgttggcccgacagcttaaagaccgagctgtagaagcacagtcttgttacagtcttggaaatacatatactttacttcaagactatgaaaaggccattgattatcatctgaagcacttagcaattgctcaagagctgaatgatagaattggtgaaggaagagcatgttggagcttaggaaatgcatacacagcactaggaaatcatgatcaagcaatgcattttgctgaaaagcacttggaaatttcaagagaggttggggataaaagtggtgaactaacagcacgacttaatctctcagaccttcaaatggttcttggtctgagctacagcacaaataactccataatgtctgaaaatactgaaattgatagcagtttgaatggtgtacgccccaagttgggacgccggcatagtatggaaaatatggaacttatgaagttaacaccagaaaaggtacagaactggaacagtgaaattcttgctaagcaaaaacctcttattgccaaaccttctgcaaagctactctttgtcaacagactgaaggggaaaaaatacaaaacgaattcctccactaaagttctccaagatgccagtaattctattgaccaccgaattccaaattctcagaggaaaatcagtgcagatactattggagatgaagggttctttgacttattaagccgatttcaaagcaataggatggatgatcagagatgttgcttacaagaaaagaactgccatacagcttcaacaacaacttcttccactccccctaaaatgatgctaaaaacatcatctgttcctgtggtatcccccaacacggatgagtttttagatcttcttgccagctcacagagtcgccgtctggatgaccagagggctagtttcagtaatttgccagggcttcgtctaacacaaaacagccagtcggtacttagccacctgatgactaatgacaacaaagaggctgatgaagatttctttgacatccttgtaaaatgtcaaggatccagattagatgatcaaagatgtgctccaccacctgctaccacaaagggtccgacagtaccagatgaagactttttcagccttattttacggtcccagggaaagagaatggatgaacagagagttcttttacaaagagatcaaaacagagacactgactttgggctaaaggactttttgcaaaataatgctttgttggagtttaaaaattcagggaaaaaatcggcagaccattagttactatggatttattttttttcctttcaaacacggtaaggaaacaatctattacttttttccttaaaaggagaatttatagcactgtaatacagcttaaaatatttttagaatgatgtaaatagttaaccttcagtagtctattaaggcattaatacttctctggacatgcgcgtttgagggtggaggggtcctgtaaggtgcttcatcgtctgtgattactgcttgggatgtgttctttggcagcttgtgagattactttacctagtgtttataaagtaggaagttaagtgaatcatagattagaatttaatactcttatggaaataattttttaacatcttaattgacaatggcgtttttttatacataaccatggatgtagtgggaaacaatgttgtttggtaaaaataatgtacttgatcaatgtaaaaaagtatataaaatagtcttactaaaaatctaggtttttttttcctcc

SEQ ID NO: 382 - DNA, 5053 bp, Homo sapiens
gcccctcccgtcagttcgccagctgccagccccgggaccttttcatctcttcccttttggccggaggagccgagttcagatccgccactccgcacccgagactgacacactgaactccacttcctcctcttaaatttatttctacttaatagccactcgtctctttttttccccatctcattgctccaagaatttttttcttcttactcgccaaagtcagggttccctctgcccgtcccgtattaatatttccacttttggaactactggccttttctttttaaaggaattcaagcaggatacgtttttctgttgggcattgactagattgtttgcaaaagtttcgcatcaaaaacaacaacaacaaaaaaccaaacaactctccttgatctatactttgagaattgttgatttcttttttttattctgacttttaaaaacaacttttttttccacttttttaaaaaatgcactactgtgtgctgagcgcttttctgatcctgcatctggtcacggtcgcgctcagcctgtctacctgcagcacactcgatatggaccagttcatgcgcaagaggatcgaggcgatccgcgggcagatcctgagcaagctgaagctcaccagtcccccagaagactatcctgagcccgaggaagtccccccggaggtgatttccatctacaacagcaccagggacttgctccaggagaaggcgagccggagggcggccgcctgcgagcgcgagaggagcgacgaagagtactacgccaaggaggtttacaaaatagacatgccgcccttcttcccctccgaaactgtctgcccagttgttacaacaccctctggctcagtgggcagcttgtgctccagacagtcccaggtgctctgtgggtaccttgatgccatcccgcccactttctacagaccctacttcagaattgttcgatttgacgtctcagcaatggagaagaatgcttccaatttggtgaaagcagagttcagagtctttcgtttgcagaacccaaaagccagagtgcctgaacaacggattgagctatatcagattctcaagtccaaagatttaacatctccaacccagcgctacatcgacagcaaagttgtgaaaacaagagcagaaggcgaatggctctccttcgatgtaactgatgctgttcatgaatggcttcaccataaagacaggaacctgggatttaaaataagcttacactgtccctgctgcacttttgtaccatctaataattacatcatcccaaataaaagtgaagaactagaagcaagatttgcaggtattgatggcacctccacatataccagtggtgatcagaaaactataaagtccactaggaaaaaaaacagtgggaagaccccacatctcctgctaatgttattgccctcctacagacttgagtcacaacagaccaaccggcggaagaagcgtgctttggatgcggcctattgctttagaaatgtgcaggataattgctgcctacgtccactttacattgatttcaagagggatctagggtggaaatggatacacgaacccaaagggtacaatgccaacttctgtgctggagcatgcccgtatttatggagttcagacactcagcacagcagggtcctgagcttatataataccataaatccagaagcatctgcttctccttgctgcgtgtcccaagatttagaacctctaaccattctctactacattggcaaaacacccaagattgaacagctttctaatatgattgtaaagtcttgcaaatgcagctaaaattcttggaaaagtggcaagaccaaaatgacaatgatgatgataatgatgatgacgacgacaacgatgatgcttgtaacaagaaaacataagagagccttggttcatcagtgttaaaaaatttttgaaaaggcggtactagttcagacactttggaagtttgtgttctgtttgttaaaactggcatctgacacaaaaaaagttgaaggccttattctacatttcacctactttgtaagtgagagagacaagaagcaaattttttttaaagaaaaaaataaacactggaagaatttattagtgttaattatgtgaacaacgacaacaacaacaacaacaacaaacaggaaaatcccattaagtggagttgctgtacgtaccgttcctatcccgcgcctcacttgatttttctgtattgctatgcaataggcacccttcccattcttactcttagagttaacagtgagttatttattgtgtgttactatataatgaacgtttcattgcccttggaaaataaaacaggtgtataaagtggagaccaaatactttgccagaaactcatggatggcttaaggaacttgaactcaaacgagccagaaaaaaagaggtcatattaatgggatgaaaacccaagtgagttattatatgaccgagaaagtctgcattaagataaagaccctgaaaacacatgttatgtatcagctgcctaaggaagcttcttgtaaggtccaaaaactaaaaagactgttaataaaagaaactttcagtcagaataagtctgtaagtttttttttttctttttaattgtaaatggttctttgtcagtttagtaaaccagtgaaatgttgaaatgttttgacatgtactggtcaaacttcagaccttaaaatattgctgtatagctatgctataggttttttcctttgttttggtatatgtaaccatacctatattattaaaatagatggatatagaagccagcataattgaaaacacatctgcagatctcttttgcaaactattaaatcaaaacattaactactttatgtgtaatgtgtaaatttttaccatattttttatattctgtaataatgtcaactatgatttagattgacttaaatttgggctctttttaatgatcactcacaaatgtatgtttcttttagctggccagtacttttgagtaaagcccctatagtttgacttgcactacaaatgcattttttttttaataacatttgccctacttgtgctttgtgtttctttcattattatgacataagctacctgggtccacttgtcttttcttttttttgtttcacagaaaagatgggttcgagttcagtggtcttcatcttccaagcatcattactaaccaagtcagacgttaacaaatttttatgttaggaaaaggaggaatgttatagatacatagaaaattgaagtaaaatgttttcattttagcaaggatttagggttctaactaaaactcagaatctttattgagttaagaaaagtttctctaccttggtttaatcaatatttttgtaaaatcctattgttattacaaagaggacacttcataggaaacatctttttctttagtcaggtttttaatattcagggggaaattgaaagatatatattttagtcgatttttcaaaaggggaaaaaagtccaggtcagcataagtcattttgtgtatttcactgaagttataaggtttttataaatgttctttgaaggggaaaaggcacaagccaatttttcctatgatcaaaaaattctttctttcctctgagtgagagttatctatatctgaggctaaagtttaccttgctttaataaataatttgccacatcattgcagaagaggtatcctcatgctggggttaatagaatatgtcagtttatcacttgtcgcttatttagctttaaaataaaaattaataggcaaagcaatggaatatttgcagtttcacctaaagagcagcataaggaggcgggaatccaaagtgaagttgtttgatatggtctacttcttttttggaatttcctgaccattaattaaagaattggatttgcaagtttgaaaactggaaaagcaagagatgggatgccataatagtaaacagcccttgtgttggatgtaacccaatcccagatttgagtgtgtgttgattatttttttgtcttccacttttctattatgtgtaaatcacttttatttctgcagacattttcctctcagataggatgacattttgttttgtattattttgtctttcctcatgaatgcactgataatattttaaatgctctattttaagatctcttgaatctgttttttttttttttaatttgggggttctgtaaggtctttatttcccataagtaaatattgccatgggaggggggtggaggtggcaaggaaggggtgaagtgctagtatgcaagtgggcagcaattatttttgtgttaatcagcagtacaatttgatcgttggcatggttaaaaaatggaatataagattagctgttttgtattttgatgaccaattacgctgtattttaacacgatgtatgtctgtttttgtggtgctctagtggtaaataaattatttcgatgatatgtggatgtctttttcctatcagtaccatcatcgagtctagaaaacacctgtgatgcaataagactatctcaagctggaaaagtcataccacctttccgattgccctctgtgctttctcccttaaggacagtcacttcagaagtcatgctttaaagcacaagagtcaggccatatccatcaaggatagaagaaatccctgtgccgtctttttattcccttatttattgctatttggtaattgtttgagatttagtttccatccagcttgactgccgaccagaaaaaatgcagagagatgtttgcaccatgctttggctttctggttctatgttctgccaacgccagggccaaaagaactggtctagacagtatcccctgtagccccataacttggatagttgctgagccagccagatataacaagagccacgtgctttctggggttggttgtttgggatcagctacttgcctgtcagtttcactggtaccactgcaccacaaacaaaaaaacccaccctatttcctccaatttttttggctgctacctacaagaccagactcctcaaacgagttgccaatctcttaataaataggattaataaaaaaagtaattgtgactcaa

SEQ ID NO: 383 - DNA, 9018 bp, Homo sapiens
ctcggcctcacaaagtgctgggattacaggtatgagccaccacgcccggccaggcatttctttatagcaatgccaggatggtgtgccagactgtatcagagacaagtgatacaaagatgaccaagatacagtacttgcccaggaagaagaattcctgtggccacctctgtcttatatcaagagataagtgtgaaacagagtatccacaacagtgtttgggaagacagtgtgagtggctcccaactctaccaacaaaggcttcaaaggagtaatgacatttgaattgagtcttaaaggataaatgtattacttggcctgacaacacagaagaaaaggtcatttttgtcaaagaaatcaaccttgaaaaaatgccgcagttcatgacttgtaccagtgaaggtagcaaggtctgtgtgttggtgatgaatttgcaggggatcaggctgaagaaacaagacttgggagagaggatgtgagacctttttatgacatgcatagagttggcacctcagcctttgcatggtagggagctagctgaaggctacctccatgacagatgtacactttgaaaagacaggccgggtgcggtggctcacgtctgtaatcccagcattttgggaggctgaggtgggcaaatcacttgaagtcaggagttagagatcagcctggccaacacagtgaaacctggtctctactaaaaaaaataaaataattagccaggcatggtggcgcacacctgtaatcccaactattcgggaggctgaggcagaagaattgcttgaacacgggaggcggaagttgcagtgagctgagatggcaccaccgcactccagcctgggcgacagatcaagactccatctcaaaataaaggaagatacagctaatctatatttctttcaccagagatcaccaccactaacaattcatactggtcgtttttccctgaatgttttacctatgtaggaaaattttacatcccaatttttaatttaacactatgaaaagcatttctttttataataaagacactctattagtatacttttgatggcttcaaaactacttttgtatagatgcaaaattaaaatatcaaattgtttcttttgtttgtttgtttttttgttttttttttgagacagagtctcactctgtcgcccaggctaaagcacagtggcatgatctcggctcactgcaagcttttcctcccaggttaaagtgattctcatgccgcagcctcccgagaagctgggactacaggtgtgcaccaccacccccggctaattttttgtatttttacaaaacacaaagagagacggggtttcaccatgttgggcaggctggtctcaaactcctgacctcaggtgatccgcctgcctcagcctcccaaagtgctgggattgcaggcgtgggccaccgtgccctgcctcaaattgtttctttaatggttgttcccaaattttcataaataactttttacgtaacatttttgggcataaagttgtctaaaattattttcataggctagataccttaagtacacttaatgatttaaatcatacttaacattaagactttaatgttgctatattgatatttagtaaaagtacaaaacttgtgctttagagtttagacatattcaggatataagatagttttgttggatttggcgaacacttgccctaggagaataaaaaatgatgaattagtccaaaatgttccagttttctaatttgtcagactcggtaaatggtatcatcaccaaccaagaaaaacagaagatacagggagagtagattttgcagaaaagataaggagttctgtttgggacttgctgcctttgatatactgcactgggagaaaatccaagtcgaacagagtggacaagtgagaatgtgctgtggaatcaacaagaggggtggggagtctacctacctagatttgagagcagtttggcaaataattgttagtaaatgtcatagaaattcgtgggagagagaagttgataagaacagaggggtaaaggatgaaacagaggaaacactgccgcttctcagggttgggtacaagagaagccagggaaatagactaagaaagagtgatcagggaaaccgggagacagtgttgtcacggaagcctggagtgtgagattttccagaaaagaaggaatgaaagaatgaatggtctgtagatccattactcagcactatcagacacattgtccccttttgatatcccataatgaaatttatagataatataatctacttgtgcacaaaattttagaaattaatataatgccccaactataatataaagtgtattagtcagggttctctagagggacagaactaataggatatatatatataaaggggagtttataaagtattaacttacactattacaaggtcccacaataggctgtctgcaagcttgaggagcagagagccaggctgagtctcaacactgaagaacttggagtccgatgttcgagggcaggaaaaatccagcacaggagaaagacgcaggctgggaggctaggccagtctctcctttccatgttcctctgcctgctttatattcactggcagctgattggattgtgcccaccagattaagggtggatctgccttccccagcccactgactcaagtattaatctcttttgacaacaccctcacagacacacccaggatcaatatttgtatccttcaatccaattaagctgacactcagaattaaccatcacataaaggaagaagtaaaaggaaagtatattttatataataagtatttaaatatgtaaacattgggacatgactaaaactgactgaacacattgaaggagtcacttggttggtctgatgtgcagaattaccatgcatgctacaaatggagaggggtctacatgagctgtattgcttgtggtgccgcagatgacttgaatttccagaatgaaaatccattcctcgctgccgaagaattaacaggatgctctccaatgaatccctccatcctcctgccttcagccgttccaactcagaagcctccgtagacagcgcctccatggaggatttctggcgggaaatagaaagtattaaagacagcagcatgggagggcaagaagagccaccgccagctgaggtcacacctgtggatgagtattgccagagaacaggagaggaggagagtatggtataagcatgtccagaaatacagaaggagaacttgaagcagaatggctgcaagatgtgggtttatcaactctgatctcaggtgatgaagaggaagatggcaaagccttgctctccacattgactcgaacccaagcagctgccgtgcaaaagagataccatacctatacccaaaccatgaggaaaaaggataagcaatctatcagggatgtcagagacatttttggagtcagtgaatctcctcaggaagctagcagagtttgcttctgagacgaattctgttacagtacatggcatttatgaggatcaatgtaattatgaatgaattgcctcgtgatacctgtggcaaccacactaatcagctggatggcaccaaggaagaaagagagcttccaagagttatcaagacaagtggttccatgccagatgatgcttctctcaacagtactaccctgtctgacgcatcccaggataaagaagggagttttgcggttcccaggagtgactctgtggctatacttgagaccattccagttctaccagttcattccaatggatcaccggagcctggacagccagttcagaatgcgataagtgatgatgattttctggaaaagaacattccaccagaggctgaagagctgtcatttgaagtgtcttattcagaaatggttacggaggctctaaaaagaaataaacttaagaaatcagagattaagaaagaagactatgttttaactaaatttaatgttcagaaaaccagatttggcttaactgaagcaggagatctgtctgctgaagacatgaagaaaatccgccatctctctctgattgaattgactgccttttttgatgcctttggaattcaactgaaaaggaacaaaacagagaaagtaaaaggacgagacaatgggatttttggagttccacttacagtcctcctggacggtgaccgaaagaaagaccctggagtgaaagttcccctggtattacaaaaattttttgagaaagttgaggaatcaggtctggaatctgaaggaatttttcgactttcaggatgtactgctaaagtcaagcaataccgtgaagaacttgatgccaagtttaatgctgataaatttaaatgggacaaaatgtgccatagagaagctgcagtaatgttgaaagcgtttttcagagaactacccacctctctcttccctgtggaatatatacctgccttcatcagtctaatggaaagagggcctcacgtcaaagtacagtttcaagccttacacctcatggtcatggcgctgcctgatgccaacagagatgcagctcaggccctcatgacattcttcaataaagtgattgccaatgaatcaaaaaaccgaatgagtctgtggaacatttctacagtgatggcaccaaaccttttcttcagtagaagcaaacactctgattatgaagaattactgttagcaaacactgcggcccacatcatccgcctaatgcttaagtaccagaagattttgtggaaggttccatctttcttaatcactcaagtaagaagaatgaatgaagccacgatgctattgaagaagcagctcccaagtgtcaggaagctgctcaggaggaagaccctcgagcgggagactgcaagccccaagacttcaaaggtactgcaaaaatcaccctcggcaagacgaatgtctgacgtgccggaaggagtcatacgggtccatgctccacttctctccaaggtgtccatggccattcaactcaacaatcaaaccaaagccaaagacatattggcaaaatttcaatatgaaaacagaatactgcactggcagcgagctgcactttccttcctaaatggaaaatgggttaaaaaagaaagagaagagtcgacagagaccaacaggagccccaaacatgtattcctcttcactattggcctggacatctccacataggcagtcatatagagacttgaaatatcattcaagggatttgggtatccagtagacttttagttacatatactacaaaactgactttgtactctcaagtagacctttcgtagaaagaaaatgtttctaataaaaatgtattagaactaatcatggttcatcagaatgtattaagattcagaaccaaaggttatatgaaattggaggaaatataggagagcattgcttggatccagatgcttatatattggatgtatatcgtataaatcctcaagcagaatgggtgattaaaccccaacaaagttcttaaaatatcctcgagagagctgctatcatgtattatatgccaaaaagatcctacattttggtagggaaaaaacaacactgtgtttgacgtatttgttcctacagcattctcagtatttctggccctcagcagtgggcattgtaagcatgaactatggaagaggcgccggttcaccaattcaactgaagctttctcatgacttttttttttataaaagtaaaggaaagatgatgtggtccttccagaagaaagaccaatctagaatatggaactctaatcacttctagtatttcaacttcctagcagaaatgaacttggccctagacctagggataagcaatgttctttatgtagccaatgctacgaaacaaaagaggtgaaagagacccttttttatacttaatgtacatatattgactttttgagcaagaatgccagaaatagccttcatttctaccctgcaaaataatccagatctgctttctaaaatgaatcagtttctaaagtgaaacatgcaatatttatgctctgactgactcctgaattggaagaggaagaacttctgtttacagaaaactgtattgttatatatgtcaggctgtgtattgtgactatcagcattctggtgcaaatgaacttttctccatcatcgactgtggaaaattgatacttttaaagcatattcttctatgagcacaggtcctcctagtgaagcttagtttgacaaagggtgtcatatgctttcctaacctgatttgtagttaacattcacagagcctacattttctcattacggttatgatgctcagtatctttccaagtgccaggcacgggcttccttttctgatcaaacataccattttttatatttcacaactatagacagtcacttctgcagtcccaatttaaaaatgcagaactgctttatccaagaatgctgaaaaatactgttctatccaggtttcctaaactataaaagcagattttgcttttgtttgttaatcataggcatggccgagcattgtggattagcctgaggcttaaaatcagatgcatgtctggtaagatgaccactgtctcactatcaagagcctgcagagccattttccagacctgtgattgcccagaacacatagtccccacgtttctaatttggagcaaatctaaaaggtgctgagggattggacagctctgactttcctcgagactatggatatagtccttctcagattagctggaaatggggacagagttctcatttatcccagatatatacattggcttttttggaatctatagattgagattttgatgaatttatattggttttaatgagacccaaatgactctctcttaacaattcaagcagtagacaaagttgctcacaaatacagaaaacatctttttgtctacttcgcaagtctcaaaacgtgataatatttaagcccatttgtagaagaaatcttgtatatactattattacaccttgatatctatacaaaacatcacttgtattaaaatatatagataactttctggcatttagaattttgttccattcatttaatttgttcatctgagaatttttttttttgcctgaaaacccattaaaagaaaacgtgccttctgtataagtttatgtttattcctacattttattcatttttaatgtatgggtaattggtggcacatgactttacataatgactttctagactctgaaaaaaatgcttttatcatttttgcaattcagacaagggtaaacattttactttatgtaattgccacatcccaagatgtaaaacggcagtaatttatgaccacgtatggaagaaattcttcaaatagctaccttacatttctgcgtatatatgaaaactgaatgatatttctcagtgtatttccttgcatttgaatggttcaattctgttgtgtttatgtagaaaattcacaaatctgttcatttaattttttaatttgagaatttttatttcttttgactgaaaacacattagaacctatgagtaaattctgaaggttttaagatttacttcagcttgtcaccagtttcaaataaatccctaataggtaacaagtaaaatacaaattcttgtctactttcatgtggttttaaatggcagggacttcgctgagtcagtaagtataatcactctagtttattcaaggatgtgtggcaactttcaacttccatacgtatatatgtatgtatggaaggccatgtcaatactagtatcattggatataactttgattcttaatcagagggcaaattcattagagaagaatttttagtagatacacagactaatatttgtgtggaggttcttttgaccaattttattcctaagaataaacaaacccctacagttaaaatgcaaagatgcctgtcatctaagtattgaaagaatttttgccttatcaagagttgttttttaaaaatttaataaattcataaaaaagactcatatctttgcaaacaaaagaagggcagatactgggcttctacatgctatccttaagagcttctccccctcacccattcctagtgctcttggtatacacttgggaaaataatgtcctccaggagaaagtgttagagggaactaacattttaggaatgcttattcagaaaaaaatcctagagttgattcattgttttcctccatcctgcaaaagaagatccctttgttaagcagctcacttggaaatatgattcttggagtcaatgatctctaaacaaactggattatcaactatttacaacgtctatacagtataaactacctcacttgcctttcttgggaaaaaaaaaatgaatggactttaacaattgttgttacaaactgtgcctgaatcttattatttaaatcacttcagttagctttcagtgtatgtttaataatatacatttaatgatgaaaaatattttcagcaaagctttaaaaccagaaatactgtgtaactgtgatctatgtggtatactctgagagaattctgtgtcctgctcattgtcttgagtttctaaccatgtgcagatgcaagcgttcaggagtaggaattaatgtccatcttttctttcaggcattttcatctgctgtccacgtatttcacttgactgaaagctcatatgagttaaaatgtcccttcttcctagcgagcatatttcaactgttcttcataaatgtttatgtgccttaaaagactttatgttaaaggattaaatagtttctctgacaggcagtttttaactgttttccacaaataaaaataatatgtcatgggattaaaatgtttgttttcaagcatttttaacagttttacacacttacatacaccttaattaaaaatttttttctgtcagacatttaccaactattttctaaaactaatttgacaaatcatgacactagaaaacgccaatgttttatgtctttgcccatctcaaaagctaatattgattcttctgttccatcagctttcattgttaagtagaatatgtatgttgcattttatccataagaaataaagagaaaaaaactaaaaa

SEQ ID NO: 384 - DNA, 2651 bp, Homo sapiens
agtttctcctttgttttacgtttgggaggaggtggcattggaaatagcagagtgcttcgcggtaacaggggttggagtgcaatggtgtgatctcagctcactgcaacccctgcctcccaggctccagcgatcctcccacctcagcctcctgaatagctgaccaccagcacactaggcaaacccaccccactcacggcctcccttgggaattcagacctaaccatcgctgagctgaaacaaatgtactgaggctggagcctgtgtgaacagaacagaagaggccttcactctagtagtgctcacagtccagcagagcaggtgtttgctgaagacagcttactcagatcactactgcctggaggtggttgatatatcctggtgtaaaccttcaagaagggcacaggcaggaaaacatgagccagcaactgaagaaacgggcaaagacaagacaccagaaaggcctgggtggaagagcccccagtggggctaagcccaggcaaggcaagtcaagccaagacctgcaggcggaaatagaacctgtcagcgcggtgtgggccttatgtgatggctatgtgtgctatgagcctggccctcaggctctcggaggggatgatttctcagactgttacatagaatgcgtcataaggggtgagttttctcaacccatcctggaagaggactcactttttgagtccttggaatacctaaagaaaggatcagaacaacagctttctcaaaaggttttcgaagcaagctcccttgaatgttctttggaatacatgaaaaaaggggtaaagaaagagcttccacaaaagatagttggagagaattcgcttgagtattctgagtacatgacaggcaagaagcttccgcctggaggaatacctggcattgacctatcagatcctaaacagctcgcagaatttgctagaaagaagccccccataaataaagaatatgacagtctgagcgcaatcgcttgtcctcagagtggatgcactaggaagttgaggaatagagctgccctgagaaagcatctcctcattcatggtccccgagaccacgtctgtgcggaatgtgggaaagcgttcgttgagagctcaaaactaaagagacatttcctggttcatactggagagaagccgtttcggtgcacttttgaagggtgcggaaagcgcttctctctggactttaatttgcgtacgcacgtgcgcatccacacgggggagaaacgtttcgtgtgtccctttcaaggctgcaacaggaggtttattcagtcaaataacctgaaagcccacatcctaacgcatgcaaatacgaacaagaatgaacaagagggaaagtagtcctccaacaggatgaagcagattaacagaagagtgatcagtgacaaacatgcctcattgattattgtttctaggaaggaatttctaaatcaatattgcaaccccaaaagcggttataatttggtgttactaagatgctcctacactttgtgataccgttttaaggacatggtgcatttttttttcttttatttgttttatttagaactttttttatttgttttatttagaactttgtgtgttcttaaagtgtgcttccaacaggaaggtcagtgataaattttcaaaagcataaccttcaatatattatctgttggattattggatataagacttattttcatgtactataaatatgaaaataactttgatttttaattgtgtagtttccatttcttagcttttgccttttaaatttatacttcagccaggcatagtgactgatgcctgtaatcccaacactttgttgggaggccaaagcaggaggatagcttgaggccaggagttccagaccagcctgggcaacatagtgagatcctgtctctacaaaaaaatttgtttttatttgtatttatatatttttatttttgtttttgttggtaggcgtctcgctctgtcacccaggctggagtctagtgtcgtgatcttggctcactgcaacctccacctcccgggttcaagtgattctctggcctcagcctcccaagtagctgggactacaggtgtgtgtcaccacgcccggctaatttttgtatttttagtagagatggggtttcaccatgttggccaggctagtctcaaactcctgacctccagtgatctgcccacctcggcctcccaaagtgctgggattacaggtgtgagccactgtgcctggccccccacaacatgtttaaacttagctaggcctggttgcatacgcctgtgttcccagctactcaggaggctgaagcaggaggatagcttgagcccaggagtttgaggctacagtgagctgtgattgcaccactgtactccagactggataacagcaagagcccatcttttaaaaaaagtaaaaattaaaaatatacttcatggttcatgtcatagccctagagaatgaaaaatttgcagtagatagtcaataaatgaatcagtagttaaatattccttaaagtcaactgtatttcattgtgatttttgttttctttttatcattgtatcaaactatatggaaatcatatggttagatgtgattatttgataatgttagtccatttgaatccattttagatatttcacaattaaagaatatgaaacttc

SEQ ID NO: 385 - DNA, 4357 bp, Homo sapiens
gcggcttccggcggcgtgacctgaccgcaagaggccaatggagtgtgggagctgaaagggtcttcgctggcggccggtaactggcggcggttgggaacggccgagtgtggctcttctggtgtttcagcttggggagagaggggtggccttcctcttgcagttgaggccggcgccgagccggacttcaggcggatctcgtggcggagcccatcttgctccctctcccaggcctttacccgctccctaggattcccgggccctgtaggtgggagttgggagacgtgagttctctttcattctgcgcctctcattggctctctgaccttgtgcggaacgcgtcctttagctgacctcagctgcattttttagaagatggagattgtattcacagtgactgtcagctttttaacggcgggaactgacgtagtgttaaacactgtcgtgtatcgctggcacagcacaaggacattataggtattctgtactcaattaagttattttgagtcacagaccttttgaaaatctcgtgtaagctatggcccctccacctctctaatacttcccccggcccccaccccaagcacacacaaaagcttatgcataggaaatttgttttactatttcggattacttccaagatctctctcctgatgcccatctatggatcccagagtctggacagtactgcttttaaagagacagtgttagggatcttggaagcacagccaacatgtgtgacattgaagaagccactaaccaactcctagatgtgaaccttcatgagaaccagaagtctgtacaagtgacagaaagtgacctcggaagtgaatctgagcttctagtcactattggagccactgtacctactggctttgagcaaacagctgcagatgaagtcagagagaaacttgggtcatcatgcaaaatcagcagagaccgtggcaagatatattttgtcatttcagtggaaagtctggcacaggttcattgtctgagatcagttgataacttatttgtggtggttcaggagtttcaagattaccagttcaaacaaacaaaggaagaagttctaaaggattttgaagacttggctggaaaactcccatggtcaaaccccttaaaagtgtggaaaattaatgccagttttaaaaagaaaaaagcaaagcgcaaaaagataaatcagaattcaagtaaagagaagattaataatggacaagaagtcaaaatcgatcagagaaatgttaaaaaagagttcactagccatgctttagattctcatatcttagattattatgaaaatccagccatcaaagaggatgtatcaacattaataggtgatgatttggcatcttgcaaagatgagactgatgaaagctcaaaagaagaaactgagcctcaagtgctgaagtttagagtcacatgcaacagggcaggagagaaacattgctttacctcaaatgaggctgcaagagattttgggggtgctgttcaagattattttaagtggaaggccgacatgaccaactttgatgtggaggttcttttgaacatccatgataatgaagtcattgtgggcattgcattgactgaagagagtctccaccgaagaaatataacacattttggacctacaactcttagatcaactcttgcctatgggatgctcaggctctgtgatcctctaccttatgatataatagtcgatccaatgtgtggaactggggcaataccaatagagggggccactgaatggtctgactgtttccatattgctggtgataataatccactggctgtgaatagagcagcaaataacattgcatctttattgaccaagagccaaattaaagaaggcaaaccctcctggggcttgcccatagatgctgttcagtgggatatctgcaatctgccattgagaactggctctgtggatattattgtaacagatttgccatttggaaaaaggatgggatccaagaagagaaactggaacctttatccagcttgcctacgggagatgagccgtgtctgcacacctaccacaggccgagctgtactacttactcaagacacaaaatgctttaccaaggcgttatctggaatgcgacacgtatggcgaaaggtggatacagtctgggtgaacgttggtggtcttcgtgctgcagtttacgttctgatacgtacacctcaagcttttgttcatccttcagaacaagacggagaaagaggaactctttggcaatgcaaagaatgaagatgactaatagtacttgtacttcccaccactggaaatgttagcataaaagaacttggagaggaaaaaagtattaacaaaactgcagtctgcactctttaaacctgtttaaggctcttcatcctggttagcaaaaggtgtgaatgtaatgtgatggaatttaaaagttttatgagaccaggcacagtggctcacgactgtaattccagcagtttaggaagccgaagtgtgcagatcacctgaggtccggagaccagcctggccaacatggtgaaaccctgtctctactagaaatacaaaaattagccaggtgtggtggcgggcgcctgtaatcccaactactcaggaggctgaggctagagaatcacttgaacccagcaggcggaggttgcggtgagtcgagatcacgccattgcactccagcctgtgcgacaagagcgaaactctgtctcaaaaagattttataagaaagcagagcttttccttgaagctcttttgaagtggtagcttaattagtattttgttgaaaatactttaaagatgcctagtgaaaagcctactaaagtgctgtgagattggggtttagaacattttattttcaggctttatggcctattttccattgtgtcaagtgcaaaactaccctggcccaaaggaagggcagagaacataattacatcttaggccacatttcattctttgcagctttgctaatccagttgctcaagttctttacctcaacctgaaggaatgaagcattattacattttgtgaatggtgttcagcctataagacgaagtctcacaagacctataggaaagtttaccatctgccttaaatattaaaatatccatctgttattcacattaatacacagaatgaaaatagaggtctaggaattatcaaaggtactgcaaaaatactgtatagaacttatttgtaaatagcacatacattgatagatggggtgtgggaccaacaaaccaaattaaaagaaattgtttttctttcagtacactaaggtgtgtgttttcaaaaccaaacacaaacctgtcaagagtatttgttggctagtttcttaaaaggccaagagaaaaaaaatgatatatctttggaaaacttttaatttgggagttatgtgagttgttactttctcctggatcacgattcacatttaattgcttttccagttgcaacaagtccttcttgagagttttgtggaaaatggtgcttccctggaacaaagagtagttgaggtttttttgtggaactcatcatagtattgtttattttggagcctctggctgcaatcagtatagattttcagtatcctattagtattataatagtactcctcttaatactttctgatgtctccattgagaataaaaggacacaatacttttgaaagaagagttcacattagcagcacagccagcaatcctcatctggtttctctgatctcctaccccacacttcataatgaatgggaaataagatgtttatgaaggttttatatcctagactggcctttttaccactatcagaattcacagctgctttgtttatgggccgaacacaaaacttttcacctgatgggagaaaccatttaaacctcaaattaagcaacccacagaaccaggaagttcaaggaccatgtctgttttcaccacgatgtctttccccacccccccaccccccactccaccccccactaagggcagggtattgtatctgccagactgggtatttgttgaacaagcgagtattttcgcctattagcttagtttttaaggaaatcattttttacttgattcatcatagctttaattctattacatactacaataaaaatttgacaagactgatacaaatatgtagtgggcaatagtttgccgtcttcttccctagtatggtgtttttcaatctggtgactagaataggcagtgggctataagcaggattcataaggcctggagctgagttatatgtgacactgccacctattcattgtgtgaccttggttttaaccttcaaagtgggtctcctggactaaaagaatgtgaaaagatggggaaataaatctgtaatctgaacatggaa

SEQ ID NO: 386 - DNA, 2550 bp, Homo sapiens
agctgagccatgtacttcaaacagaaggcagccaattactaacttctggttgctaggtgtggcttcctttaaaatcctataaaatcagaagcccaagtctccactgccagtgtgaaatcttcagagaagaatttctctttagttctttgcaagaaggtagagataaagatgaatttgattctcaggtaaaaaaaaaaaaaaaaaaaaaagcaatcattaagcttttcatctagccattacttttgtacaggctctcattaattccacatagatggtctaatggtctactaaatagtattctaatcctccatcttgtctatctcttagccattctccatgataaaggatgaatggtctttcggaaacataaatgaaaccatgctgctttaaaaaaacaaacaaacaaaaagaaacccattaatgttttcccaaagctttgtggacacattgaagcttcttgtttcagcttctgccaacatttctcgctccagcaaactttcttctgcttcccaaatatgacaagcttcttctttaacttttctgccaggttaatcttgactcatttcaagagaggcttgggtcagccagggcctactctaagaagtttctttagcccttatgttttcctatggagagcacacactagctttaagtcctgagggtacttaagatgatatttcaatgtttttgtactcttagtgcttggcatatggtgggtggtctacaaatttagaacaatgtagtgaaccacaaactcctctcttcagcctgtgtgcttacttgtagtagttgtctgatctctaaaatttagaactgaatatgccaagaaagagttcaatttcagagaggagggtatggtttcattttaagtataaaagcttcctttaaaaaaaattacgtcttacattttgttatgctcctaagtgtaattgatcctggaaagtaagcgcaaggctactctctaatgctaactcttatgtatgtaagaggtgaggaaggagaggttgtgtgtggtgcatttgttttgtaaaagcatctaactgttttctttccagacactttttcaaaaatggcaatggtatcagaattcctcaagcaggcctggtttattgaaaatgaagagcaggaatatgttcaaactgtgaagtcatccaaaggtggtcccggatcagcggtgagcccctatcctaccttcaatccatcctcggatgtcgctgccttgcataaggccataatggttaaaggtgtggatgaagcaaccatcattgacattctaactaagcgaaacaatgcacagcgtcaacagatcaaagcagcatatctccaggaaacaggaaagcccctggatgaaacactgaagaaagcccttacaggtcaccttgaggaggttgttttagctctgctaaaaactccagcgcaatttgatgctgatgaacttcgtgctgccatgaagggccttggaactgatgaagatactctaattgagattttggcatcaagaactaacaaagaaatcagagacattaacagggtctacagagaggaactgaagagagatctggccaaagacataacctcagacacatctggagattttcggaacgctttgctttctcttgctaagggtgaccgatctgaggactttggtgtgaatgaagacttggctgattcagatgccagggccttgtatgaagcaggagaaaggagaaaggggacagacgtaaacgtgttcaataccatccttaccaccagaagctatccacaacttcgcagagtgtttcagaaatacaccaagtacagtaagcatgacatgaacaaagttctggacctggagttgaaaggtgacattgagaaatgcctcacagctatcgtgaagtgcgccacaagcaaaccagctttctttgcagagaagcttcatcaagccatgaaaaaggtgtgtgtgtgtgtgtgtgtgtgtgtgtgtgtatagctagtttctctatagaaattatatggaagagtaagaaggcttcactttaaaattcatgtttttaatgagagtattttctgaatatgagacacttaccctcatttattttggccagggtgttggaactcgccataaggcattgatcaggattatggtttcccgttctgaaattgacatgaatgatatcaaagcattctatcagaagatgtatggtatctccctttgccaagccatcctggatgaaaccaaaggagattatgagaaaatcctggtggctctttgtggaggaaactaaacattcccttgatggtctcaagctatgatcagaagactttaattatatattttcatcctataagcttaaataggaaagtttcttcaacaggattacagtgtagctacctacatgctgaaaaatatagcctttaaatcatttttatattataactctgtataatagagataagtccattttttaaaaatgttttccccaaaccataaaaccctatacaagttgttctagtaacaatacatgagaaagatgtctatgtagctgaaaataaaatgacgtcacaagacaa

SEQ ID NO: 387 - DNA, 1630 bp, Homo sapiens
ctccctgtgttggtggaggatgtctgcagcagcatttaaattctgggagggcttggttgtcagcagcagcaggaggaggcagagcacagcatcgtcgggaccagactcgtctcaggccagttgcagccttctcagccaaacgccgaccaaggaaaactcactaccatgagaattgcagtgatttgcttttgcctcctaggcatcacctgtgccataccagttaaacaggctgattctggaagttctgaggaaaagcagctttacaacaaatacccagatgctgtggccacatggctaaaccctgacccatctcagaagcagaatctcctagccccacagaatgctgtgtcctctgaagaaaccaatgactttaaacaagagacccttccaagtaagtccaacgaaagccatgaccacatggatgatatggatgatgaagatgatgatgaccatgtggacagccaggactccattgactcgaacgactctgatgatgtagatgacactgatgattctcaccagtctgatgagtctcaccattctgatgaatctgatgaactggtcactgattttcccacggacctgccagcaaccgaagttttcactccagttgtccccacagtagacacatatgatggccgaggtgatagtgtggtttatggactgaggtcaaaatctaagaagtttcgcagacctgacatccagtaccctgatgctacagacgaggacatcacctcacacatggaaagcgaggagttgaatggtgcatacaaggccatccccgttgcccaggacctgaacgcgccttctgattgggacagccgtgggaaggacagttatgaaacgagtcagctggatgaccagagtgctgaaacccacagccacaagcagtccagattatataagcggaaagccaatgatgagagcaatgagcattccgatgtgattgatagtcaggaactttccaaagtcagccgtgaattccacagccatgaatttcacagccatgaagatatgctggttgtagaccccaaaagtaaggaagaagataaacacctgaaatttcgtatttctcatgaattagatagtgcatcttctgaggtcaattaaaaggagaaaaaatacaatttctcactttgcatttagtcaaaagaaaaaatgctttatagcaaaatgaaagagaacatgaaatgcttctttctcagtttattggttgaatgtgtatctatttgagtctggaaataactaatgtgtttgataattagtttagtttgtggcttcatggaaactccctgtaaactaaaagcttcagggttatgtctatgttcattctatagaagaaatgcaaactatcactgtattttaatatttgttattctctcatgaatagaaatttatgtagaagcaaacaaaatacttttacccacttaaaaagagaatataacattttatgtcactataatcttttgttttttaagttagtgtatattttgttgtgattatctttttgtggtgtgaataaatcttttatcttgaatgtaataagaatttggtggtgtcaattgcttatttgttttcccacggttgtccagcaattaataaaacataaccttttttactgcctatataa

SEQ ID NO: 388 - DNA, 2221 bp, Homo sapiens
aattccctaccctcgacctgtcgatgccccgcggccccgcccgccctcttaagcctggctcagccctcagggcccgcccgaagtctaccgagcccgagtggcctaccgagcccgagtggccccgcagcgtccaggaggcgcccgctccgcggtggcgctcttggaggtggtgtcggagagccgccgagcgtgcggtcccgggatggctctaccccggccaagtgaggccgtgcctcaggacaaggtgtgctacccgccggagagcagcccgcagaacctggccgcgtactacacgcctttcccgtcctatggacactacagaaacagcctggccaccgtggaggaagacttccaacctttccggcagctggaggccgcagcgtctgctgcccccgccatgccccccttccccttccggatggcgcctcccttgctgagcccgggtctgggcctacagagggagcctctctacgatctgccctggtacagcaagctgccaccgtggtacccaattccccacgtccccagggaagtgccgcccttcctgagcagcagccacgagtacgcgggtgccagcagtgaagatctgggccaccaaatcattggtggcgacaacgagagtggcccgtgttgtggacctgacactttaattccaccgccccctgcggatgcttctctgttacctgaggggctgaggacctcccagttattaccttgctcacccagcaagcagtcagaggatggtcccaaaccctccaaccaagaagggaagtcccctgctcggttccagttcacggaggaggacctgcacttcgttctgtacggggtcactcccagcctggagcacccagccagcctgcaccatgcgatttcaggcctcctggtccccccagacagctctggatctgattctcttcctcaaactctggataaagactcccttcaacttccagaaggtctatgcctcatgcagacggtgtttggtgaagtcccacattttggtgtgttctgcagtagttttatcgccaaaggagtcaggtttgggccctttcaaggtaaagtggtcaatgccagtgaagtgaagacctacggagacaattctgtgatgtgggagatctttgaagatggtcatttgagccactttatagatggaaaaggaggtacggggaactggatgtcctatgtcaactgtgcccgcttccccaaggagcagaacctagttgctgtgcagtgtcaagggcatatattttatgagagctgcaaagagatccatcagaaccaagagctccttgtgtggtatggagactgctatgagaaatttctggatattcctgtgagccttcaggtcacagagccggggaagcagccatctgggccctctgaagagtctgcagaaggctacagatgtgaaagatgtgggaaggtatttacctacaaatattacagagataagcacctcaagtacaccccctgtgtggacaagggcgataggaaatttccctgttctctctgcaaacgatcctttgagaagcgggaccggcttcggatccacattcttcatgttcatgagaagcaccggcctcacaagtgttctacatgtgggaaatgtttctctcaatcttccagcctaaacaaacacatgcgagtccactctggagacagaccataccagtgtgtgtattgtactaagaggttcacagcctccagcatactccgcacacacatcaggcagcactccggggagaagcccttcaaatgcaagtactgtggtaaatcttttgcatcccatgctgcccatgacagccatgtccggcgttcacacaaggaggatgatggctgctcatgcagcatctgtgggaaaatcttctcagatcaagaaacattctactcccacatgaagtttcatgaagactactagccctgccaggcacaatgactcacgcctgtaatcccagcactttgggaggcagaggtgggtggatcactcaagtccaggagttcgagaccagcctgggcaacatggtgaaatcctgtctctaccaaaaaaatacaaaaatcagctgggggtggtggcacatgcctgtggttccagccactcaggaggtcgaggtggcaggatggtttgagcacaggagacggaggttgctgtgagctgagatcgccccactgcttttcaacctgggtgacagaaccagaccctgtctcaaaacaaaacaaaaca

SEQ ID NO: 389 - DNA, 2482 bp, Homo sapiens
ctgcggtcactgctgaggttttcagaactttccaggcaaaggccagccaggtcctttgcctccaacccactccgcgcctacctcccgcctggggacacccctaggcccaggagatcctactctcccccgagcaccgacgttccaactcgtctgcgcccccgactgctgtccggctcctgtgccaaggggcgcgcgcatcttcccggggccagcaacgctcccaacttctcgactcgccctcctcctccccagagcgagagtggggcgggctgagcccggatccggggtgcactcgagcgttcccagcgctcggcattcaccccgcctcagagccgactttcgaagggggattgagcctcggaggtccaggcgtcttactccaaagctcaagtcggcccccgtcttttctttccacacccctgtgcccgtcgcatgctggccgggtgagcggccgggccgaggattcgggtgcccggggccgcgtcgccccgtcgggtactgagctgagcgcaccatggccggctgctgctgcctgtccgcggaggagaaggagtcgcagcgcatcagcgcggagatcgagcgacagcttcgtcgggacaagaaggacgcgcgccgtgagcttaagctgctgctgctgggaactggtgaaagtgggaaaagcacctttatcaagcagatgagaattatccatgggtctggttacagcgacgaagacagaaaggggttcacgaagctggtttaccaaaacatattcaccgccatgcaagccatgatcagagcgatggacacgctaaggatacagtatgtgtgtgaacagaataaggaaaatgcccagataatcagagaagtggaagtggacaaggtctccatgctctccagggagcaggtggaggccatcaagcagctctggcaagatccaggcatccaggagtgttacgacaggaggagggagtaccagctgtcggactctgccaaatattacctgactgacattgaccgcatcgccacaccatcattcgtgcctacccaacaagatgtgcttcgcgtccgagtgcccaccaccggcatcattgagtatccatttgacttggaaaacatcatctttcggatggtggatgttggtggccaacgatcggaaagacggaagtggattcactgctttgagagtgtcacctccattattttcttggttgctctgagtgaatatgaccaggtcctggctgagtgtgacaacgagaatcgcatggaagagagcaaagccttatttaaaaccatcatcacctacccctggtttctgaattcgtctgtgattttattcttgaacaagaaggatcttttggaagagaaaatcatgtactctcatctaattagctatttcccagaatacacaggaccgaaacaggatgtcagagctgccagagactttatcctgaagctttaccaagatcagaatcctgacaaagagaaagtcatctactctcacttcacatgtgctacagatacagacaatattcgctttgtgtttgctgctgtcaaagacacaattctacagctaaacctaagggaattcaaccttgtctaaaagctgctgcccactcctcccctataacagaagatgtgatttgcaaactccttgttttatttgcaagtgcttctgacatcaccagagccagccccatgccaggaactaaggatgtcatgtagatcgtggggacagagatgggtgatggaacttggaagatatttgagtttaccaacatactttaaaagtccttacatcccaaattgtgtttataattattttcttgacttttggctataagattttgtgtaatttttgaatttggtgttttctagaatttttaaaagccactttgatttagttttaaatatgtttaaaaatagcgattaaaattatgtaagcaaggagcctgttagtttatagatcatgccttcaaacctctagagttaatttgggtgacttttttaaaaataagaatgttaatgggtttgaagctttttattaaaccttgtaatttagagacatttttaattgtgtttctcacctcatgctgaagggtgactcctttaacatgccaccaaagattttttttaaacacttggttctttttgtgtgttaactttctaagccaaattaatggatatataagtatatctaatttagctttgccacagtttgatcaccaagaagccaaagctgacatagagtaaatgggctctagatagcatatatgttttattggtgaaaaatgtgtgtgtgtgcacgtgtgtgtgtgtgtacatttttacccccaatgtatatgaccagatcttaaaaatgtatgaaatggctagaagtccacattgtttgacaaatgttacgtaaccctgccaaagttctgatggccaccacagatttgctgtttgaattatgtatgctgtgcctttctgaggaggctaagaatataccattctgctatta

SEQ ID NO: 390 - DNA, 4729 bp, Homo sapiens
agaagccccgcagccgccgcgcggagaacagcgacagccgagcgcccggtccgcctgtctgccggtgggtctgcctgcccgcgcagcagacccggggcggccgcgggagcccgcgccccgcccgccgcgcctctgccgggacccacccgcagcggagggctgagcccgccggcggctccccggagctcacccacctccgcgcgccggagcgcaggcaaaaggggaggaaaggctcctctctttagtcaccactctcgccctctccaagaatttgtttaacaaagcgctgaggaaagagaacgtcttcttgaattctttagtaggggcggagtctgctgctgccctgcgctgccacctcggctacactgccctccgcgacgacccctgaccagccggggtcacgtccgggagacgggatcatgaagcgctcggtagccgtctggctcttggtcgggctcagcctcggtgtcccccagttcggcaaaggtgatatttgtgatcccaatccatgtgaaaatggaggtatctgtttgccaggattggctgatggttccttttcctgtgagtgtccagatggcttcacagaccccaactgttctagtgttgtggaggttgcatcagatgaagaagaaccaacttcagcaggtccctgcactcctaatccatgccataatggaggaacctgtgaaataagtgaagcataccgaggggatacattcataggctatgtttgtaaatgtccccgaggatttaatgggattcactgtcagcacaacataaatgaatgcgaagttgagccttgcaaaaatggtggaatatgtacagatcttgttgctaactattcctgtgagtgcccaggcgaatttatgggaagaaattgtcaatacaaatgctcaggcccactgggaattgaaggtggaattatatcaaaccagcaaatcacagcttcctctactcaccgagctctttttggactccaaaaatggtatccctactatgcacgtcttaataagaaggggcttataaatgcgtggacagctgcagaaaatgacagatggccgtggattcagataaatttgcaaaggaaaatgagagttactggtgtgattacccaaggagccaagaggattggaagcccagagtatataaaatcctacaaaattgcctacagtaatgatggaaagacttgggcaatgtacaaagtgaaaggcaccaatgaagacatggtgtttcgtggaaacattgataacaacactccatatgctaactctttcacaccccccataaaagctcagtatgtaagactctatccccaagtttgtcgaagacattgcactttgcgaatggaacttcttggctgtgaactgtcggaggttgttctgagcctctgggtatgaaatcaggacatatacaagactatcagatcactgcctccagcatcttcagaacgctcaacatggacatgttcacttgggaaccaaggaaagctcggctggacaagcaaggcaaagtgaatgcctggacctctggccacaatgaccagtcacaatggttacaggtggatcttcttgttccaaccaaagtgactggcatcattacacaaggagctaaagattttggtcatgtacagtttgttggctcctacaaactggcttacagcaatgatggagaacactggactgtataccaggatgaaaagcaaagaaaagataaggttttccagggaaattttgacaatgacactcacagaaaaaatgtcatcgaccctcccatctatgcacgacacataagaatccttccttggtcctggtacgggaggatcacattgcggtcagagctgctgggctgcacagaggaggaatgaggggaggctacatttcacaaccctcttccctatttccctaaaagtatctccatggaatgaactgtgcaaaatctgtaggaaactgaatggtttttttttttttttcatgaaaaagtgctcaaattatggtaggcaactaacggtgtttttaagggggtctaagcctgccttttcaatgatttaatttgattttattttatccgtcaaatctcttaagtaacaacacattaagtgtgaattacttttctctcattgtttcctgaattattcgcattggtagaaatatattagggaaagaaagtagccttctttttatagcaagagtaaaaaagtctcaaagtcatcaaataagagcaagagttgatagagcttttacaatcaatactcacctaattctgataaaaggaatactgcaatgttagcaataagtttttttcttctgtaatgactctacgttatcctgtttccctgtgcctaccaaacactgtcaatgtttattacaaaattttaaagaagaatatgtaacatgcagtactgatattataattctcattttactttcattatttctaataagagattatgtgacttctttttcttttagttctattctacattcttaatattgtatattacctgaataattcaatttttttctaattgaatttcctattagttgactaaaagaagtgtcatgtttactcatatatgtagaacatgactgcctatcagtagattgatctgtatttaatattcgttaattaaatctgcagttttatttttgaaggaagccataactatttaatttccaaataattgcttcataaagaatcccatactctcagtttgcacaaaagaacaaaaaatatatatgtctctttaaatttaaatcttcatttagatggtaattacatatccttatatttactttaaaaaatcggcttatttgtttattttataaaaaatttagcaaagaaatattaatatagtgctgcatagtttggccaagcatactcatcatttctttgttcagctccacatttcctgtgaaactaacatcttattgagatttgaaactggtggtagtttcccaggaaggcacaggtggagttatttgtgagaagcaaagtgtttactaatgacaaagtagtaaaccattttcaagatgaaaactgatttctatttattttgcttcaaaggtcctgaaaaaataagcaattatcataacaatttgttattgatactggaggtttcattgacatgtctctcaaattaaagctcacactgcctccataaaagtcttcaacatctaatttataagctttacaagtatttattttataaggcttagacagaattattggagttttaaattaagtgtattggaaaagaaaggatggtatgtgtatgaaatgttaagatcctacgcaacactgctatttttttcctttaatatttgtgctgcataacaaaagccactagactgttactgtcttgtctgtccatgtgttaacagcatttcttaatgatgtatatatggagtggtcttcaatcatagtgaagaatttaaagagaaagtcaattgtattggcatttttaataagaacaaaattagttcgtctaaggggactggctggccacatatttgttccttgcccatatgctttctacttcttgttcttattatgaaattatgaatttgaagcctctgaaatggtgatcagttttcaacatctttcaaaaacaaaattactatttcctccatattgccttttttagataactttaaagttaggattttaaaatatttgtaactggctaaattttaaagtcgtgacaaataattacttaggttcagaaatatacacacacttactctttagccagtttctttcaaggtttactgtcccatcagatatctagccattttcctttgcaaattacataccttcttaagagtgtatttttaagattattacttacgctttatgatgatatagtttttcaaaattatttatagcttcatatgatgttttgtaattttttctattgatacctgttttaaaaatattttccaaggaagttgattaaaattatatttgttaccttttagaaaaagcattgaaatgagtttctcttgctttttcattttccctctgctttatatgctcttcgcaatacatcatgtccaacgggatacctattgttctcatgacacccaaaattgatgagagcaaaggggtcgcaccatatggaaatgttgaaaactattgtaaagtagtattatgaagtagcttttgtgtcattcatgtcgatgacatgaaagtgaagtaaatttattctatgtaaattcacactaaaaccagtacagtaccataagtagaatacatgtaagaatcacctagtcttcactatattgagtaaatataacatgctaattttacaattaatgaaactaaacttttaaacatctccattatatctacatccttttgaaggtatttatcatagttgccaattttaattttaggattgactttctctttctgaatgacttcataaagtttggtgtgaattttgaagacttgggttactaatgattgtatctttgctagtcaacaacttatgaaatatactcaatgcgtctgatgtgtcattaagtgcagaaataactaagacacaaataacctttgcaaaccttcaagctgtgtaatattccaatgttgtttttttctttgtatatatacttatatcacgtaggatgtaaaaccagtatgaccttgtctagtctccaaacttaaaataaacttttgaaaagctgggattcttttgaagcagttgtaattaaacacatttataagaata

(The sequence listing continues in the following parts.)

1-54. (canceled)

55. A method of isolating a population of cells enriched in pancreatic progenitor cells, comprising:
(a) detecting in a population of cells comprising pancreatic progenitor cells, cells that express at least one marker selected from the group consisting of TROP-2 and GPR50, and
(b) isolating the cells expressing said at least one marker detected according to step (a) to thereby obtain an isolated population of cells enriched in pancreatic progenitor cells,
thereby isolating the population of cells enriched in pancreatic progenitor cells.

56. The method of claim 55, wherein said at least one marker is TROP-2.

57. The method of claim 55, comprising detecting TROP-2 and/or GPR50, and an additional marker selected from the group consisting of BST2, NTRK2, ITGA4, KDR, PTPRN, LGI1, VIPR2, SLC2A1, MUC15, MUC12, LPHN3, MUC16, VTCN1, MMP16, FZD3, ITGB6, GFRA3, ROBO1, NLGN1, MUC12, CNTFR, LPHN1, SULF1, ADAM23, SCUBE3, PLAU, CDON, SLIT2, C7orf68, PLXDC2, CD74, GPR56, AREG, BOC, KLRK1, PRTG, PTPRZ1, GABRP, SILV, KIAA1772, PLP1, OVOS, HAPLN1, EPHA7, ENO2, PCDHB5, OVOS, SYT1, DCT, GPAM, SLITRK6, DCC, FREM2, SDK2, CGA, ATP1B2, SEMA3D, PCDHB15, CDH1, WNT8B, LPAR4, NPIPL3, FAM171B, PTN, ABCC2, ADAMTS3, RASA4, CPT1C, SLC6A6, PCDHB3, LRRC37B, RNFT2, KCNG3, TRPC1, ALPPL2, OR4F21, CCL2, KIF5A, OLFM2, CACNG7, MPHOSPH9, SLC13A4, MOXD1, C6orf186, SLC4A8, STX16, AMY2A, SPARCL1, MGP, A2M, DCN, ATP8B1, MMRN1, EMP1, PLA2G2A, PDE3A, TLR3, CYP1B1, PTGIS, RFTN2, PLEKHA2, SMOC1, STOM, JAM2, CHL1, SCG5, IGFBP7, NPR3, IFI6, CR1L, OR2A4, OR2A7, KCNG3, CACNG7, GRID2, CDH1, LPAR3, SEMA6A, PTPRZ1, ATP1A3, CAMKV, SCNN1G, SYT6, SLC18A2, PCDHB5, ABCG2, HLA-DRA, CR1L, HTR2C, EDNRB, PCDH11X, SLC17A7, SCNN1A, CD9, CXCL16, FXYD5, GABRQ, GFRA3, CACNA2D2, CLDN4, PLP1, PDPN, MMP24, SDK2, GPR176, GPR64, GPR160, PCDH11Y, NKAIN4, ATP1B2, SCN8A, THBS4, CR2, HLA-DQA1, HLA-DRA, HTR7, SLC2A1, HLA-DRA, KCNS3, SLC7A3, HLA-DPB2, CACNA1B, and GPR143.

58. The method of claim 55, wherein said population of cells enriched in pancreatic progenitor cells expresses a transcription factor selected from the group consisting of PDX1, ngn3, pax4, hlxb9, nkx6.1, Hnf6, and sox9.

59. The method of claim 55, wherein step (b) is effected by an immunological isolation technique selected from the group consisting of fluorescent activated cell sorter (FACS), Magnetic-activated cell sorting (MACS) or immunopanning.

60. The method of claim 55, wherein presence of at least a predetermined percentage of the pancreatic progenitor cells in said cell population indicates the suitability of the pancreatic progenitor cells for transplantation in a subject.

61. A method of isolating endocrine progenitors or insulin producing cells, comprising culturing the population of cells enriched in pancreatic progenitor cells isolated by the method of claim 55, under conditions suitable for maturation of the pancreatic progenitor cells into endocrine progenitors or beta cells, thereby isolating insulin producing cells.

62. An isolated population of cells enriched in pancreatic progenitor cells obtained according to the method of claim 55.

63. The isolated population of cells enriched in pancreatic progenitor cells of claim 62, wherein said pancreatic progenitor cells are genetically unmodified.

64. An isolated population of pancreatic progenitor cells, comprising at least about 50% of cells having a TROP-2+ and/or TROP-2+/GPR50+ expression pattern.

65. The isolated population of pancreatic progenitor cells of claim 64, wherein said cells are further characterized by the expression of at least one transcription factor selected from the group consisting of PDX1, ngn3, pax4, hlxb9, nkx6.1, Hnf6, and sox9.

66. The isolated population of pancreatic progenitor cells of claim 64, wherein said cells are obtained by the method comprising the steps of:
(a) detecting in a population of cells comprising pancreatic progenitor cells, cells that express at least one marker selected from the group consisting of TROP-2 and/or GPR50, and an additional marker selected from the group consisting of BST2, NTRK2, ITGA4, KDR, PTPRN, LGI1, VIPR2, SLC2A1, MUC15, MUC12, LPHN3, MUC16, VTCN1, MMP16, FZD3, ITGB6, GFRA3, ROBO1, NLGN1, MUC12, CNTFR, LPHN1, SULF1, ADAM23, SCUBE3, PLAU, CDON, SLIT2, C7orf68, PLXDC2, CD74, GPR56, AREG, BOC, KLRK1, PRTG, PTPRZ1, GABRP, SILV, KIAA1772, PLP1, OVOS, HAPLN1, EPHA7, ENO2, PCDHB5, OVOS, SYT1, DCT, GPAM, SLITRK6, DCC, FREM2, SDK2, CGA, ATP1B2, SEMA3D, PCDHB15, CDH1, WNT8B, LPAR4, NPIPL3, FAM171B, PTN, ABCC2, ADAMTS3, RASA4, CPT1C, SLC6A6, PCDHB3, LRRC37B, RNFT2, KCNG3, TRPC1, ALPPL2, OR4F21, CCL2, KIF5A, OLFM2, CACNG7, MPHOSPH9, SLC13A4, MOXD1, C6orf186, SLC4A8, STX16, AMY2A, SPARCL1, MGP, A2M, DCN, ATP8B1, MMRN1, EMP1, PLA2G2A, PDE3A, TLR3, CYP1B1, PTGIS, RFTN2, PLEKHA2, SMOC1, STOM, JAM2, CHL1, SCG5, IGFBP7, NPR3, IFI6, CR1L, OR2A4, OR2A7, KCNG3, CACNG7, GRID2, CDH1, LPAR3, SEMA6A, PTPRZ1, ATP1A3, CAMKV, SCNN1G, SYT6, SLC18A2, PCDHB5, ABCG2, HLA-DRA, CR1L, HTR2C, EDNRB, PCDH11X, SLC17A7, SCNN1A, CD9, CXCL16, FXYD5, GABRQ, GFRA3, CACNA2D2, CLDN4, PLP1, PDPN, MMP24, SDK2, GPR176, GPR64, GPR160, PCDH11Y, NKAIN4, ATP1B2, SCN8A, THBS4, CR2, HLA-DQA1, HLA-DRA, HTR7, SLC2A1, HLA-DRA, KCNS3, SLC7A3, HLA-DPB2, CACNA1B, and GPR143, and
(b) isolating the cells expressing said at least one marker detected according to step (a) to thereby obtain an isolated population of cells enriched in pancreatic progenitor cells,
thereby isolating the population of cells enriched in pancreatic progenitor cells.

67. The isolated population of pancreatic progenitor cells of claim 64, wherein said pancreatic progenitor cells are genetically unmodified.

68. A method of isolating a population of cells enriched in definite endodermal cells, comprising:
(a) detecting in a population of cells comprising definite endodermal cells, cells that express at least one marker selected from the group consisting of BST2, FLRT3, COLEC12, GPR49/LGR5 and LIF-R, and
(b) isolating the cells expressing said at least one marker detected according to step (a) to thereby obtain an isolated population of cells enriched in definite endodermal cells,
thereby isolating a population of cells enriched in definite endodermal cells.

69. The method of claim 68, wherein said definite endodermal cells are further characterized by a SOX17+ or SOX17+/SOX7+ expression signature.

70. The method of claim 68, wherein said definite endodermal cells are further characterized by the expression of at least one marker selected from the group consisting of SOX17, SOX7, GSC, CER, FOXA2, CD34 and CXCR4; and a NANOG-expression signature.

71. The method of claim 68, wherein step (b) is by an immunological isolation assay technique selected from the group consisting of fluorescent activated cell sorter (FACS), Magnetic-activated cell sorting (MACS) or immunopanning.

72. An isolated population of cells enriched in definite endodermal cells obtained according to the method of claim 68.

73. The isolated population of cells enriched in definite endodermal cells of claim 72, comprising at least about 50% of cells having a SOX17+ or SOX17+150X7+ expression pattern.

74. The isolated population of cells enriched in definite endodermal cells of claim 72, wherein said definite endodermal cells are characterized by the expression of at least one marker selected from the group consisting of SOX17, SOX7, GSC, CER, FOXA2, CD34 and CXCR4; and a NANOG-expression signature.
